United States Patent Application Publication US 2011/0183924 A1 - sequence listing, part 114

SEQ ID NO: 330748 - DNA, 2040 bp, Homo sapiens
ggggccggggggcggagccttgcgggctggagcgaaagaatgcgggggctgagcggagaagcggctcgaggctggaagaggatcctgggcgccgccaggttctgtggacaatcacaatgggaatccaaggagggtctgtcctgttcgggctgctgctcgtcctggctgtcttctgccattcaggtcatagcctgcagtgctacaactgtcctaacccaactgctgactgcaaaacagccgtcaattgttcatctgattttgatgcgtgtctcattaccaaagctgggttacaagtgtataacaagtgttggaagtttgagcattgcaatttcaacgacgtcacaacccgcttgagggaaaatgagctaacgtactactgctgcaagaaggacctgtgtaactttaacgaacagcttgaaaatggtgggacatccttatcagagaaaacagttcttctgctggtgactccatttctggcagcagcctggagccttcatccctaagtcaacaccaggagagcttctcccaaactccccgttcctgcgtagtccgctttctcttgctgccacattctaaaggcttgatattttccaaatggatcctgttgggaaagaataaaattagcttgagcaacctggctaagatagaggggctctgggagactttgaagaccagtcctgtttgcagggaagccccacttgaaggaagaagtctaagagtgaagtaggtgtgacttgaactagattgcatgcttcctcctttgctcttgggaagaccagctttgcagtgacagcttgagtgggttctctgcagccctcagattatttttcctctggctccttggatgtagtcagttagcatcattagtacatctttggagggtggggcaggagtatatgagcatcctctctcacatggaacgctttcataaacttcagggatcccgtgttgccatggaggcatgccaaatgttccatatgtgggtgtcagtcagggacaacaagatccttaatgcagagctagaggacttctggcagggaagtggggaagtgttccagatagcagggcatgaaaacttagagaggtacaagtggctgaaaatcgagtttttcctctgtctttaaattttatatgggctttgttatcttccactggaaaagtgtaatagcatacatcaatggtgtgttaaagctatttccttgccttttttttattggaatggtaggatatcttggctttgccacacacagttacagagtgaacactctactacatgtgactggcagtattaagtgtgcttattttaaatgttactggtagaaaggcagttcaggtatgtgtgtatatagtatgaatgcagtggggacaccctttgtggttacagtttgagacttccaaaggtcatccttaataacaacagatctgcaggggtatgttttaccatctgcatccagcctcctgctaactcctagctgactcagcatagattgtataaaatacctttgtaacggctcttagcacactcacagatgtttgaggctttcagaagctcttctaaaaaatgatacacacctttcacaagggcaaactttttccttttccctgtgtattctagtgaatgaatctcaagattcagtagacctaatgacatttgtattttatgatcttggctgtatttaatggcataggctgacttttgcagatggaggaatttcttgattaatgttgaaaaaaaacccttgattatactctgttggacaaaccgagtgcaatgaatgatgcttttctgaaaatgaaatataacaagtgggtgaatgtggttatggccgaaaaggatatgcagtatgcttaatggtagcaactgaaagaagacatcctgagcagtgccagctttcttctgttgatgccgttccccctgaaaccattaggggacaacattaaggaaacagcttgccctctactcaaaaaacgtttaggcaaacagacacacccacaccaacaaacaacccccacacgccccacacacacacacagagcaaa

SEQ ID NO: 330749 - DNA, 1997 bp, Homo sapiens
ggggccggggggcggagccttgcgggctggagcgaaagaatgcgggggctgagcggagaagcggctcgaggctggaagaggatcctgggcgccgccagtctttagcaccagttggtgtaggagttgagacctacttcacagtagttctgtggacaatcacaatgggaatccaaggagggtctgtcctgttcgggctgctgctcgtcctggctgtcttctgccattcaggtcatagcctgcagtgctacaactgtcctaacccaactgctgactgcaaaacagccgtcaattgttcatctgattttgatgcgtgtctcattaccaaagctgggttacaagtgtataacaagtgttggaagtttgagcattgcaatttcaacgacgtcacaacccgcttgagggaaaatgagctaacgtactactgctgcaagaaggacctgtgtaactttaacgaacagcttgaaaatggtgggacatccttatcagagaaaacagttcttctgctggtgactccatttctggcagcagcctggagccttcatccctaagtcaacaccaggagagcttctcccaaactccccgttcctgcgtagtccgctttctcttgctgccacattctaaaggcttgatattttccaaatggatcctgttgggaaagaataaaattagcttgagcaacctggctaagatagaggggctctgggagactttgaagaccagtcctgtttgcagggaagccccacttgaaggaagaagtctaagagtgaagtaggtgtgacttgaactagattgcatgcttcctcctttgctcttgggaagaccagctttgcagtgacagcttgagtgggttctctgcagccctcagattatttttcctctggctccttggatgtagtcagttagcatcattagtacatctttggagggtggggcaggagtatatgagcatcctctctcacatggaacgctttcataaacttcagggatcccgtgttgccatggaggcatgccaaatgttccatatgtgggtgtcagtcagggacaacaagatccttaatgcagagctagaggacttctggcagggaagtggggaagtgttccagatagcagggcatgaaaacttagagaggtacaagtggctgaaaatcgagtttttcctctgtctttaaattttatatgggctttgttatcttccactggaaaagtgtaatagcatacatcaatggtgtgttaaagctatttccttgccttttttttattggaatggtaggatatcttggctttgccacacacagttacagagtgaacactctactacatgtgactggcagtattaagtgtgcttattttaaatgttactggtagaaaggcagttcaggtatgtgtgtatatagtatgaatgcagtggggacaccctttgtggttacagtttgagacttccaaaggtcatccttaataacaacagatctgcaggggtatgttttaccatctgcatccagcctcctgctaactcctagctgactcagcatagattgtataaaatacctttgtaacggctcttagcacactcacagatgtttgaggctttcagaagctcttctaaaaaatgatacacacctttcacaagggcaaactttttccttttccctgtgtattctagtgaatgaatctcaagattcagtagacctaatgacatttgtattttatgatcttggctgtatttaatggcataggctgacttttgcagatggaggaatttcttgattaatgttgaaaaaaaacccttgattatactctgttggacaaaccgagtgcaatgaatgatgcttttctgaaaatgaaatataacaagtgggtgaatgtggttatggccgaaaaggatatgcagtatgcttaatggtagcaactgaaagaagacatcctgagcagtgccagctttcttctgttgatgccgttccctgaacataggaaaatagaaacttgcttatcaaaactca

SEQ ID NO: 330750 - DNA, 1602 bp, Homo sapiens
ggggccggggggcggagccttgcgggctggagcgaaagaatgcgggggctgagcggagaagcggctcgaggctggaagaggatcctgggcgccgccaggttctgtggacaatcacaatgggaatccaaggagggtctgtcctgttcgggctgctgctcgtcctggctgtcttctgccattcaggtcatagcctgcagtgctacaactgtcctaacccaactgctgactgcaaaacagccgtcaattgttcatctgattttgatgcgtgtctcattaccaaagctgggttacaagtgtataacaagtgttggaagtttgagcattgcaatttcaacgacgtcacaacccgcttgagggaaaatgagctaacgtactactgctgcaagaaggacctgtgtaactttaacgaacagcttgaaaatggtgggacatccttatcagagaaaacagttcttctgctggtgactccatttctggcagcagcctggagccttcatccctaagtcaacaccaggagagcttctcccaaactccccgttcctgcgtagtccgctttctcttgctgccacattctaaaggcttgatattttccaaatggatcctgttgggaaagaataaaattagcttgagcaacctggctaagatagaggggctctgggagactttgaagaccagtcctgtttgcagggaagccccacttgaaggaagaagtctaagagtgaagtaggtgtgacttgaactagattgcatgcttcctcctttgctcttgggaagaccagctttgcagtgacagcttgagtgggttctctgcagccctcagattatttttcctctggctccttggatgtagtcagttagcatcattagtacatctttggagggtggggcaggagtatatgagcatcctctctcacatggaacgctttcataaacttcagggatcccgtgttgccatggaggcatgccaaatgttccatatgtgggtgtcagtcagggacaacaagatccttaatgcagagctagaggacttctggcagggaagtggggaagtgttccagatagcagggcatgaaaacttagagaggtacaagtggctgaaaatcgagtttttcctctgtctttaaattttatatgggctttgttatcttccactggaaaagtgtaatagcatacatcaatggtgtgttaaagctatttccttgccttttttttattggaatggtaggatatcttggctttgccacacacagttacagagtgaacactctactacatgtgactggcagtattaagtgtgcttattttaaatgttactggtagaaaggcagttcaggtatgtgtgtatatagtatgaatgcagtggggacaccctttgtggttacagtttgagacttccaaaggtcatccttaataacaacagatctgcaggggtatgttttaccatctgcatccagcctcctgctaactcctagctgactcagcatagattgtataaaatacctttgtaacggctcttagcacactcacagatgtttgaggctttcagaagctcttctaaaaaatgatacacacaggcccaagatgagggtaccgagctcgaat

SEQ ID NO: 330751 - DNA, 2125 bp, Homo sapiens
aatttttgactcactgaccctgatggggaagatagtgttattcccacagtgtggtagtacacactggggcttatagggactgagcctactcaagggtatatggtgctgtgggtcagagctggggcatggcccagggattcagtgtgccttgactccccctgtaaatgttcctctcagaagccttcttggccttccagcccttggtttttgagacaaccagcagtcatttgttcgttcctgacattccttcctgtcccttccttccaggttcgttctgtggacaatcacaatgggaatccaaggagggtctgtcctgttcgggctgctgctcgtcctggctgtcttctgccattcaggtcatagcctgcagtgctacaactgtcctaacccaactgctgactgcaaaacagccgtcaattgttcatctgattttgatgcgtgtctcattaccaaagctgggttacaagtgtataacaagtgttggaagtttgagcattgcaatttcaacgacgtcacaacccgcttgagggaaaatgagctaacgtactactgctgcaagaaggacctgtgtaactttaacgaacagcttgaaaatggtgggacatccttatcagagaaaacagttcttctgctggtgactccatttctggcagcagcctggagccttcatccctaagtcaacaccaggagagcttctcccaaactccccgttcctgcgtagtccgctttctcttgctgccacattctaaaggcttgatattttccaaatggatcctgttgggaaagaataaaattagcttgagcaacctggctaagatagaggggctctgggagactttgaagaccagtcctgtttgcagggaagccccacttgaaggaagaagtctaagagtgaagtaggtgtgacttgaactagattgcatgcttcctcctttgctcttgggaagaccagctttgcagtgacagcttgagtgggttctctgcagccctcagattatttttcctctggctccttggatgtagtcagttagcatcattagtacatctttggagggtggggcaggagtatatgagcatcctctctcacatggaacgctttcataaacttcagggatcccgtgttgccatggaggcatgccaaatgttccatatgtgggtgtcagtcagggacaacaagatccttaatgcagagctagaggacttctggcagggaagtggggaagtgttccagatagcagggcatgaaaacttagagaggtacaagtggctgaaaatcgagtttttcctctgtctttaaattttatatgggctttgttatcttccactggaaaagtgtaatagcatacatcaatggtgtgttaaagctatttccttgccttttttttattggaatggtaggatatcttggctttgccacacacagttacagagtgaacactctactacatgtgactggcagtattaagtgtgcttattttaaatgttactggtagaaaggcagttcaggtatgtgtgtatatagtatgaatgcagtggggacaccctttgtggttacagtttgagacttccaaaggtcatccttaataacaacagatctgcaggggtatgttttaccatctgcatccagcctcctgctaactcctagctgactcagcatagattgtataaaatacctttgtaacggctcttagcacactcacagatgtttgaggctttcagaagctcttctaaaaaatgatacacacctttcacaagggcaaactttttccttttccctgtgtattctagtgaatgaatctcaagattcagtagacctaatgacatttgtattttatgatcttggctgtatttaatggcataggctgacttttgcagatggaggaatttcttgattaatgttgaaaaaaaacccttgattatactctgttggacaaaccgagtgcaatgaatgatgcttttctgaaaatgaaatataacaagtgggtgaatgtggttatggccgaaaaggatatgcagtatgcttaatggtagcaactgaaagaagacatcctgagcagtgccagctttcttctgttgatgccgttccctgaacataggaaaatagaaacttgcttatcaaaactca

SEQ ID NO: 330752 - DNA, 1914 bp, Homo sapiens
aatacggctagtacgaggccggtgttaatcggccgaggagaggatcctgggcgccgccaggttctgtggacaatcacaatgggaatccaaggagggtctgtcctgttcgggctgctgctcgtcctggctgtcttctgccattcaggtcatagcctgcagtgctacaactgtcctaacccaactgctgactgcaaaacagccgtcaattgttcatctgattttgatgcgtgtctcattaccaaagctgggttacaagtgtataacaagtgttggaagtttgagcattgcaatttcaacgacgtcacaacccgcttgagggaaaatgagctaacgtactactgctgcaagaaggacctgtgtaactttaacgaacagcttgaaaatggtgggacatccttatcagagaaaacagttcttctgctggtgactccatttctggcagcagcctggagccttcatccctaagtcaacaccaggagagcttctcccaaactccccgttcctgcgtagtccgctttctcttgctgccacattctaaaggcttgatattttccaaatggatcctgttgggaaagaataaaattagcttgagcaacctggctaagatagaggggctctgggagactttgaagaccagtcctgtttgcagggaagccccacttgaaggaagaagtctaagagtgaagtaggtgtgacttgaactagattgcatgcttcctcctttgctcttgggaagaccagctttgcagtgacagcttgagtgggttctctgcagccctcagattatttttcctctggctccttggatgtagtcagttagcatcattagtacatctttggagggtggggcaggagtatatgagcatcctctctcacatggaacgctttcataaacttcagggatcccgtgttgccatggaggcatgccaaatgttccatatgtgggtgtcagtcagggacaacaagatccttaatgcagagctagaggacttctggcagggaagtggggaagtgttccagatagcagggcatgaaaacttagagaggtacaagtggctgaaaatcgagtttttcctctgtctttaaattttatatgggctttgttatcttccactggaaaagtgtaatagcatacatcaatggtgtgttaaagctatttccttgccttttttttattggaatggtaggatatcttggctttgccacacacagttacagagtgaacactctactacatgtgactggcagtattaagtgtgcttattttaaatgttactggtagaaaggcagttcaggtatgtgtgtatatagtatgaatgcagtggggacaccctttgtggttacagtttgagacttccaaaggtcatccttaataacaacagatctgcaggggtatgttttaccatctgcatccagcctcctgctaactcctagctgactcagcatagattgtataaaatacctttgtaacggctcttagcacactcacagatgtttgaggctttcagaagctcttctaaaaaatgatacacacctttcacaagggcaaactttttccttttccctgtgtattctagtgaatgaatctcaagattcagtagacctaatgacatttgtattttatgatcttggctgtatttaatggcataggctgacttttgcagatggaggaatttcttgattaatgttgaaaaaaaacccttgattatactctgttggacaaaccgagtgcaatgaatgatgcttttctgaaaatgaaatataacaagtgggtgaatgtggttatggccgaaaaggatatgcagtatgcttaatggtagcaactgaaagaagacatcctgagcagtgccagctttcttctgttgatgccgttccctgaacataggaaaatagaaacttgcttatcaaaactca

SEQ ID NO: 330753 - DNA, 2014 bp, Homo sapiens
aatttttgactcactgaccctgatggggaagatagtgttattcccacagtgtggtagtacacactggggcttatagggactgagcctactcaagggtatatggtgctgtgggtcagagctggggcatggcccagggattcagtgtgccttgactccccctgttctgtggacaatcacaatgggaatccaaggagggtctgtcctgttcgggctgctgctcgtcctggctgtcttctgccattcaggtcatagcctgcagtgctacaactgtcctaacccaactgctgactgcaaaacagccgtcaattgttcatctgattttgatgcgtgtctcattaccaaagctgggttacaagtgtataacaagtgttggaagtttgagcattgcaatttcaacgacgtcacaacccgcttgagggaaaatgagctaacgtactactgctgcaagaaggacctgtgtaactttaacgaacagcttgaaaatggtgggacatccttatcagagaaaacagttcttctgctggtgactccatttctggcagcagcctggagccttcatccctaagtcaacaccaggagagcttctcccaaactccccgttcctgcgtagtccgctttctcttgctgccacattctaaaggcttgatattttccaaatggatcctgttgggaaagaataaaattagcttgagcaacctggctaagatagaggggctctgggagactttgaagaccagtcctgtttgcagggaagccccacttgaaggaagaagtctaagagtgaagtaggtgtgacttgaactagattgcatgcttcctcctttgctcttgggaagaccagctttgcagtgacagcttgagtgggttctctgcagccctcagattatttttcctctggctccttggatgtagtcagttagcatcattagtacatctttggagggtggggcaggagtatatgagcatcctctctcacatggaacgctttcataaacttcagggatcccgtgttgccatggaggcatgccaaatgttccatatgtgggtgtcagtcagggacaacaagatccttaatgcagagctagaggacttctggcagggaagtggggaagtgttccagatagcagggcatgaaaacttagagaggtacaagtggctgaaaatcgagtttttcctctgtctttaaattttatatgggctttgttatcttccactggaaaagtgtaatagcatacatcaatggtgtgttaaagctatttccttgccttttttttattggaatggtaggatatcttggctttgccacacacagttacagagtgaacactctactacatgtgactggcagtattaagtgtgcttattttaaatgttactggtagaaaggcagttcaggtatgtgtgtatatagtatgaatgcagtggggacaccctttgtggttacagtttgagacttccaaaggtcatccttaataacaacagatctgcaggggtatgttttaccatctgcatccagcctcctgctaactcctagctgactcagcatagattgtataaaatacctttgtaacggctcttagcacactcacagatgtttgaggctttcagaagctcttctaaaaaatgatacacacctttcacaagggcaaactttttccttttccctgtgtattctagtgaatgaatctcaagattcagtagacctaatgacatttgtattttatgatcttggctgtatttaatggcataggctgacttttgcagatggaggaatttcttgattaatgttgaaaaaaaacccttgattatactctgttggacaaaccgagtgcaatgaatgatgcttttctgaaaatgaaatataacaagtgggtgaatgtggttatggccgaaaaggatatgcagtatgcttaatggtagcaactgaaagaagacatcctgagcagtgccagctttcttctgttgatgccgttccctgaacataggaaaatagaaacttgcttatcaaaactca

SEQ ID NO: 330754 - DNA, 2058 bp, Homo sapiens
  misc_feature (10)..(10): n is a, c, g, or t
  misc_feature (25)..(25): n is a, c, g, or t
tggttcgatnatcgaccccttaggnatttgcctcgggcaagattcggcacgagcgaaggctggaagaggatcttgggcgccgccagagtctctctctgttgcccaagctggagtgcagtggcacagtcttggctcactgcaacctccacctcctgggtgcaagcgattctcgtgtctcagcctctcaagtagctgggattacaggttctgtggacaatcacaatgggaatccaaggagggtctgtcctgttcgggctgctgctcgtcctggctgtcttctgccattcaggtcatagcctgcagtgctacaactgtcctaacccaactgctgactgcaaaacagccgtcaattgttcatctgattttgatgcgtgtctcattaccaaagctgggttacaagtgtataacaagtgttggaagtttgagcattgcaatttcaacgacgtcacaacccgcttgagggaaaatgagctaacgtactactgctgcaagaaggacctgtgtaactttaacgaacagcttgaaaatggtgggacatccttatcagagaaaacagttcttctgctggtgactccatttctggcagcagcctggagccttcatccctaagtcaacaccaggagagcttctcccaaactccccgttcctgcgtagtccgctttctcttgctgccacattctaaaggcttgatattttccaaatggatcctgttgggaaagaataaaattagcttgagcaacctggctaagatagaggggctctgggagactttgaagaccagtcctgtttgcagggaagccccacttgaaggaagaagtctaagagtgaagtaggtgtgacttgaactagattgcatgcttcctcctttgctcttgggaagaccagctttgcagtgacagcttgagtgggttctctgcagccctcagattatttttcctctggctccttggatgtagtcagttagcatcattagtacatctttggagggtggggcaggagtatatgagcatcctctctcacatggaacgctttcataaacttcagggatcccgtgttgccatggaggcatgccaaatgttccatatgtgggtgtcagtcagggacaacaagatccttaatgcagagctagaggacttctggcagggaagtggggaagtgttccagatagcagggcatgaaaacttagagaggtacaagtggctgaaaatcgagtttttcctctgtctttaaattttatatgggctttgttatcttccactggaaaagtgtaatagcatacatcaatggtgtgttaaagctatttccttgccttttttttattggaatggtaggatatcttggctttgccacacacagttacagagtgaacactctactacatgtgactggcagtattaagtgtgcttattttaaatgttactggtagaaaggcagttcaggtatgtgtgtatatagtatgaatgcagtggggacaccctttgtggttacagtttgagacttccaaaggtcatccttaataacaacagatctgcaggggtatgttttaccatctgcatccagcctcctgctaactcctagctgactcagcatagattgtataaaatacctttgtaacggctcttagcacactcacagatgtttgaggctttcagaagctcttctaaaaaatgatacacacctttcacaagggcaaactttttccttttccctgtgtattctagtgaatgaatctcaagattcagtagacctaatgacatttgtattttatgatcttggctgtatttaatggcataggctgacttttgcagatggaggaatttcttgattaatgttgaaaaaaaacccttgattatactctgttggacaaaccgagtgcaatgaatgatgcttttctgaaaatgaaatataacaagtgggtgaatgtggttatggccgaaaaggatatgcagtatgcttaatggtagcaactgaaagaagacatcctgagcagtgccagctttcttctgttgatgccgttccctgaacataggaaaatagaaacttgcttatcaaaactca

SEQ ID NO: 330755 - DNA, 2264 bp, Homo sapiens
ttaacactttttaaaaattaatggactgggtttttcaggtttttttctgaccattcttgagcatatatcttatacatagctttggctgggcatggtggctcacccctataattctatcactttgggaggctgaagcaggaggaccacttgagcccaggagttcaagaccagatgaccgggcaagaaagtgagaccttatctctctaaaaaaaaaaaaaaagaagaaaaggaaaaaatccccaagtaacttcatagcataaattctaaaagtggaattgctggatcaaagggggcatgtgtttaaaatcttggcagatattaccaaatttccctcttaacagtataaatgcctgttcctcctccgtcccacccccataactatactggctctgatgagaccttggttttctgtaaaagctctatttagaggtgtatcattatttacttaattgttctcctttacaacccacctgggatgagcatcttgcctagaagtctctacttgcacaggatacatacgaaatagaattgaggattcaaaagcagatacagaactcttcccacttactttcttacccttgtgtgtgtctccccacaggttacaagtgtataacaagtgttggaagtttgagcattgcaatttcaacgacgtcacaacccgcttgagggaaaatgagctaacgtactactgctgcaagaaggacctgtgtaactttaacgaacagcttgaaaatggtgggacatccttatcagagaaaacagttcttctgctggtgactccatttctggcagcagcctggagccttcatccctaagtcaacaccaggagagcttctcccaaactccccgttcctgcgtagtccgctttctcttgctgccacattctaaaggcttgatattttccaaatggatcctgttgggaaagaataaaattagcttgagcaacctggctaagatagaggggctctgggagactttgaagaccagtcctgtttgcagggaagccccacttgaaggaagaagtctaagagtgaagtaggtgtgacttgaactagattgcatgcttcctcctttgctcttgggaagaccagctttgcagtgacagcttgagtgggttctctgcagccctcagattatttttcctctggctccttggatgtagtcagttagcatcattagtacatctttggagggtggggcaggagtatatgagcatcctctctcacatggaacgctttcataaacttcagggatcccgtgttgccatggaggcatgccaaatgttccatatgtgggtgtcagtcagggacaacaagatccttaatgcagagctagaggacttctggcagggaagtggggaagtgttccagatagcagggcatgaaaacttagagaggtacaagtggctgaaaatcgagtttttcctctgtctttaaattttatatgggctttgttatcttccactggaaaagtgtaatagcatacatcaatggtgtgttaaagctatttccttgccttttttttattggaatggtaggatatcttggctttgccacacacagttacagagtgaacactctactacatgtgactggcagtattaagtgtgcttattttaaatgttactggtagaaaggcagttcaggtatgtgtgtatatagtatgaatgcagtggggacaccctttgtggttacagtttgagacttccaaaggtcatccttaataacaacagatctgcaggggtatgttttaccatctgcatccagcctcctgctaactcctagctgactcagcatagattgtataaaatacctttgtaacggctcttagcacactcacagatgtttgaggctttcagaagctcttctaaaaaatgatacacacctttcacaagggcaaactttttccttttccctgtgtattctagtgaatgaatctcaagattcagtagacctaatgacatttgtattttatgatcttggctgtatttaatggcataggctgacttttgcagatggaggaatttcttgattaatgttgaaaaaaaacccttgattatactctgttggacaaaccgagtgcaatgaatgatgcttttctgaaaatgaaatataacaagtgggtgaatgtggttatggccgaaaaggatatgcagtatgcttaatggtagcaactgaaagaagacatcctgagcagtgccagctttcttctgttgatgccgttccctgaacataggaaaatagaaacttgcttatcaaaactca

SEQ ID NO: 330756 - DNA, 2119 bp, Homo sapiens
ggggccggggggcggagccttgcgggctggagcgaaagaatgcgggggctgagcggagaagcggctcgaggctggaagaggatcctgggcgccgccagtctttagcaccagttggtgtaggagttgagacctacttcacagtagttctgtggacaatcacaatgggaatccaaggagggtctgtcctgttcgggctgctgctcgtcctggctgtcttctgccattcaggtcatagcctgcagtgctacaactgtcctaacccaactgctgactgcaaaacagccgtcaattgttcatctgattttgatgcgtgtctcattaccaaagctgagttgggatatcactatgttgcccaggctggccgcaggcaatcctctcacttcagcctcctaaagtgctgggattacaggtgtgagccatcacactggcctcattgtccatattttaattggggttacaagtgtataacaagtgttggaagtttgagcattgcaatttcaacgacgtcacaacccgcttgagggaaaatgagctaacgtactactgctgcaagaaggacctgtgtaactttaacgaacagcttgaaaatggtgggacatccttatcagagaaaacagttcttctgctggtgactccatttctggcagcagcctggagccttcatccctaagtcaacaccaggagagcttctcccaaactccccgttcctgcgtagtccgctttctcttgctgccacattctaaaggcttgatattttccaaatggatcctgttgggaaagaataaaattagcttgagcaacctggctaagatagaggggctctgggagactttgaagaccagtcctgtttgcagggaagccccacttgaaggaagaagtctaagagtgaagtaggtgtgacttgaactagattgcatgcttcctcctttgctcttgggaagaccagctttgcagtgacagcttgagtgggttctctgcagccctcagattatttttcctctggctccttggatgtagtcagttagcatcattagtacatctttggagggtggggcaggagtatatgagcatcctctctcacatggaacgctttcataaacttcagggatcccgtgttgccatggaggcatgccaaatgttccatatgtgggtgtcagtcagggacaacaagatccttaatgcagagctagaggacttctggcagggaagtggggaagtgttccagatagcagggcatgaaaacttagagaggtacaagtggctgaaaatcgagtttttcctctgtctttaaattttatatgggctttgttatcttccactggaaaagtgtaatagcatacatcaatggtgtgttaaagctatttccttgccttttttttattggaatggtaggatatcttggctttgccacacacagttacagagtgaacactctactacatgtgactggcagtattaagtgtgcttattttaaatgttactggtagaaaggcagttcaggtatgtgtgtatatagtatgaatgcagtggggacaccctttgtggttacagtttgagacttccaaaggtcatccttaataacaacagatctgcaggggtatgttttaccatctgcatccagcctcctgctaactcctagctgactcagcatagattgtataaaatacctttgtaacggctcttagcacactcacagatgtttgaggctttcagaagctcttctaaaaaatgatacacacctttcacaagggcaaactttttccttttccctgtgtattctagtgaatgaatctcaagattcagtagacctaatgacatttgtattttatgatcttggctgtatttaatggcataggctgacttttgcagatggaggaatttcttgattaatgttgaaaaaaaacccttgattatactctgttggacaaaccgagtgcaatgaatgatgcttttctgaaaatgaaatataacaagtgggtgaatgtggttatggccgaaaaggatatgcagtatgcttaatggtagcaactgaaagaagacatcctgagcagtgccagctttcttctgttgatgccgttccctgaacataggaaaatagaaacttgcttatcaaaactca

SEQ ID NO: 330757 - DNA, 1893 bp, Homo sapiens
ggggccggggggcggagccttgcgggctggagcgaaagaatgcgggggctgagcggagaagcggctcgaggctggaagaggatcctgggcgccgccaggttctgtggacaatcacaatgggaatccaaggagggtctgtcctgttcgggctgctgctcgtcctggctgtcttctgccattcaggtcatagcctgcagtgctacaactgtcctaacccaactgctgactgcaaaacagccgtcaattgttcatctgattttgatgcgtgtctcattaccaaagctgggttacaagtgtataacaagtgttggaagtttgagcattgcaatttcaacgacgtcacaacccgcttgagggaaaatgagctaacgtactactgctgcaagaaggacctgtgtaactttaacgaacagcttgaaaatggtgggacatccttatcagagaaaacagttcttctgctggtgactccatttctggcagcagcctggagccttcatccctaagtcaacaccaggagagcttctcccaaactccccgttcctgcgtagtccgctttctcttgctgccacattctaaaggcttgatattttccaaatggatcctgttgggaaagaataaaattagcttgagcaacctggctaagatagaggggctctgggagactttgagtgtgacttgaactagattgcatgcttcctcctttgctcttgggaagaccagctttgcagtgacagcttgagtgggttctctgcagccctcagattatttttcctctggctccttggatgtagtcagttagcatcattagtacatctttggagggtggggcaggagtatatgagcatcctctctcacatggaacgctttcataaacttcagggatcccgtgttgccatggaggcatgccaaatgttccatatgtgggtgtcagtcagggacaacaagatccttaatgcagagctagaggacttctggcagggaagtggggaagtgttccagatagcagggcatgaaaacttagagaggtacaagtggctgaaaatcgagtttttcctctgtctttaaattttatatgggctttgttatcttccactggaaaagtgtaatagcatacatcaatggtgtgttaaagctatttccttgccttttttttattggaatggtaggatatcttggctttgccacacacagttacagagtgaacactctactacatgtgactggcagtattaagtgtgcttattttaaatgttactggtagaaaggcagttcaggtatgtgtgtatatagtatgaatgcagtggggacaccctttgtggttacagtttgagacttccaaaggtcatccttaataacaacagatctgcaggggtatgttttaccatctgcatccagcctcctgctaactcctagctgactcagcatagattgtataaaatacctttgtaacggctcttagcacactcacagatgtttgaggctttcagaagctcttctaaaaaatgatacacacctttcacaagggcaaactttttccttttccctgtgtattctagtgaatgaatctcaagattcagtagacctaatgacatttgtattttatgatcttggctgtatttaatggcataggctgacttttgcagatggaggaatttcttgattaatgttgaaaaaaaacccttgattatactctgttggacaaaccgagtgcaatgaatgatgcttttctgaaaatgaaatataacaagtgggtgaatgtggttatggccgaaaaggatatgcagtatgcttaatggtagcaactgaaagaagacatcctgagcagtgccagctttcttctgttgatgccgttccctgaacataggaaaatagaaacttgcttatcaaaactca

SEQ ID NO: 330758 - DNA, 1788 bp, Homo sapiens
  misc_feature (10)..(10): n is a, c, g, or t
  misc_feature (25)..(25): n is a, c, g, or t
tggttcgatnatcgaccccttaggnatttgcctcgggcaagattcggcacgagcgaaggctggaagaggatcttgggcgccgccagtctttagcaccagttggtgtaggagttgagacctacttcacagtagttctgtggacaatcacaatgggaatccaaggagggtctgtcctgttcgggctgctgctcgtcctggctgtcttctgccattcaggtcatagcctgcagtgctacaactgtcctaacccaactgctgactgcaaaacagccgtcaattgttcatctgattttgatgcgtgtctcattaccaaagctgggttacaagtgtataacaagtgttggaagtttgagcattgcaatttcaacgacgtcacaacccgcttgagggaaaatgagctaacgtactactgctgcaagaaggacctgtgtaactttaacgaacagcttgaaaatggtgggacatccttatcagagaaaacagttcttctgctggtgactccatttctggcagcagcctggagccttcatccctaagtcaacaccaggagagcttctcccaaactccccgttcctgcgtagtccgctttctcttgctgccacattctaaaggcttgatattttccaaatggatcctgttgggaaagaataaaattagcttgagcaacctgggctccttggatgtagtcagttagcatcattagtacatctttggagggtggggcaggagtatatgagcatcctctctcacatggaacgctttcataaacttcagggatcccgtgttgccatggaggcatgccaaatgttccatatgtgggtgtcagtcagggacaacaagatccttaatgcagagctagaggacttctggcagggaagtggggaagtgttccagatagcagggcatgaaaacttagagaggtacaagtggctgaaaatcgagtttttcctctgtctttaaattttatatgggctttgttatcttccactggaaaagtgtaatagcatacatcaatggtgtgttaaagctatttccttgccttttttttattggaatggtaggatatcttggctttgccacacacagttacagagtgaacactctactacatgtgactggcagtattaagtgtgcttattttaaatgttactggtagaaaggcagttcaggtatgtgtgtatatagtatgaatgcagtggggacaccctttgtggttacagtttgagacttccaaaggtcatccttaataacaacagatctgcaggggtatgttttaccatctgcatccagcctcctgctaactcctagctgactcagcatagattgtataaaatacctttgtaacggctcttagcacactcacagatgtttgaggctttcagaagctcttctaaaaaatgatacacacctttcacaagggcaaactttttccttttccctgtgtattctagtgaatgaatctcaagattcagtagacctaatgacatttgtattttatgatcttggctgtatttaatggcataggctgacttttgcagatggaggaatttcttgattaatgttgaaaaaaaacccttgattatactctgttggacaaaccgagtgcaatgaatgatgcttttctgaaaatgaaatataacaagtgggtgaatgtggttatggccgaaaaggatatgcagtatgcttaatggtagcaactgaaagaagacatcctgagcagtgccagctttcttctgttgatgccgttccctgaacataggaaaatagaaacttgcttatcaaaactca

SEQ ID NO: 330759 - DNA, 1263 bp, Homo sapiens
tgatgatctgaggaggtatcagtagacagtccacctcacacgatctttacctttcacttcatctgccttcattatgcagccctagcagcactccacctcctattctgcacgaaacgggatcaaacaaccccctaggaatcacctcccattccgataaaatcaccttccacccttactacacaatcaaagacgccctcggcttacttctcttccttctctccttaatgacattgcaacacggtctctcatggatcccgtgttgccatggaggcatgccaaatgttccatatgtgggtgtcagtcagggacaacaagatccttaatgcagagctagaggacttctggcagggaagtggggaagtgttccagatagcagggcatgaaaacttagagaggtacaagtggctgaaaatcgagtttttcctctgtctttaaattttatatgggctttgttatcttccactggaaaagtgtaatagcatacatcaatggtgtgttaaagctatttccttgccttttttttattggaatggtaggatatcttggctttgccacacacagttacagagtgaacactctactacatgtgactggcagtattaagtgtgcttattttaaatgttactggtagaaaggcagttcaggtatgtgtgtatatagtatgaatgcagtggggacaccctttgtggttacagtttgagacttccaaaggtcatccttaataacaacagatctgcaggggtatgttttaccatctgcatccagcctcctgctaactcctagctgactcagcatagattgtataaaatacctttgtaacggctcttagcacactcacagatgtttgaggctttcagaagctcttctaaaaaatgatacacacctttcacaagggcaaactttttccttttccctgtgtattctagtgaatgaatctcaagattcagtagacctaatgacatttgtattttatgatcttggctgtatttaatggcataggctgacttttgcagatggaggaatttcttgattaatgttgaaaaaaaacccttgattatactctgttggacaaaccgagtgcaatgaatgatgcttttctgaaaatgaaatataacaagtgggtgaatgtggttatggccgaaaaggatatgcagtatgcttaatggtagcaactgaaagaagacatcctgagcagtgccagctttcttctgttgatgccgttccctgaacataggaaaatagaaacttgcttatcaaaactca

SEQ ID NO: 330760 - DNA, 2324 bp, Homo sapiens
ggggccggggggcggagccttgcgggctggagcgaaagaatgcgggggctgagcggagaagcggctcgaggctggaagaggatcctgggcgccgccaggttctgtggacaatcacaatgggaatccaaggagggtctgtcctgttcgggctgctgctcgtcctggctgtcttctgccattcaggtcatagcctgcagtgctacaactgtcctaacccaactgctgactgcaaaacagccgtcaattgttcatctgattttgatgcgtgtctcattaccaaagctgggttacaagtgtataacaagtgttggaagtttgagcattgcaatttcaacgacgtcacaacccgcttgagggaaaatgagctaacgtactactgctgcaagaaggacctgtgtaactttaacgaacagcttgaaaatggtgggacatccttatcagagaaaacagttcttctgctggtgactccatttctggcagcagcctggagccttcatccctaagtcaacaccaggagagcttctcccaaactccccgttcctgcgtagtccgctttctcttgctgccacattctaaaggcttgatattttccaaatggatcctgttgggaaagaataaaattagcttgagcaacctgaaaaaaaaaaaaaaaacaaaaaaaacaaccacccaacaacaaaaaaaaaaaaacaaaacaaaaacttgtgttgggcgcgcctcggcgcccccgaaaaagagttttccaaacaccacttggggggggcggcgggggcgccccagatggagttcgctagaaaagtgggcgcacgagggtgtccccccgagaagacacccgcggcacatagaaacagtcgggcggcggggtggttcccaccccaaataaaaaaaaacgggcggggggggaacccacacgcagctcgtgttcgagagaccaaacacacagcagggggggcgacgcagggacgacgacagggcggctcatcacccgaaggaaggacccacagcgcgcggcgtcacggatataattatcgcccgcgcccgcggcggctgcagaagcacagagagtgacaagacagaagcagctacacaaagcaacatcagaacagacgaggacaaaaggacgagagggaaacaagggagggaggagaacagagaaagaaaaggaagagagacaaaagaagaggagagcaggaaaaggaaggcaaggaaccgaaagaaaagggagacaagagcgcaaaaggacaggagcaaacaggagaagcgaacgaggaagagcagagagcagggagcaagagcaaggaaaggacgagccgagggcggagcgaacagacccacgccagcaagaatgagaacggaagaagacagagaacagcagaacgggagagaagggagagagaggagaagcaggcggcaggacagagagaggaccgaggcgagggagggagagcagcgggaaggcaagagagaggagaggacgagagacgagagaggacggagaacaagaggagagagaggaggggaggcgaggagcgagagaggcagacggcgcgaagggaggaggagagggagaggaggagaagaagagagagcaggaggaggcagagacaacggggagagggggagagaggagagggagcaagaagagaaagaagagacacggaggagaaagaagcagagaagaaagagaagagaggcaaaagagagcaagagggaaaaaagggagacaacggacggaatgagaaggaagaggaagagagagaggagagagaggagaggagggagcgcagaggagaaggaagaagggagacgaggagaagacagaacgaggaagggaagaaaagaagaagaggaacgagagagagagaaggagacgcgaatggagaggaggtaggagcagacagaagagaggagaggaacggagagaggcagaggaggcggtagaggagaaacaaagagaagaggaagcagaaacgaagaggaaagagagagaaagaaagaaagcagagagcacgaacggagacgagagcagaggacagcacgacgatcgagacagagcagacgcagacgggagagaagactaagagcacacgaggagcaagaaatagagacgaaaagcagaaacaaaaggagaaagaacagaaacagactaaaacgagaaaaaaagaggaccacaaagagagaagaacggagaggcagaaaacaagagaaaacagagacaggaagacaaggaaacgaggggacacaagaacgacaagcaaacaacaacgagcagagaagcaaaaagaagacagaggaaaagagaagaggaggagaagagagaaaca

SEQ ID NO: 330761 - DNA, 2290 bp, Homo sapiens
ggggccggggggcggagccttgcgggctggagcgaaagaatgcgggggctgagcggagaagcggctcgaggctggaagaggatcctgggcgccgccaggttctgtggacaatcacaatgggaatccaaggagggtctgtcctgttcgggctgctgctcgtcctggctgtcttctgccattcaggtcatagcctgcagtgctacaactgtcctaacccaactgctgactgcaaaacagccgtcaattgttcatctgattttgatgcgtgtctcattaccaaagctgggttacaagtgtataacaagtgttggaagtttgagcattgcaatttcaacgacgtcacaacccgcttgagggaaaatgagctaacgtactactgctgcaagaaggacctgtgtaactttaacgaacagcttgaaaatggtgggacatccttatcagagaaaacagttcttctgctggtgactccatttctggcagcagcctggagccttcatccctaagtcaacaccaggagagcttctcccaaactccccgttcctgcgtagtccgctttctcttgctgccacattctaaaggcttgatattttccaaatggatcctgttgggaaagaataaaattagcttgagcaacctgaacaacaaaaaaaaaaaaacaaaacaaaaacttgtgttgggcgcgcctcggcgcccccgaaaaagagttttccaaacaccacttggggggggcggcgggggcgccccagatggagttcgctagaaaagtgggcgcacgagggtgtccccccgagaagacacccgcggcacatagaaacagtcgggcggcggggtggttcccaccccaaataaaaaaaaacgggcggggggggaacccacacgcagctcgtgttcgagagaccaaacacacagcagggggggcgacgcagggacgacgacagggcggctcatcacccgaaggaaggacccacagcgcgcggcgtcacggatataattatcgcccgcgcccgcggcggctgcagaagcacagagagtgacaagacagaagcagctacacaaagcaacatcagaacagacgaggacaaaaggacgagagggaaacaagggagggaggagaacagagaaagaaaaggaagagagacaaaagaagaggagagcaggaaaaggaaggcaaggaaccgaaagaaaagggagacaagagcgcaaaaggacaggagcaaacaggagaagcgaacgaggaagagcagagagcagggagcaagagcaaggaaaggacgagccgagggcggagcgaacagacccacgccagcaagaatgagaacggaagaagacagagaacagcagaacgggagagaagggagagagaggagaagcaggcggcaggacagagagaggaccgaggcgagggagggagagcagcgggaaggcaagagagaggagaggacgagagacgagagaggacggagaacaagaggagagagaggaggggaggcgaggagcgagagaggcagacggcgcgaagggaggaggagagggagaggaggagaagaagagagagcaggaggaggcagagacaacggggagagggggagagaggagagggagcaagaagagaaagaagagacacggaggagaaagaagcagagaagaaagagaagagaggcaaaagagagcaagagggaaaaaagggagacaacggacggaatgagaaggaagaggaagagagagaggagagagaggagaggagggagcgcagaggagaaggaagaagggagacgaggagaagacagaacgaggaagggaagaaaagaagaagaggaacgagagagagagaaggagacgcgaatggagaggaggtaggagcagacagaagagaggagaggaacggagagaggcagaggaggcggtagaggagaaacaaagagaagaggaagcagaaacgaagaggaaagagagagaaagaaagaaagcagagagcacgaacggagacgagagcagaggacagcacgacgatcgagacagagcagacgcagacgggagagaagactaagagcacacgaggagcaagaaatagagacgaaaagcagaaacaaaaggagaaagaacagaaacagactaaaacgagaaaaaaagaggaccacaaagagagaagaacggagaggcagaaaacaagagaaaacagagacaggaagacaaggaaacgaggggacacaagaacgacaagcaaacaacaacgagcagagaagcaaaaagaagacagaggaaaagagaagaggaggagaagagagaaaca

SEQ ID NO: 330762 - DNA, 638 bp, Homo sapiens
  misc_feature (609)..(609): n is a, c, g, or t
ggggccggggggcggagccttgcgggctggagcgaaagaatgcgggggctgagcggagaagcggctcgaggctggaagaggatcctgggcgccgccaggttctgtggacaatcacaatgggaatccaaggagggtctgtcctgttcgggctgctgctcgtcctggctgtcttctgccattcaggtcatagcctgcagtgctacaactgtcctaacccaactgctgactgcaaaacagccgtcaattgttcatctgattttgatgcgtgtctcattaccaaagctgggttacaagtgtataacaagtgttggaagtttgagcattgcaatttcaacgacgtcacaacccgcttgagggaaaatgagctaacgtactactgctgcaagaaggacctgtgtaactttaacgaacagcttgaaaatggtgggacatccttatcagagaaaacagttcttctgctggtgactccatttctggcagcagcctggagccttcatccctaagtcaacaccaggagagcttctcccaaactccccgttcctgcgtagtccgctttctcttgctgccacattctaaaggcttgatattttccaaatggattccatttgngggattccatttgagggattccatttgag

SEQ ID NO: 330763 - DNA, 826 bp, Homo sapiens
catacagcttggaagcacatagcatcgaagacgctcgcttcagaaatgtccctgactgctgcggcctccactatgtttcgaatgacgaatttcttaatggccttgtccttgggcacgcatcgggcacagttagtgcagcgaataggctgcacgtgccgcggccctttttggcacgaccattgttccttcttttctttgtcatcttggaggcacgtgtatatagtatgaatgcagtggggacaccctttgtggttacagtttgagacttccaaaggtcatccttaataacaacagatctgcaggggtatgttttaccatctgcatccagcctcctgctaactcctagctgactcagcatagattgtataaaatacctttgtaacggctcttagcacactcacagatgtttgaggctttcagaagctcttctaaaaaatgatacacacctttcacaagggcaaactttttccttttccctgtgtattctagtgaatgaatctcaagattcagtagacctaatgacatttgtattttatgatcttggctgtatttaatggcataggctgacttttgcagatggaggaatttcttgattaatgttgaaaaaaaacccttgattatactctgttggacaaaccgagtgcaatgaatgatgcttttctgaaaatgaaatataacaagtgggtgaatgtggttatggccgaaaaggatatgcagtatgcttaatggtagcaactgaaagaagacatcctgagcagtgccagctttcttctgttgatgccgttccctgaacataggaaaatagaaacttgcttatcaaaactca

SEQ ID NO: 330764 - DNA, 937 bp, Homo sapiens
acggatagcggatctgccaggcaggactatgtgggaaagggtttttccttagcacacgaaaaagccccttcccctggattcatgtttcttattttggagggagaagggaattgcacttcacactgccatcagggtttagttgacctcataatggtgcccactttctcgactttggccaggatttccttcaaagaaaacgactttccttcatttccctaagcctgtggcccaaatggtggaccagaatgatggtgggagggggcaacccccagtagctttgcctgcttttataaagttgaacaaattgaatttagacattcaggctaacctgcctttcttagtactcctttgttggcatgggcaggggttgagtcagcagatccgctatccgtcgacggatagcggatctgcaggggtatgttttaccatctgcatccagcctcctgctaactcctagctgactcagcatagattgtataaaatacctttgtaacggctcttagcacactcacagatgtttgaggctttcagaagctcttctaaaaaatgatacacacctttcacaagggcaaactttttccttttccctgtgtattctagtgaatgaatctcaagattcagtagacctaatgacatttgtattttatgatcttggctgtatttaatggcataggctgacttttgcagatggaggaatttcttgattaatgttgaaaaaaaacccttgattatactctgttggacaaaccgagtgcaatgaatgatgcttttctgaaaatgaaatataacaagtgggtgaatgtggttatggccgaaaaggatatgcagtatgcttaatggtagcaactgaaagaagacatcctgagcagtgccagctttcttctgttgatgccgttccctgaacataggaaaatagaaacttgcttatcaaaactca

SEQ ID NO: 330765 - DNA, 566 bp, Homo sapiens
tatactctgttggacaaacaagggttttttttcaacattaatcaagaaattcctccatctgcatccagcctcctgctaactcctagctgactcagcatagattgtataaaatacctttgtaacggctcttagcacactcacagatgtttgaggctttcagaagctcttctaaaaaatgatacacacctttcacaagggcaaactttttccttttccctgtgtattctagtgaatgaatctcaagattcagtagacctaatgacatttgtattttatgatcttggctgtatttaatggcataggctgacttttgcagatggaggaatttcttgattaatgttgaaaaaaaacccttgattatactctgttggacaaaccgagtgcaatgaatgatgcttttctgaaaatgaaatataacaagtgggtgaatgtggttatggccgaaaaggatatgcagtatgcttaatggtagcaactgaaagaagacatcctgagcagtgccagctttcttctgttgatgccgttccctgaacataggaaaatagaaacttgcttatcaaaactca

SEQ ID NO: 330766 - DNA, 773 bp, Homo sapiens
ggggccggggggcggagccttgcgggctggagcgaaagaatgcgggggctgagcggagaagcggctcgaggctggaagaggatcctgggcgccgccagtctttagcaccagttggtgtaggagttgagacctacttcacagtagttctgtggacaatcacaatgggaatccaaggagggtctgtcctgttcgggctgctgctcgtcctggctgtcttctgccattcaggtcatagcctgcagtgctacaactgtcctaacccaactgctgactgcaaaacagccgtcaattgttcatctgattttgatgcgtgtctcattaccaaagctgatacccatcccctcagaggaggaggacaggacagttatgcctgcagttataaactgagaagtgttgtgttccaagctctgcatggaattggggttacaagtgtataacaagtgttggaagtttgagcattgcaatttcaacgacgtcacaacccgcttgagggaaaatgagctaacgtactactgctgcaagaaggacctgtgtaactttaacgaacagcttgaaaatggtgggacatccttatcagagaaaacagttcttctgctggtgactccatttctggcagcagcctggagccttcatccctaagtcaacaccaggagagcttctcccaaactccccgttcctgcgtagtccgctttctcttgctgccacattctaaaggcttgatattttccaaatggatcctgttgggaaagaataaaattagcttgagcaacctg

SEQ ID NO: 330767 - DNA, 544 bp, Homo sapiens
aatttttgactcactgaccctgatggggaagatagtgttattcccacagtgtggtagtacacactggggcttatagggactgagcctactcaagggtatatggtgctgtgggtcagagctggggcatggcccagggattcagtgtgccttgactccccctgtaaatgttcctctcagaagccttcttggccttccagcccttggtttttgagacaaccagcagtcatttgttcgttcctgacattccttcctgtcccttccttccaggttcgttctgtggacaatcacaatgggaatccaaggagggtctgtcctgttcgggctgctgctcgtcctggctgtcttctgccattcaggtcatagcctgcagtgctacaactgtcctaacccaactgctgactgcaaaacagccgtcaattgttcatctgattttgatgcgtgtctcattaccaaagctggtacaggtttacaagttggaggtggcatgcaattcacgcggtcaacccgttgggaaagcacgccactctcagaggccttacttacg

SEQ ID NO: 330768 - DNA, 637 bp, Homo sapiens
ggggccggggggcggagccttgcgggctggagcgaaagaatgcgggggctgagcggagaagcggctcgaggctggaagaggatcctgggcgccgccaggttctgtggacaatcacaatgggaatccaaggagggtctgtcctgttcgggctgctgctcgtcctggctgtcttctgccattcaggtcatagcctgcagtgctacaactgtcctaacccaactgctgactgcaaaacagccgtcaattgttcatctgattttgatgcgtgtctcattaccaaagctgggttacaagtgtataacaagtgttggaagtttgagcattgcaatttcaacgacgtcacaacccgcttgagggaaaatgagctaacgtactactgctgcaagaaggacctgtgtaactttaacgaacagcttgaaaatggtgggacatccttatcagagaaaacagttcttctgctggtgactccatttctggcagcagcctggagccttcatccctaagtcaacaccaggagagcttctcccaaactccccgttcctgcgtagtccgctttctcttgctgccacattctaaaggcttgatattttccaaatggatcctgttgggaaagaataaaattagcttgagcaacctg

SEQ ID NO: 330769 - DNA, 670 bp, Homo sapiens
  misc_feature (10)..(10): n is a, c, g, or t
  misc_feature (25)..(25): n is a, c, g, or t
tggttcgatnatcgaccccttaggnatttgcctcgggcaagattcggcacgagcgaaggctggaagaggatcttgggcgccgccagtctttagcaccagttggtgtaggagttgagacctacttcacagtagttctgtggacaatcacaatgggaatccaaggagggtctgtcctgttcgggctgctgctcgtcctggctgtcttctgccattcaggtcatagcctgcagtgctacaactgtcctaacccaactgctgactgcaaaacagccgtcaattgttcatctgattttgatgcgtgtctcattaccaaagctgggttacaagtgtataacaagtgttggaagtttgagcattgcaatttcaacgacgtcacaacccgcttgagggaaaatgagctaacgtactactgctgcaagaaggacctgtgtaactttaacgaacagcttgaaaatggtgggacatccttatcagagaaaacagttcttctgctggtgactccatttctggcagcagcctggagccttcatccctaagtcaacaccaggagagcttctcccaaactccccgttcctgcgtagtccgctttctcttgctgccacattctaaaggcttgatattttccaaatggatcctgttgggaaagaataaaattagcttgagcaacctg

SEQ ID NO: 330770 - DNA, 730 bp, Homo sapiens
ggggccggggggcggagccttgcgggctggagcgaaagaatgcgggggctgagcggagaagcggctcgaggctggaagaggatcctgggcgccgccagtctttagcaccagttggtgtaggagttgagacctacttcacagtagttctgtggacaatcacaatgggaatccaaggagggtctgtcctgttcgggctgctgctcgtcctggctgtcttctgccattcaggtcatagcctgcagtgctacaactgtcctaacccaactgctgactgcaaaacagccgtcaattgttcatctgattttgatgcgtgtctcattaccaaagctgggttacaagtgtataacaagtgttggaagtttgagcattgcaatttcaacgacgtcacaacccgcttgagggaaaatgagctaacgtactactgctgcaagaaggacctgtgtaactttaacgaacagcttgaaaatgacacattcctgaaggcgctaaaagacgaaaagttacaaggactgaagaccaagcaacctggaaagaagtcggcctctctctcctgaggagctgcctaccagagcttgggcagccacctccttaggtgttagtgcttagataatgtgtcccatttgttgtcatttcaaagatggttattttctgttctgtatttaccgctgttcttgttgctaccagcatgtacttcacatacagtgcccactttgtgtggtaaaaaacatgg

SEQ ID NO: 330771 - DNA, 800 bp, Homo sapiens
ggggccggggggcggagccttgcgggctggagcgaaagaatgcgggggctgagcggagaagcggctcgaggctggaagaggatcctgggcgccgccagagtctctctctgttgcccaagctggagtgcagtggcacagtcttggctcactgcaacctccacctcctgggtgcaagcgattctcgtgtctcagcctctcaagtagctgggattacagtctttagcaccagttggtgtaggagttgagacctacttcacagtagttctgtggacaatcacaatgggaatccaaggagggtctgtcctgttcgggctgctgctcgtcctggctgtcttctgccattcaggtcatagcctgcagtgctacaactgtcctaacccaactgctgactgcaaaacagccgtcaattgttcatctgattttgatgcgtgtctcattaccaaagctgggttacaagtgtataacaagtgttggaagtttgagcattgcaatttcaacgacgtcacaacccgcttgagggaaaatgagctaacgtactactgctgcaagaaggacctgtgtaactttaacgaacagcttgaaaatggtgggacatccttatcagagaaaacagttcttctgctggtgactccatttctggcagcagcctggagccttcatccctaagtcaacaccaggagagcttctcccaaactccccgttcctgcgtagtccgctttctcttgctgccacattctaaaggcttgatattttccaaatggatcctgttgggaaagaataaaattagcttgagcaacctg

SEQ ID NO: 330772 - DNA, 601 bp, Homo sapiens
acgctttcataaacttcagggatcccgtgttgccatggaggcatgccaaatgttccatatgtgttctgtggacaatcacaatgggaatccaaggagggtctgtcctgttcgggctgctgctcgtcctggctgtcttctgccattcaggtcatagcctgcagtgctacaactgtcctaacccaactgctgactgcaaaacagccgtcaattgttcatctgattttgatgcgtgtctcattaccaaagctgggttacaagtgtataacaagtgttggaagtttgagcattgcaatttcaacgacgtcacaacccgcttgagggaaaatgagctaacgtactactgctgcaagaaggacctgtgtaactttaacgaacagcttgaaaatggtgggacatccttatcagagaaaacagttcttctgctggtgactccatttctggcagcagcctggagccttcatccctaagtcaacaccaggagagcttctcccaaactccccgttcctgcgtagtccgctttctcttgctgccacattctaaaggcttgatattttccaaatggatcctgttgggaaagaataaaattagcttgagcaacctg

SEQ ID NO: 330773 - DNA, 1952 bp, Homo sapiens
ggggccggggggcggagccttgcgggctggagcgaaagaatgcgggggctgagcggagaagcggctcgaggctggaagaggatcctgggcgccgccaggttctgtggacaatcacaatgggaatccaaggagggtctgtcctgttcgggctgctgctcgtcctggctgtcttctgccattcaggtcatagcctgcagtgctacaactgtcctaacccaactgctgactgcaaaacagccgtcaattgttcatctgattttgatgcgtgtctcattaccaaagctgggttacaagtgtataacaagtgttggaagtttgagcattgcaatttcaacgacgtcacaacccgcttgagggaaaatgagctaacgtactactgctgcaagaaggacctgtgtaactttaacgaacagcttgaaaatggtgggacatccttatcagagaaaacagttcttctgctggtgactccatttctggcagcagcctggagccttcatccctaagtcaacaccaggagagcttctcccaaactccccgttcctgcgtagtccgctttctcttgctgccacattctaaaggcttgatattttccaaatggatcctgttgggaaagaataaaattagcttgagcaacctggctaagatagaggggctctgggagactttgaagaccagtcctgtttgcagggaagccccacttgaaggaagaagtctaagagtgaagtaggtgtgacttgaactagattgcatgcttcctcctttgctcttgggaagaccagctttgcagtgacagcttgagtgggttctctgcagccctcagattatttttcctctggctccttggatgtagtcagttagcatcattagtacatctttggagggtggggcaggagtatatgagcatcctctctcacatggaacgctttcataaacttcagggatcccgtgttgccatggaggcatgccaaatgttccatatgtgggtgtcagtcagggacaacaagatccttaatgcagagctagaggacttctggcagggaagtggggaagtgttccagatagcagggcatgaaaacttagagaggtacaagtggctgaaaatcgagtttttcctctgtctttaaattttatatgggctttgttatcttccactggaaaagtgtaatagcatacatcaatggtgtgttaaagctatttccttgccttttttttattggaatggtaggatatcttggctttgccacacacagttacagagtgaacactctactacatgtgactggcagtattaagtgtgcttattttaaatgttactggtagaaaggcagttcaggtatgtgtgtatatagtatgaatgcagtggggacaccctttgtggttacagtttgagacttccaaaggtcatccttaataacaacagatctgcaggggtatgttttaccatctgcatccagcctcctgctaactcctagctgactcagcatagattgtataaaatacctttgtaacggctcttagcacactcacagatgtttgaggctttcagaagctcttctaaaaaatgatacacacctttcacaagggcaaactttttccttttccctgtgtattctagtgaatgaatctcaagattcagtagacctaatgacatttgtattttatgatcttggctgtatttaatggcataggctgacttttgcagatggaggaatttcttgattaatgttgaaaaaaaacccttgattatactctgttggacaaaccgagtgcaatgaatgatgcttttctgaaaatgaaatataacaagtgggtgaatgtggttatggccgaaaaggatatgcagtatgcttaatggtagcaactgaaagaagacatcctgagcagtgccagctttcttctgttgatgccgttccctgaacataggaaaatagaaacttgcttatcaaaactca

SEQ ID NO: 330774 - DNA, 2260 bp, Homo sapiens
ggggccggggggcggagccttgcgggctggagcgaaagaatgcgggggctgagcggagaagcggctcgaggctggaagaggatcctgggcgccgccaggttctgtggacaatcacaatgggaatccaaggagggtctgtcctgttcgggctgctgctcgtcctggctgtcttctgccattcaggtcatagcctgcagtgctacaactgtcctaacccaactgctgactgcaaaacagccgtcaattgttcatctgattttgatgcgtgtctcattaccaaagctgggttacaagtgtataacaagtgttggaagtttgagcattgcaatttcaacgacgtcacaacccgcttgagggaaaatgagctaacgtactactgctgcaagaaggacctgtgtaactttaacgaacagcttgaaaatggtgggacatccttatcagagaaaacagttcttctgctggtgactccatttctggcagcagcctggagccttcatccctaagtcaacaccaggagagcttctcccaaactccccgttcctgcgtagtccgctttctcttgctgccacattctaaaggcttgatattttccaaatggatcctgttgggaaagaataaaattagcttgagcaacctggctaagatagaggggctctgggagactttgaagaccagtcctgtttgcagggaagccccacttgaaggaagaagtctaagagtgaagtaggtgtgacttgaactagattgcatgcttcctcctttgctcttgggaagaccagctttgcagtgacagcttgagtgggttctctgcagccctcagattatttttcctctggctccttggatgtagtcagttagcatcattagtacatctttggagggtggggcaggagtatatgagcatcctctctcacatggaacgctttcataaacttcagggatcccgtgttgccatggaggcatgccaaatgttccatatgtgggtgtcagtcagggacaacaagatccttaatgcagagctagaggacttctggcagggaagtggggaagtgttccagatagcagggcatgaaaacttagagaggtacaagtggctgaaaatcgagtttttcctctgtctttaaattttatatgggctttgttatcttccactggaaaagtgtaatagcatacatcaatggtgtgttaaagctatttccttgccttttttttattggaatggtaggatatcttggctttgccacacacagttacagagtgaacactctactacatgtgactggcagtattaagtgtgcttattttaaatgttactggtagaaaggcagttcaggtatgtgtgtatatagtatgaatgcagtggggacaccctttgtggttacagtttgagacttccaaaggtcatccttaataacaacagatctgcaggggtatgttttaccatctgcatccagcctcctgctaactcctagctgactcagcatagattgtataaaatacctttgtaacggctcttagcacactcacagatgtttgaggctttcagaagctcttctaaaaaatgatacacacctttcacaagggcaaactttttccttttccctgtgtattctagtgaatgaatctcaagattcagtagacctaatgacatttgtattttatgatcttggctgtatttaatggcataggctgacttttgcagatggaggaatttcttgattaatgttgaaaaaaaacccttgattatactctgttggacaaaccaaaaaaaaaaaaaaaaaaaaaaaaaaaaaaaaaaaaaaaaaaaaaaaaaaaaaaaaaaaaaaaagaaaaaaaaaaaaaaaaaacaaaacaaaaagaaaaaagcaaaaaaaaaaaaaaaacaaaagagggaccggcagcccccatcgaaatactcctccagacagaccaaaataacaccacaccaatttatgagaaaagagcacccacaatagaggactacaaaagccacgagagacagcaacacacaaaccacaccaagccgaaccacagaaacgaagaacaaccaaaacacagtgcagcgaggcgctgccagcgagccgacagccaccacacataccggcggcgggacacgacaaacacgccagccccccaccaccacccaaggcggatgaccaccaccgcgcgcgccgaaaaaataaccaaccagcagccacggaggcgcaacaacagcatatcaccgcggccgaaaaatgcgcgacgagaacaaaaaaatagg

SEQ ID NO: 330775 - DNA, 1985 bp, Homo sapiens
  misc_feature (10)..(10): n is a, c, g, or t
  misc_feature (25)..(25): n is a, c, g, or t
tggttcgatnatcgaccccttaggnatttgcctcgggcaagattcggcacgagcgaaggctggaagaggatcttgggcgccgccagtctttagcaccagttggtgtaggagttgagacctacttcacagtagttctgtggacaatcacaatgggaatccaaggagggtctgtcctgttcgggctgctgctcgtcctggctgtcttctgccattcaggtcatagcctgcagtgctacaactgtcctaacccaactgctgactgcaaaacagccgtcaattgttcatctgattttgatgcgtgtctcattaccaaagctgggttacaagtgtataacaagtgttggaagtttgagcattgcaatttcaacgacgtcacaacccgcttgagggaaaatgagctaacgtactactgctgcaagaaggacctgtgtaactttaacgaacagcttgaaaatggtgggacatccttatcagagaaaacagttcttctgctggtgactccatttctggcagcagcctggagccttcatccctaagtcaacaccaggagagcttctcccaaactccccgttcctgcgtagtccgctttctcttgctgccacattctaaaggcttgatattttccaaatggatcctgttgggaaagaataaaattagcttgagcaacctggctaagatagaggggctctgggagactttgaagaccagtcctgtttgcagggaagccccacttgaaggaagaagtctaagagtgaagtaggtgtgacttgaactagattgcatgcttcctcctttgctcttgggaagaccagctttgcagtgacagcttgagtgggttctctgcagccctcagattatttttcctctggctccttggatgtagtcagttagcatcattagtacatctttggagggtggggcaggagtatatgagcatcctctctcacatggaacgctttcataaacttcagggatcccgtgttgccatggaggcatgccaaatgttccatatgtgggtgtcagtcagggacaacaagatccttaatgcagagctagaggacttctggcagggaagtggggaagtgttccagatagcagggcatgaaaacttagagaggtacaagtggctgaaaatcgagtttttcctctgtctttaaattttatatgggctttgttatcttccactggaaaagtgtaatagcatacatcaatggtgtgttaaagctatttccttgccttttttttattggaatggtaggatatcttggctttgccacacacagttacagagtgaacactctactacatgtgactggcagtattaagtgtgcttattttaaatgttactggtagaaaggcagttcaggtatgtgtgtatatagtatgaatgcagtggggacaccctttgtggttacagtttgagacttccaaaggtcatccttaataacaacagatctgcaggggtatgttttaccatctgcatccagcctcctgctaactcctagctgactcagcatagattgtataaaatacctttgtaacggctcttagcacactcacagatgtttgaggctttcagaagctcttctaaaaaatgatacacacctttcacaagggcaaactttttccttttccctgtgtattctagtgaatgaatctcaagattcagtagacctaatgacatttgtattttatgatcttggctgtatttaatggcataggctgacttttgcagatggaggaatttcttgattaatgttgaaaaaaaacccttgattatactctgttggacaaaccgagtgcaatgaatgatgcttttctgaaaatgaaatataacaagtgggtgaatgtggttatggccgaaaaggatatgcagtatgcttaatggtagcaactgaaagaagacatcctgagcagtgccagctttcttctgttgatgccgttccctgaacataggaaaatagaaacttgcttatcaaaactca

SEQ ID NO: 330776 - DNA, 1890 bp, Homo sapiens
attatacttcttacagtgaggagccagagcttccaggttctgtggacaatcacaatgggaatccaaggagggtctgtcctgttcgggctgctgctcgtcctggctgtcttctgccattcaggtcatagcctgcagtgctacaactgtcctaacccaactgctgactgcaaaacagccgtcaattgttcatctgattttgatgcgtgtctcattaccaaagctgggttacaagtgtataacaagtgttggaagtttgagcattgcaatttcaacgacgtcacaacccgcttgagggaaaatgagctaacgtactactgctgcaagaaggacctgtgtaactttaacgaacagcttgaaaatggtgggacatccttatcagagaaaacagttcttctgctggtgactccatttctggcagcagcctggagccttcatccctaagtcaacaccaggagagcttctcccaaactccccgttcctgcgtagtccgctttctcttgctgccacattctaaaggcttgatattttccaaatggatcctgttgggaaagaataaaattagcttgagcaacctggctaagatagaggggctctgggagactttgaagaccagtcctgtttgcagggaagccccacttgaaggaagaagtctaagagtgaagtaggtgtgacttgaactagattgcatgcttcctcctttgctcttgggaagaccagctttgcagtgacagcttgagtgggttctctgcagccctcagattatttttcctctggctccttggatgtagtcagttagcatcattagtacatctttggagggtggggcaggagtatatgagcatcctctctcacatggaacgctttcataaacttcagggatcccgtgttgccatggaggcatgccaaatgttccatatgtgggtgtcagtcagggacaacaagatccttaatgcagagctagaggacttctggcagggaagtggggaagtgttccagatagcagggcatgaaaacttagagaggtacaagtggctgaaaatcgagtttttcctctgtctttaaattttatatgggctttgttatcttccactggaaaagtgtaatagcatacatcaatggtgtgttaaagctatttccttgccttttttttattggaatggtaggatatcttggctttgccacacacagttacagagtgaacactctactacatgtgactggcagtattaagtgtgcttattttaaatgttactggtagaaaggcagttcaggtatgtgtgtatatagtatgaatgcagtggggacaccctttgtggttacagtttgagacttccaaaggtcatccttaataacaacagatctgcaggggtatgttttaccatctgcatccagcctcctgctaactcctagctgactcagcatagattgtataaaatacctttgtaacggctcttagcacactcacagatgtttgaggctttcagaagctcttctaaaaaatgatacacacctttcacaagggcaaactttttccttttccctgtgtattctagtgaatgaatctcaagattcagtagacctaatgacatttgtattttatgatcttggctgtatttaatggcataggctgacttttgcagatggaggaatttcttgattaatgttgaaaaaaaacccttgattatactctgttggacaaaccgagtgcaatgaatgatgcttttctgaaaatgaaatataacaagtgggtgaatgtggttatggccgaaaaggatatgcagtatgcttaatggtagcaactgaaagaagacatcctgagcagtgccagctttcttctgttgatgccgttccctgaacataggaaaatagaaacttgcttatcaaaactca

SEQ ID NO: 330777 - DNA, 1949 bp, Homo sapiens
aatttttgactcactgaccctgatggggaagatagtgttattcccacagtgtggtagtacacactggggcttatagggactgagcctactcaagggttctgtggacaatcacaatgggaatccaaggagggtctgtcctgttcgggctgctgctcgtcctggctgtcttctgccattcaggtcatagcctgcagtgctacaactgtcctaacccaactgctgactgcaaaacagccgtcaattgttcatctgattttgatgcgtgtctcattaccaaagctgggttacaagtgtataacaagtgttggaagtttgagcattgcaatttcaacgacgtcacaacccgcttgagggaaaatgagctaacgtactactgctgcaagaaggacctgtgtaactttaacgaacagcttgaaaatggtgggacatccttatcagagaaaacagttcttctgctggtgactccatttctggcagcagcctggagccttcatccctaagtcaacaccaggagagcttctcccaaactccccgttcctgcgtagtccgctttctcttgctgccacattctaaaggcttgatattttccaaatggatcctgttgggaaagaataaaattagcttgagcaacctggctaagatagaggggctctgggagactttgaagaccagtcctgtttgcagggaagccccacttgaaggaagaagtctaagagtgaagtaggtgtgacttgaactagattgcatgcttcctcctttgctcttgggaagaccagctttgcagtgacagcttgagtgggttctctgcagccctcagattatttttcctctggctccttggatgtagtcagttagcatcattagtacatctttggagggtggggcaggagtatatgagcatcctctctcacatggaacgctttcataaacttcagggatcccgtgttgccatggaggcatgccaaatgttccatatgtgggtgtcagtcagggacaacaagatccttaatgcagagctagaggacttctggcagggaagtggggaagtgttccagatagcagggcatgaaaacttagagaggtacaagtggctgaaaatcgagtttttcctctgtctttaaattttatatgggctttgttatcttccactggaaaagtgtaatagcatacatcaatggtgtgttaaagctatttccttgccttttttttattggaatggtaggatatcttggctttgccacacacagttacagagtgaacactctactacatgtgactggcagtattaagtgtgcttattttaaatgttactggtagaaaggcagttcaggtatgtgtgtatatagtatgaatgcagtggggacaccctttgtggttacagtttgagacttccaaaggtcatccttaataacaacagatctgcaggggtatgttttaccatctgcatccagcctcctgctaactcctagctgactcagcatagattgtataaaatacctttgtaacggctcttagcacactcacagatgtttgaggctttcagaagctcttctaaaaaatgatacacacctttcacaagggcaaactttttccttttccctgtgtattctagtgaatgaatctcaagattcagtagacctaatgacatttgtattttatgatcttggctgtatttaatggcataggctgacttttgcagatggaggaatttcttgattaatgttgaaaaaaaacccttgattatactctgttggacaaaccgagtgcaatgaatgatgcttttctgaaaatgaaatataacaagtgggtgaatgtggttatggccgaaaaggatatgcagtatgcttaatggtagcaactgaaagaagacatcctgagcagtgccagctttcttctgttgatgccgttccctgaacataggaaaatagaaacttgcttatcaaaactca

SEQ ID NO: 330778 - DNA, 2073 bp, Homo sapiens
tcaaacaccataattgagagcagcaaaattaaccatgtgtcaggcactgtattatgtactctaaacccatcattttaaaaatcaatccaatagcctgctgagattggtgatattacttcccccactaacgctaaggaaaccgattctcagagaggttaagttgcttgctcaggtcacacagctagtaagtgaattcgcgttggcgcactgctatatcgcgttctgtggacaatcacaatgggaatccaaggagggtctgtcctgttcgggctgctgctcgtcctggctgtcttctgccattcaggtcatagcctgcagtgctacaactgtcctaacccaactgctgactgcaaaacagccgtcaattgttcatctgattttgatgcgtgtctcattaccaaagctgggttacaagtgtataacaagtgttggaagtttgagcattgcaatttcaacgacgtcacaacccgcttgagggaaaatgagctaacgtactactgctgcaagaaggacctgtgtaactttaacgaacagcttgaaaatggtgggacatccttatcagagaaaacagttcttctgctggtgactccatttctggcagcagcctggagccttcatccctaagtcaacaccaggagagcttctcccaaactccccgttcctgcgtagtccgctttctcttgctgccacattctaaaggcttgatattttccaaatggatcctgttgggaaagaataaaattagcttgagcaacctggctaagatagaggggctctgggagactttgaagaccagtcctgtttgcagggaagccccacttgaaggaagaagtctaagagtgaagtaggtgtgacttgaactagattgcatgcttcctcctttgctcttgggaagaccagctttgcagtgacagcttgagtgggttctctgcagccctcagattatttttcctctggctccttggatgtagtcagttagcatcattagtacatctttggagggtggggcaggagtatatgagcatcctctctcacatggaacgctttcataaacttcagggatcccgtgttgccatggaggcatgccaaatgttccatatgtgggtgtcagtcagggacaacaagatccttaatgcagagctagaggacttctggcagggaagtggggaagtgttccagatagcagggcatgaaaacttagagaggtacaagtggctgaaaatcgagtttttcctctgtctttaaattttatatgggctttgttatcttccactggaaaagtgtaatagcatacatcaatggtgtgttaaagctatttccttgccttttttttattggaatggtaggatatcttggctttgccacacacagttacagagtgaacactctactacatgtgactggcagtattaagtgtgcttattttaaatgttactggtagaaaggcagttcaggtatgtgtgtatatagtatgaatgcagtggggacaccctttgtggttacagtttgagacttccaaaggtcatccttaataacaacagatctgcaggggtatgttttaccatctgcatccagcctcctgctaactcctagctgactcagcatagattgtataaaatacctttgtaacggctcttagcacactcacagatgtttgaggctttcagaagctcttctaaaaaatgatacacacctttcacaagggcaaactttttccttttccctgtgtattctagtgaatgaatctcaagattcagtagacctaatgacatttgtattttatgatcttggctgtatttaatggcataggctgacttttgcagatggaggaatttcttgattaatgttgaaaaaaaacccttgattatactctgttggacaaaccgagtgcaatgaatgatgcttttctgaaaatgaaatataacaagtgggtgaatgtggttatggccgaaaaggatatgcagtatgcttaatggtagcaactgaaagaagacatcctgagcagtgccagctttcttctgttgatgccgttccctgaacataggaaaatagaaacttgcttatcaaaactca

SEQ ID NO: 330779 - DNA, 1721 bp, Homo sapiens
cgagtcgccctgtatcatctatggattttgatgcgtgtctcattaccacagctgggttacaagtgtataacaagtgttggaagtttgagcattgcaatttcaacgacgtcacaacccgcttgagggaaaatgagctaacgtactactgctgcaagaaggacctgtgtaactttaacgaacagcttgaaaatggtgggacatccttatcagagaaaacagttcttctgctggtgactccatttctggcagcagcctggagccttcatccctaagtcaacaccaggagagcttctcccaaactccccgttcctgcgtagtccgctttctcttgctgccacattctaaaggcttgatattttccaaatggatcctgttgggaaagaataaaattagcttgagcaacctggctaagatagaggggctctgggagactttgaagaccagtcctgtttgcagggaagccccacttgaaggaagaagtctaagagtgaagtaggtgtgacttgaactagattgcatgcttcctcctttgctcttgggaagaccagctttgcagtgacagcttgagtgggttctctgcagccctcagattatttttcctctggctccttggatgtagtcagttagcatcattagtacatctttggagggtggggcaggagtatatgagcatcctctctcacatggaacgctttcataaacttcagggatcccgtgttgccatggaggcatgccaaatgttccatatgtgggtgtcagtcagggacaacaagatccttaatgcagagctagaggacttctggcagggaagtggggaagtgttccagatagcagggcatgaaaacttagagaggtacaagtggctgaaaatcgagtttttcctctgtctttaaattttatatgggctttgttatcttccactggaaaagtgtaatagcatacatcaatggtgtgttaaagctatttccttgccttttttttattggaatggtaggatatcttggctttgccacacacagttacagagtgaacactctactacatgtgactggcagtattaagtgtgcttattttaaatgttactggtagaaaggcagttcaggtatgtgtgtatatagtatgaatgcagtggggacaccctttgtggttacagtttgagacttccaaaggtcatccttaataacaacagatctgcaggggtatgttttaccatctgcatccagcctcctgctaactcctagctgactcagcatagattgtataaaatacctttgtaacggctcttagcacactcacagatgtttgaggctttcagaagctcttctaaaaaatgatacacacctttcacaagggcaaactttttccttttccctgtgtattctagtgaatgaatctcaagattcagtagacctaatgacatttgtattttatgatcttggctgtatttaatggcataggctgacttttgcagatggaggaatttcttgattaatgttgaaaaaaaacccttgattatactctgttggacaaaccgagtgcaatgaatgatgcttttctgaaaatgaaatataacaagtgggtgaatgtggttatggccgaaaaggatatgcagtatgcttaatggtagcaactgaaagaagacatcctgagcagtgccagctttcttctgttgatgccgttccctgaacataggaaaatagaaacttgcttatcaaaactca

SEQ ID NO: 330780 - DNA, 1744 bp, Homo sapiens
gtgggttgaccgtggcttgtgggttgaccgtggcttgtgggttgaccgtggcttgtgggttgaccgtggcttgtgggttgaccgtggcttgtgggttgaccgtggctttgagcattgcaatttcaacgacgtcacaacccgcttgagggaaaatgagctaacgtactactgctgcaagaaggacctgtgtaactttaacgaacagcttgaaaatggtgggacatccttatcagagaaaacagttcttctgctggtgactccatttctggcagcagcctggagccttcatccctaagtcaacaccaggagagcttctcccaaactccccgttcctgcgtagtccgctttctcttgctgccacattctaaaggcttgatattttccaaatggatcctgttgggaaagaataaaattagcttgagcaacctggctaagatagaggggctctgggagactttgaagaccagtcctgtttgcagggaagccccacttgaaggaagaagtctaagagtgaagtaggtgtgacttgaactagattgcatgcttcctcctttgctcttgggaagaccagctttgcagtgacagcttgagtgggttctctgcagccctcagattatttttcctctggctccttggatgtagtcagttagcatcattagtacatctttggagggtggggcaggagtatatgagcatcctctctcacatggaacgctttcataaacttcagggatcccgtgttgccatggaggcatgccaaatgttccatatgtgggtgtcagtcagggacaacaagatccttaatgcagagctagaggacttctggcagggaagtggggaagtgttccagatagcagggcatgaaaacttagagaggtacaagtggctgaaaatcgagtttttcctctgtctttaaattttatatgggctttgttatcttccactggaaaagtgtaatagcatacatcaatggtgtgttaaagctatttccttgccttttttttattggaatggtaggatatcttggctttgccacacacagttacagagtgaacactctactacatgtgactggcagtattaagtgtgcttattttaaatgttactggtagaaaggcagttcaggtatgtgtgtatatagtatgaatgcagtggggacaccctttgtggttacagtttgagacttccaaaggtcatccttaataacaacagatctgcaggggtatgttttaccatctgcatccagcctcctgctaactcctagctgactcagcatagattgtataaaatacctttgtaacggctcttagcacactcacagatgtttgaggctttcagaagctcttctaaaaaatgatacacacctttcacaagggcaaactttttccttttccctgtgtattctagtgaatgaatctcaagattcagtagacctaatgacatttgtattttatgatcttggctgtatttaatggcataggctgacttttgcagatggaggaatttcttgattaatgttgaaaaaaaacccttgattatactctgttggacaaaccgagtgcaatgaatgatgcttttctgaaaatgaaatataacaagtgggtgaatgtggttatggccgaaaaggatatgcagtatgcttaatggtagcaactgaaagaagacatcctgagcagtgccagctttcttctgttgatgccgttccctgaacataggaaaatagaaacttgcttatcaaaactca

SEQ ID NO: 330781 - DNA, 989 bp, Homo sapiens
ggggccggggggcggagccttgcgggctggagcgaaagaatgcgggggctgagcggagaagcggctcgaggctggaagaggatcctgggcgccgccaggttctgtggacaatcacaatgggaatccaaggagggtctgtcctgttcgggctgctgctcgtcctggctgtcttctgccattcaggtcatagcctgcagtgctacaactgtcctaacccaactgctgactgcaaaacagccgtcaattgttcatctgattttgatgcgtgtctcattaccaaagctgggttacaagtgtataacaagtgttggaagtttgagcattgcaatttcaacgacgtcacaacccgcttgagggaaaatgagctaacgtactactgctgcaagaaggacctgtgtaactttaacgaacagcttgaaaatggtgggacatccttatcagagaaaacagttcttctgctggtgactccatttctggcagcagcctggagccttcatccctaagtcaacaccaggagagcttctcccaaactccccgttcctgcgtagtccgctttctcttgctgccacattctaaaggcttgatattttccaaatggatcctgttgggaaagaataaaattagcttgagcaacctggctaagatagaggggctctgggagactttgaagaccagtcctgtttgcagggaagccccacttgaaggaagaagtctaagagtgaagtagacacattcctgaaggcgctaaaagacgaaaagttacaaggactgaagaccaagcaacctggaaagaagtcggcctctctctcctgaggagctgcctaccagagcttgggcagccacctccttaggtgttagtgcttagataatgtgtcccatttgttgtcatttcaaagatggttattttctgttctgtatttaccgctgttcttgttgctaccagcatgtacttcacatacagtgcccactttgtgtggtaaaaaacatgg

SEQ ID NO: 330782 - DNA, 815 bp, Homo sapiens
  misc_feature (14)..(14): n is a, c, g, or t
  misc_feature (98)..(98): n is a, c, g, or t
  misc_feature (112)..(112): n is a, c, g, or t
  misc_feature (135)..(135): n is a, c, g, or t
  misc_feature (166)..(166): n is a, c, g, or t
  misc_feature (169)..(169): n is a, c, g, or t
  misc_feature (177)..(177): n is a, c, g, or t
  misc_feature (186)..(186): n is a, c, g, or t
  misc_feature (199)..(199): n is a, c, g, or t
  misc_feature (245)..(245): n is a, c, g, or t
  misc_feature (279)..(279): n is a, c, g, or t
  misc_feature (282)..(282): n is a, c, g, or t
  misc_feature (291)..(292): n is a, c, g, or t
  misc_feature (299)..(299): n is a, c, g, or t
cggccacgggaatnggggattgatgcagacagcaatgggggtggggaaatcgagtggtctcgggccgggtggtgatggtgaaggtggaggtgagcggngctgggccacacanatgacagagggaacactcgacgncatgggacgggcaggatgaagtgtgcgtagnggnaagggganggttagaantgcagtgcatgtngggggggagagagttggaaggcaggggtacacccgggtgggggganagggggatacggccaaagggctatccggaagaanaantgttcgtcnnggggatnggggacatctgcatccagcctcctgctaactcctagctgactcagcatagattgtataaaatacctttgtaacggctcttagcacactcacagatgtttgaggctttcagaagctcttctaaaaaatgatacacacctttcacaagggcaaactttttccttttccctgtgtattctagtgaatgaatctcaagattcagtagacctaatgacatttgtattttatgatcttggctgtatttaatggcataggctgacttttgcagatggaggaatttcttgattaatgttgaaaaaaaacccttgattatactctgttggacaaaccgagtgcaatgaatgatgcttttctgaaaatgaaatataacaagtgggtgaatgtggttatggccgaaaaggatatgcagtatgcttaatggtagcaactgaaagaagacatcctgagcagtgccagctttcttctgttgatgccgttccctgaacataggaaaatagaaacttgcttatcaaaactca

SEQ ID NO: 330783 - DNA, 685 bp, Homo sapiens
ggggccggggggcggagccttgcgggctggagcgaaagaatgcgggggctgagcggagaagcggctcgaggctggaagaggatcctgggcgccgccaggttctgtggacaatcacaatgggaatccaaggagggtctgtcctgttcgggctgctgctcgtcctggctgtcttctgccattcaggtcatagcctgcagtgctacaactgtcctaacccaactgctgactgcaaaacagccgtcaattgttcatctgattttgatgcgtgtctcattaccaaagctgggttacaagtgtataacaagtgttggaagtttgagcattgcaatttcaacgacgtcacaacccgcttgagggaaaatgagctaacgtactactgctgcaagaaggacctgtgtaactttaacgaacagcttgaaaatgacacattcctgaaggcgctaaaagacgaaaagttacaaggactgaagaccaagcaacctggaaagaagtcggcctctctctcctgaggagctgcctaccagagcttgggcagccacctccttaggtgttagtgcttagataatgtgtcccatttgttgtcatttcaaagatggttattttctgttctgtatttaccgctgttcttgttgctaccagcatgtacttcacatacagtgcccactttgtgtggtaaaaaacatgg

SEQ ID NO: 330784 - DNA, 841 bp, Homo sapiens
ctctttttccggctggaaccatggagggtgtagaagagaagaagaaggaggttcctgctgtgccagaaacccttaagaaaaagcgaaggaatttcgcagagctgaagatcaagcgcctgagaaagaagtttgcccaaaagatgcttcgaaaggcaaggaggaagcttatctatgaaaaagcaaagcactatcacaaggaatataggcagatgtacagaactgaaattcgaatggcgaggatggcaagaaaagctggcaacttctatgtacctgcagaacccaaattggcgtttgtcatcagaatcagaggtatcaatggagtgagcccaaaggttcgaaaggtgttgcagcttcttcgccttcgtcaaatcttcaatggaacctttgtgaagctcaacaaggcttcgattaacatgctgaggattgtagagccatatattgcatgggggtaccccaatctgaagtcagtaaatgaactaatctacaagcgtggttatggcaaaatcaataagaagcgaattgctttgacagataacgctttgattgctcgatctcttggtaaatacggcatcatctgcatggaggatttgattcatgagatctatactgttggaaaacgcttcaaagaggcaaataacttcctgtggcccttcaaattgtcttctccacgaggtggaatgaagaaaaagaccacccattttgtagaaggtggagatgctggcaacagggaggaccagatcaacaggcttattagaagaatgaactaaggtgtctaccatgattatttttctaagctggttggttaataaacagtacctgctctcaaattgaaaaaaaaaaa

SEQ ID NO: 330785 - DNA, 922 bp, Homo sapiens
  misc_feature (873)..(873): n is a, c, g, or t
ctctttttccggctggaaccatggagggtgtagaagagaagaagaaggaggttcctgctgtgccagaaacccttaagaaaaagcgaaggaatttcgcagagctgaagatcaagcgcctgagaaagaagtttgcccaaaagatgcttcgaaaggcaaggaggaagcttatctatgaaaaagcaaagcactatcacaaggaatataggcagatgtacagaactgaaattcgaatggcgaggatggcaagaaaagctggcaacttctatgtacctgcagaacccaaattggcgtttgtcatcagaatcagaggtatcaatggagtgagcccaaaggttcgaaaggtgttgcagcttcttcgccttcgtcaaatcttcaatggaacctttgtgaagctcaacaaggcttcgattaacatgctgaggattgtagagccatatattgcatgggggtaccccaatctgaagtcagtaaatgaactaatctacaagcgtggttatggcaaaatcaataagaagcgaattgctttgacagataacgctttgattgctcgatctcttggtaaatacggcatcatctgcatggaggatttgattcatgagatctatactgttggaaaacgcttcaaagaggcaaataacttcctgtggcccttcaaattgtcttctccacgaggtggaatgaagaaaaagaccacccattttgtagaaggtggagatgctggcaacagggaggaccagatcaacaggcttattagaagaatgaactaaggtgtctaccatgattatttttctaagctggttggttaataaacagtacctgctctcaaattgaaaaaaaaaaaccgggggcttttcggggggaaaggtgaagggnggccgttctccctcgcagggaatgcggcctagggtatcgatggatccgc

SEQ ID NO: 330786 - DNA, 946 bp, Homo sapiens
ctctttttccggctggaaccatggagggtgtagaagagaagaagaaggaggttcctgctgtgccagaaacccttaagaaaaagcgaaggaatttcgcagagctgaagatcaagcgcctgagaaagaagtttgcccaaaagatgcttcgaaaggcaaggaggaagcttatctatgaaaaagcaaagcactatcacaaggaatataggcagatgtacagaactgaaattcgaatggcgaggatggcaagaaaagctggcaacttctatgtacctgcagaacccaaattggcgtttgtcatcagaatcagaggtatcaatggagtgagcccaaaggttcgaaaggtgttgcagcttcttcgccttcgtcaaatcttcaatggaacctttgtgaagctcaacaaggcttcgattaacatgctgaggattgtagagccatatattgcatgggggtaccccaatctgaagtcagtaaatgaactaatctacaagcgtggttatggcaaaatcaataagaagcgaattgctttgacagataacgctttgattgctcgatctcttggtaaatacggcatcatctgcatggaggatttgattcatgagatctatactgttggaaaacgcttcaaagaggcaaataacttcctgtggcccttcaaattgtcttctccacgaggtggaatgaagaaaaagaccacccattttgtagaaggtggagatgctggcaacagggaggaccagatcaacaggcttattagaagaatgaactaaggtgtctaccatgattatttttctaagctggttggttaataaacagtacctgctctcaaattgaaaaaaaaaaaaaaaatttgtggggggttgggcctggaaaaagtttttaaaaccattcggtgggggggggcgcccatgatgtttggggacagggggaaaagggggcccaagaggac

SEQ ID NO: 330787 - DNA, 700 bp, Homo sapiens
ctctttttccggctggaaccatggagggtgtagaagagaagaagaaggaggttcctgctgtgccagaaacccttaagaaaaagcgaaggaatttcgcagagctgaagatcaagcgcctgagaaagaagtttgcccaaaagatgcttcgaaaggcaaggaggaagcttatctatgaaaaagcaaagcactatcacaaggaatataggcagatgtacagaactgaaattcgaatggcgaggatggcaagaaaagctggcaacttctatgtacctgcagaacccaaattggcgtttgtcatcagaatcagaggtatcaatggagtgagcccaaaggttcgaaaggtgttgcagcttcttcgccttcgtcaaatcttcaatggaacctttgtgaagctcaacaaggcttcgattaacatgctgaggattgtagagccatatattgcatgggggtaccccaatctgaagtcagtaaatgaactaatctacaagcgtggttatggcaaaatcaataagaagcgaattgctttgacagataacgctttgattgctcgatctcttggtaaatacggcatcatctgcatggaggatttgattcatgagatctatactgttggaaaacgcttcaaagaggcaaataacttcctgtggcccttcaaattgtcttctccacgaggtggaatgaagaaaaagaccacccattt

SEQ ID NO: 330788 - DNA, 467 bp, Homo sapiens
ctctttttccggctggaaccatggagggtgtagaagagaagaagaaggaggttcctgctgtgccagaaacccttaagaaaaagcgaaggaatttcgcagagctgaagatcaagcgcctgagaaagaagtttgcccaaaagatgcttcgaaaggcaaggaggaagcttatctatgaaaaagcaaagcactatcacaaggaatataggcagatgtacagaactgaaattcgaatggcgaggatggcaagaaaagctggcaacttctatgtacctgcagaacccaaattggcgtttgtcatcagaatcagaggtatcaatggagtgagcccaaaggttcgaaaggtgttgcagcttcttcgccttcgtcaaatcttcaatggaacctttgtgaagctcaacagagctaggagatgtggagaaagcattggttcaacactaatgcatctacacgattagtttgtgaaggtg

SEQ ID NO: 330789 - DNA, 1225 bp, Homo sapiens
ctctttttccggctggaaccatggagggtgtagaagagaagaagaaggaggttcctgctgtgccagaaacccttaagaaaaagcgaaggaatttcgcagagctgaagatcaagcgcctgagaaagaagtttgcccaaaagatgcttcgaaaggcaaggaggaagcttatctatgaaaaagcaaagcactatcacaaggaatataggcagatgtacagaactgaaattcgaatggcgaggatggcaagaaaagctggcaacttctatgtacctgcagaacccaaattggcgtttgtcatcagaatcagaggtatcaatggagtgagcccaaaggttcgaaaggtgttgcagcttcttcgccttcgtcaaatcttcaatggaacctttgtgaagctcaacaaggcttcgattaacatgctgaggattgtagagccatatattgcatgggggtaccccaatctgaagtcagtaaatgaactaatctacaagcgtggttatggcaaaatcaataagaagcgaattgctttgacagataacgctttgattgctcgatctcttggtaaatacggcatcatctgcatggaggatttgattcatgagatctatactgttggaaaacgcttcaaagaggcaaataacttcctgtggcccttcaaattgtcttctccacgaggtggaatgaagaaaaagaccacccattttgtagaaggtggagatgctggcaacagggaggaccagatcaacaggcttattagaagaatgaactaaggtgtctaccatgattatttttctaagctggttggttaataaacagtacctgctctcaaattgaaaaaaaaaaaaaaaaaaaaaaaaaaaaaaaaaaaaaaaaaaaaaaaaaaaaaaaaaaaaaacaaacaaaagaaaaaaaaaaaaaaaaaaaaaaaaaaagggagaagggcgaaggaagaagaaagaaaaaaagaaaaccaaaaaacagagggagagagagggaggagacaaaagagaggaagaaaacagacagggaaaacagaagaaggagagaaacaccgggaacaaaaagctaagggcggtaggagaacacgaaaaaaaaaaacaacgggggagggggaggaagaaaaggagaggacgacgaaaacacagaagagagagagaaacaggaggagcgaacgggcgggaccaataaccagaggagagaccaccaaaagagcagcaaaacagaaaag

SEQ ID NO: 330790 - DNA, 597 bp, Homo sapiens
  misc_feature (570)..(571): n is a, c, g, or t
ctctttttccggctggaaccatggagggtgtagaagagaagaagaaggaggttcctgctgtgccagaaacccttaagaaaaagcgaaggaatttcgcagagctgaagatcaagcgcctgagaaagaagtttgcccaaaagatgcttcgaaaggcaaggaggaagcttatctatgaaaaagcaaagcactatcacaaggaatataggcagatgtacagaactgaaattcgaatggcgaggatggcaagaaaagctggcaacttctatgtacctgcagaacccaaattggcgtttgtcatcagaatcagaggtatcaatggagtgagcccaaaggttcgaaaggtgttgcagcttcttcgccttcgtcaaatcttcaatggaacctttgtgaagctcaacaaggcttcgattaacatgctgaggattgtagagccatatattgcatgggggtaccccaatctgaagtcagtaaatgaactaatctacaagcgtggttatggcaaaatcaataagaagcgaattgctttgacagataacgctttgattgctcgatctcttggtaaatacggcnnacggtccggccatacgtgtccggcca

SEQ ID NO: 330791 - DNA, 615 bp, Homo sapiens
ctctttttccggctggaaccatggagggtgtagaagagaagaagaaggaggttcctgctgtgccagaaacccttaagaaaaagcgaaggaatttcgcagagctgaagatcaagcgcctgagaaagaagtttgcccaaaagatgcttcgaaaggcaaggaggaagcttatctatgaaaaagcaaagcactatcacaaggaatataggcagatgtacagaactgaaattcgaatggcgaggatggcaagaaaagctggcaacttctatgtacctgcagaacccaaattggcgtttgtcatcagaatcataacgctttgattgctcgatctcttggtaaatacggcatcatctgcatggaggatttgattcatgagatctatactgttggaaaacgcttcaaagaggcaaataacttcctgtggcccttcaaattgtcttctccacgaggtggaatgaagaaaaagaccacccattttgtagaaggtggagatgctggcaacagggaggaccagatcaacaggcttattagaagaatgaactaaggtgtctaccatgattatttttctaagctggttggttaataaacagtacctgctctcaaattgaaaaaaaaaaa

SEQ ID NO: 330792 - DNA, 783 bp, Homo sapiens
ctctttttccggctggaaccatggagggtgtagaagagaagaagaaggaggttcctgctgtgccagaaacccttaagaaaaagcgaaggaatttcgcagagctgaagatcaagcgcctgagaaagaagtttgcccaaaagatgcttcgaaaggcaaggaggaagcttatctatgaaaaagcaaagcactatcacaaggaatataggcagatgtacagaactgaaattcgaatggcgaggatggcaagagaggtatcaatggagtgagcccaaaggttcgaaaggtgttgcagcttcttcgccttcgtcaaatcttcaatggaacctttgtgaagctcaacaaggcttcgattaacatgctgaggattgtagagccatatattgcatgggggtaccccaatctgaagtcagtaaatgaactaatctacaagcgtggttatggcaaaatcaataagaagcgaattgctttgacagataacgctttgattgctcgatctcttggtaaatacggcatcatctgcatggaggatttgattcatgagatctatactgttggaaaacgcttcaaagaggcaaataacttcctgtggcccttcaaattgtcttctccacgaggtggaatgaagaaaaagaccacccattttgtagaaggtggagatgctggcaacagggaggaccagatcaacaggcttattagaagaatgaactaaggtgtctaccatgattatttttctaagctggttggttaataaacagtacctgctctcaaattgaaaaaaaaaaa

SEQ ID NO: 330793 - DNA, 5226 bp, Homo sapiens
aggaaaaaccgtccttcgggtccccgcctctccactcctaacgctttactccctactccccctgcgaccactacacagccggctacggaggcccctaatgtacaaatatcccccaggcccttgctcatcctgataggttttgtcctttcttaatcgacccagtactaaggccttgtgttcagtttttctccaggattcagactagagagtttcttccggcgtaaggaacttcaacgctcttcacggaagtaaaactcgcggaattgtggcgggagggggaggaggaagtcagggcgcctgcgcggagaggccgctttccatccgggtccctgtccgtgcggtgcagcaggtcggtaggcgggaaatggcgactggctgaaggagctggttctgttgctgctgcggggtaagcgggaaagacaccacacattgcgcagtcgggaccatcgccggagcctgaggacacttctctgtcgtcacagttagttttacatgtggcacccataaaagatgaggctgagaacacggaaagcttctcagcagtcaaatcaaatccaaacacaacgcactgccagagcaaagaggaaatattcagaggttgatgatagcctgccttcaggaggagaaaaaccatcgaagaatgaaaccggcttgttgtcttcaattaaaaaatttattaaaggaagcacacctaaggaagagagagaaaatccttcaaaacggagtagaattgaacgtgatatagataacaatttgatcacgtcaacaccaagagcaggagaaaaacctaacaaacagatatctcgagtaagacggaaaagtcaagtaaatggagaagctggtagttatgaaatgacaaatcaacatgtaaaacaaaatggaaaattagaagataatccttcctctggcagtcctccaaggactactttgttggggaccatattttcacctgtcttcaactttttttcaccagcaaataaaaatggaacgtcaggatcagattctccaggacaggctgtggaagctgaagaaatagtaaaacaacttgatatggaacaggtggatgagatcactaccagtactactacatcaactaatggagcagcttactcaaatcaagcagttcaagtgagaccatcactaaacaatggtttagaagaagcagaagaaacagttaatcgtgatatcccaccccttacagcaccagtaactccagatagtggttattcatcagcccacgcggaggccacctatgaagaagactgggaagtatttgacccctattatttcatcaaacatgtcccgccactgacagaagaacaactaaataggaaacctgctcttccgttgaaaacaagaagcacaccggaattctccctagttttagacttggatgaaacactagtgcattgtagtctaaatgagctagaagatgcagcacttacttttccagtccttttccaagatgtcatttatcaggtttatgtgagattaagaccatttttcagggaattcctggaacgaatgtctcagatgtatgagatcattctttttactgcttctaagaaggtgtatgcagacaagttactgaacatactagaccctaaaaagcaactggtcaggcaccggcttttccgtgaacattgtgtttgtgtacaaggaaactatataaaggacttaaatattcttggaagagatctttcaaaaactataataattgacaactcaccacaagcctttgcatatcagctttctaatggaatccctatagaaagttggtttatggataaaaatgacaatgaactcctaaaattgattccattcctggagaagcttgtagaactgaatgaagatgttcgaccacacatcagagacagatttcgcttgcatgatttgctgcccccagattaagtacaaagacttgtcaaatcactgaagggggagagaatgcaggacccttttggactaagacaaaaacattgccattactgttgaaattttgcatttttgtaccccgtcttgcttttcttatctttggtgcccaataataattaagggttacagaaagagactttatctatctcagatcgaatacatatagtaggtaggctaaaacagaagagtctttagaactagtgcaactccagtgaaattttttatgtacaggacatctgcagtttataaagaattctgtttctgccaccagcagtttgacctgtagtcacacaggattttatgataataacagagatgaaaatggacttttattttctctctgtttggtgctctaagtgggtttgtagccacttttctgttactttatgattctcatttcaacaggaatggccagtaaaagttgttttatttttcctgttaaggtttataacctttttacatttttgacctgtattagattagaatttcattatgcattccttttagttgaggcgcttcatagttttctggagatagtcaatttttagttttttattatacatttgaatggccgttttcctgctttgtctgcctgcacattgtatatttgtttaaaaatattctctacttttagtctatgtaagtttcatttagaaagacatgcatttatattttgtttctgtaatattctactgtaggtgaaatcttttcaaaaatcaagagactgggtagataagaatatatgaatgactaatatacaaaagatttaaaccattgtgatggcgtatattctcaaatggtaatatcttgcaatggcacacagatttaatggataaaggtatacctcagacttcactgtgctcacaaatctttgaggagaaagtttggtcacctgtttggcttgatttagttactgctgcctttggttttctccaggaatgaagtattcagcacagtgactcagtatttttagttattttgcatgggctggtagtacctctgttatgctctcagttacaatcaatttaaaactgtataacagtcttggtacctaacagtagctatgcataatcctgtggcacagtacactcccaagccaccaatgcagttaatatgctctcatagtggtttttctatgctatatgaaaatagtcttcaagccttggttctctaatgcagctaccacaagaggttgatatttttatagtggcgtgtaatctccttttcgggaggctttttatggaaggtagaatttgtaaaagttcgtatgctttgcctctcaactgcattaacatgccacaggctcagactgtttttgtgtaaaggatgtcaaagaacggcactttttctaaagagaagtttgatattttgtatgcttgttaagaaagtacagtattggaaattaaaggtggacaactgataattgaggagtatgtcaattaattttttatgtatattacctgtttacttgtacaacttactgtacaaattacatgcagcttcattttcaaatgaatccttaaaataaggaaatctttttaggaaaacatttaatttttgtatttttgattttaaaggcatgagttatgtcaattttcagtgtattaatgaagattttaacttttcatcaggttgagtgttttcttactatattatctgttgtgtatgtagttagcatattgtgtcactgaactgtttaaaaatctagcatgtagagcaagcctgttttgtggaaaatccttattcattaaaaaaataatcatggcagattttctgcaaaaaaaaaacaaaagcatttgcaattcagaatactgatttttttaattttatttaaagaaaggtattttgcttgcaggaaaaaaatactacagattcattttaatgagaatctttgaaatgtatttatctttagggcatctgggcatctttatgctgtttgtcttctgtctttcttgaaataaaatgtacatacgttacctttacatatgctcttgctcaaaattgtgaacctagttacatttctccctgctcccttcctttttatgctcaaacagcgaaacccaaaacttaaaagatctgaactttcagcatgcattctgattgctgaaagatttcctgatttagtgcattctcaaaagggctttcccataatctaaagggaaatgtaagcacctatactcttgtgcctgtgggcacttcaataataaaaaccaactttttaaactaatcatcttttatcaatgataaagttgttttcagtcccacactaggagagttcctttaagtcagctgatcaagcataagatacttccgtaaagaaataaactaagaaaattttttatggcttgagaaaattccttgaggccaaattaatatatttttctttgttattttatttgagtcattttaaatttgttaatacaaaatttaagataatttacagagacaatttatccagcttccttctaccttaatacaatgttttgtcttcccattatcctctcttttctttatctgttggtagatgtaaaaaacttccatttagttaatcggaggtgtgtattttttaaattgaaatgtgcccagccccttcagctcacacaggaaacatgaactcttaaaaaactgactagtaaatgcaggagaggtggatacctgatgagacacagcgaaagtgacctgtatacacattacaactctggagtacatattaaagtcgtgctatttccagtggtaaatgtctgacttttaagacattcttttaaatatttgtatcattgttaggatgttttaatcagttgttttttaattccatgtaatatatgtagccctcatcagatttatatcaccatatttctccttgtgtcctaagagaattgatgacaattcgtaaccataaattgttttatattagctagtatgtatatttatttttacccaatggctttatctgtttcccaaaatttgtttgggatttgttgaaagcattgtgtaacttctataaacggctattttcttgtaactgtcagtgaaatgaatgtgtacattgttttcttgtatttctctgggttgttttttgtttttttttccaagggttaacatagaatgttttttttaaaaaattatctttggccaatgactttttcatctagatcttactttcattcaaccttctaaagaagttcgtttctcattgttttgttctgtcaacttgcctgaaaaacagagacttcatctcatcaatgaagaaagcatttcattattcctacagatctttcctgcgagcacaga

SEQ ID NO: 330794 - DNA, 3917 bp, Homo sapiens
aggaaaaaccgtccttcgggtccccgcctctccactcctaacgctttactccctactccccctgcgaccactacacagccggctacggaggcccctaatgtacaaatatcccccaggcccttgctcatcctgataggttttgtcctttcttaatcgacccagtactaaggccttgtgttcagtttttctccaggattcagactagagagtttcttccggcgtaaggaacttcaacgctcttcacggaagtaaaactcgcggaattgtggcgggagggggaggaggaagtcagggcgcctgcgcggagaggccgctttccatccgggtccctgtccgtgcggtgcagcaggtcggtaggcgggaaatggcgactggctgaaggagctggttctgttgctgctgcggggtaagcgggaaagacaccacacattgcgcagtcgggaccatcgccggagcctgaggacacttctctgtcgtcacagttagttttacatgtggcacccataaaagatgaggctgagaacacggaaagcttctcagcagtcaaatcaaatccaaacacaacgcactgccagagcaaagaggaaatattcagaggttgatgatagcctgccttcaggaggagaaaaaccatcgaagaatgaaaccggcttgttgtcttcaattaaaaaatttattaaaggaagcacacctaaggaagagagagaaaatccttcaaaacggagtagaattgaacgtgatatagataacaatttgatcacgtcaacaccaagagcaggagaaaaacctaacaaacagatatctcgagtaagacggaaaagtcaagtaaatggagaagctggtagttatgaaatgacaaatcaacatgtaaaacaaaatggaaaattagaagataatccttcctctggcagtcctccaaggactactttgttggggaccatattttcacctgtcttcaactttttttcaccagcaaataaaaatggaacgtcaggatcagattctccaggacaggctgtggaagctgaagaaatagtaaaacaacttgatatggaacaggtggatgagatcactaccagtactactacatcaactaatggagcagcttactcaaatcaagcagttcaagtgagaccatcactaaacaatggtttagaagaagcagaagaaacagttaatcgtgatatcccaccccttacagcaccagtaactccagatagtggttattcatcagcccacgcggaggccacctatgaagaagactgggaagtatttgacccctattatttcatcaaacatgtcccgccactgacagaagaacaactaaataggaaacctgctcttccgttgaaaacaagaagcacaccggaattctccctagttttagacttggatgaaacactagtgcattgtagtctaaatgagctagaagatgcagcacttacttttccagtccttttccaagatgtcatttatcaggtttatgtgagattaagaccatttttcagggaattcctggaacgaatgtctcagatgtatgagatcattctttttactgcttctaagaaggtgtatgcagacaagttactgaacatactagaccctaaaaagcaactggtcaggcaccggcttttccgtgaacattgtgtttgtgtacaaggaaactatataaaggacttaaatattcttggaagagatctttcaaaaactataataattgacaactcaccacaagcctttgcatatcagctttctaatggaatccctatagaaagttggtttatggataaaaatgacaatgaactcctaaaattgattccattcctggagaagcttgtagaactgaatgaagatgttcgaccacacatcagagacagatttcgcttgcatgatttgctgcccccagattaagtacaaagacttgtcaaatcactgaagggggagagaatgcaggacccttttggactaagacaaaaacattgccattactgttgaaattttgcatttttgtaccccgtcttgcttttcttatctttggtgcccaataataattaagggttacagaaagagactttatctatctcagatcgaatacatatagtaggtaggctaaaacagaagagtctttagaactagtgcaactccagtgaaattttttatgtacaggacatctgcagtttataaagaattctgtttctgccaccagcagtttgacctgtagtcacacaggattttatgataataacagagatgaaaatggacttttattttctctctgtttggtgctctaagtgggtttgtagccacttttctgttactttatgattctcatttcaacaggaatggccagtaaaagttgttttatttttcctgttaaggtttataacctttttacatttttgacctgtattagattagaatttcattatgcattccttttagttgaggcgcttcatagttttctggagatagtcaatttttagttttttattatacatttgaatggccgttttcctgctttgtctgcctgcacattgtatatttgtttaaaaatattctctacttttagtctatgtaagtttcatttagaaagacatgcatttatattttgtttctgtaatattctactgtaggtgaaatcttttcaaaaatcaagagactgggtagataagaatatatgaatgactaatatacaaaagatttaaaccattgtgatggcgtatattctcaaatggtaatatcttgcaatggcacacagatttaatggataaaggtatacctcagacttcactgtgctcacaaatctttgaggagaaagtttggtcacctgtttggcttgatttagttactgctgcctttggttttctccaggaatgaagtattcagcacagtgactcagtatttttagttattttgcatgggctggtagtacctctgttatgctctcagttacaatcaatttaaaactgtataacagtcttggtacctaacagtagctatgcataatcctgtggcacagtacactcccaagccaccaatgcagttaatatgctctcatagtggtttttctatgctatatgaaaatagtcttcaagccttggttctctaatgcagctaccacaagaggttgatatttttatagtggcgtgtaatctccttttcgggaggctttttatggaaggtagaatttgtaaaagttcgtatgctttgcctctcaactgcattaacatgccacaggctcagactgtttttgtgtaaaggatgtcaaagaacggcactttttctaaagagaagtttgatattttgtatgcttgttaagaaagtacagtattggaaattaaaggtggacaactgataattgaggagtatgtcaattaattttttatgtatattacctgtttacttgtacaacttactgtacaaattacatgcagcttcattttcaaatgaatccttaaaataaggaaatctttttaggaaaacatttaatttttgtatttttgattttaaaggcatgagttatgtcaattttcagtgtattaatgaagattttaacttttcatcaggttgagtgttttcttactatattatctgttgtgtatgtagttagcatattgtgtcactgaactgtttaaaaatctagcatgtagagcaagcctgttttgtggaaaatccttattcattaaaaaaataatcatggcagattttctgcaaaaaaaaaacaaaagcatttgcaattcagaatactgatttttttaattttatttaaagaaaggtattttgcttgcaggaaaaaaatactacagattcattttaatgagaatctttgaaatgtatttatctttagggcatctgggcatctttatgctgtttgtcttctgtctttcttgaaataaaatgtacatacgttaccttta

SEQ ID NO: 330795 - DNA, 3712 bp, Homo sapiens
aggaaaaaccgtccttcgggtccccgcctctccactcctaacgctttactccctactccccctgcgaccactacacagccggctacggaggcccctaatgtacaaatatcccccaggcccttgctcatcctgataggttttgtcctttcttaatcgacccagtactaaggccttgtgttcagtttttctccaggattcagactagagagtttcttccggcgtaaggaacttcaacgctcttcacggaagtaaaactcgcggaattgtggcgggagggggaggaggaagtcagggcgcctgcgcggagaggccgctttccatccgggtccctgtccgtgcggtgcagcaggtcggtaggcgggaaatggcgactggctgaaggagctggttctgttgctgctgcggggtaagcgggaaagacaccacacattgcgcagtcgggaccatcgccggagcctgaggacacttctctgtcgtcacagttagttttacatgtggcacccataaaagatgaggctgagaacacggaaagcttctcagcagtcaaatcaaatccaaacacaacgcactgccagagcaaagaggaaatattcagaggttgatgatagcctgccttcaggaggagaaaaaccatcgaagaatgaaaccggcttgttgtcttcaattaaaaaatttattaaaggaagcacacctaaggaagagagagaaaatccttcaaaacggagtagaattgaacgtgatatagataacaatttgatcacgtcaacaccaagagcaggagaaaaacctaacaaacagatatctcgagtaagacggaaaagtcaagtaaatggagaagctggtagttatgaaatgacaaatcaacatgtaaaacaaaatggaaaattagaagataatccttcctctggcagtcctccaaggactactttgttggggaccatattttcacctgtcttcaactttttttcaccagcaaataaaaatggaacgtcaggatcagattctccaggacaggctgtggaagctgaagaaatagtaaaacaacttgatatggaacaggtggatgagatcactaccagtactactacatcaactaatggagcagcttactcaaatcaagcagttcaagtgagaccatcactaaacaatggtttagaagaagcagaagaaacagttaatcgtgatatcccaccccttacagcaccagtaactccagatagtggttattcatcagcccacgcggaggccacctatgaagaagactgggaagtatttgacccctattatttcatcaaacatgtcccgccactgacagaagaacaactaaataggaaacctgctcttccgttgaaaacaagaagcacaccggaattctccctagttttagacttggatgaaacactagtgcattgtagtctaaatgagctagaagatgcagcacttacttttccagtccttttccaagatgtcatttatcaggtttatgtgagattaagaccatttttcagggaattcctggaacgaatgtctcagatgtatgagatcattctttttactgcttctaagaaggtgtatgcagacaagttactgaacatactagaccctaaaaagcaactggtcaggcaccggcttttccgtgaacattgtgtttgtgtacaaggaaactatataaaggacttaaatattcttggaagagatctttcaaaaactataataattgacaactcaccacaagcctttgcatatcagctttctaatggaatccctatagaaagttggtttatggataaaaatgacaatgaactcctaaaattgattccattcctggagaagcttgtagaactgaatgaagatgttcgaccacacatcagagacagatttcgcttgcatgatttgctgcccccagattaagtacaaagacttgtcaaatcactgaagggggagagaatgcaggacccttttggactaagacaaaaacattgccattactgttgaaattttgcatttttgtaccccgtcttgcttttcttatctttggtgcccaataataattaagggttacagaaagagactttatctatctcagatcgaatacatatagtaggtaggctaaaacagaagagtctttagaactagtgcaactccagtgaaattttttatgtacaggacatctgcagtttataaagaattctgtttctgccaccagcagtttgacctgtagtcacacaggattttatgataataacagagatgaaaatggacttttattttctctctgtttggtgctctaagtgggtttgtagccacttttctgttactttatgattctcatttcaacaggaatggccagtaaaagttgttttatttttcctgttaaggtttataacctttttacatttttgacctgtattagattagaatttcattatgcattccttttagttgaggcgcttcatagttttctggagatagtcaatttttagttttttattatacatttgaatggccgttttcctgctttgtctgcctgcacattgtatatttgtttaaaaatattctctacttttagtctatgtaagtttcatttagaaagacatgcatttatattttgtttctgtaatattctactgtaggtgaaatcttttcaaaaatcaagagactgggtagataagaatatatgaatgactaatatacaaaagatttaaaccattgtgatggcgtatattctcaaatggtaatatcttgcaatggcacacagatttaatggataaaggtatacctcagacttcactgtgctcacaaatctttgaggagaaagtttggtcacctgtttggcttgatttagttactgctgcctttggttttctccaggaatgaagtattcagcacagtgactcagtatttttagttattttgcatgggctggtagtacctctgttatgctctcagttacaatcaatttaaaactgtataacagtcttggtacctaacagtagctatgcataatcctgtggcacagtacactcccaagccaccaatgcagttaatatgctctcatagtggtttttctatgctatatgaaaatagtcttcaagccttggttctctaatgcagctaccacaagaggttgatatttttatagtggcgtgtaatctccttttcgggaggctttttatggaaggtagaatttgtaaaagttcgtatgctttgcctctcaactgcattaacatgccacaggctcagactgtttttgtgtaaaggatgtcaaagaacggcactttttctaaagagaagtttgatattttgtatgcttgttaagaaagtacagtattggaaattaaaggtggacaactgataattgaggagtatgtcaattaattttttatgtatattacctgtttacttgtacaacttactgtacaaattacatgcagcttcattttcaaatgaatccttaaaataaggaaatctttttaggaaaacatttaatttttgtatttttgattttaaaggcatgagttatgtcaattttcagtgtattaatgaagattttaacttttcatcaggttgagtgttttcttactatattatctgttgtgtatgtagttagcatattgtgtcactgaactgtttaaaaatctagcatgtagagcaagcctgttttgtggaaaatccttattcattaaaaaaataatcatggcagattttctgc

SEQ ID NO: 330796 - DNA, 3800 bp, Homo sapiens
aggaaaaaccgtccttcgggtccccgcctctccactcctaacgctttactccctactccccctgcgaccactacacagccggctacggaggcccctaatgtacaaatatcccccaggcccttgctcatcctgataggttttgtcctttcttaatcgacccagtactaaggccttgtgttcagtttttctccaggattcagactagagagtttcttccggcgtaaggaacttcaacgctcttcacggaagtaaaactcgcggaattgtggcgggagggggaggaggaagtcagggcgcctgcgcggagaggccgctttccatccgggtccctgtccgtgcggtgcagcaggtcggtaggcgggaaatggcgactggctgaaggagctggttctgttgctgctgcggggtaagcgggaaagacaccacacattgcgcagtcgggaccatcgccggagcctgaggacacttctctgtcgtcacagttagttttacatgtggcacccataaaagatgaggctgagaacacggaaagcttctcagcagtcaaatcaaatccaaacacaacgcactgccagagcaaagaggaaatattcagaggttgatgatagcctgccttcaggaggagaaaaaccatcgaagaatgaaaccggcttgttgtcttcaattaaaaaatttattaaaggaagcacacctaaggaagagagagaaaatccttcaaaacggagtagaattgaacgtgatatagataacaatttgatcacgtcaacaccaagagcaggagaaaaacctaacaaacagatatctcgagtaagacggaaaagtcaagtaaatggagaagctggtagttatgaaatgacaaatcaacatgtaaaacaaaatggaaaattagaagataatccttcctctggcagtcctccaaggactactttgttggggaccatattttcacctgtcttcaactttttttcaccagcaaataaaaatggaacgtcaggatcagattctccaggacaggctgtggaagctgaagaaatagtaaaacaacttgatatggaacaggtggatgagatcactaccagtactactacatcaactaatggagcagcttactcaaatcaagcagttcaagtgagaccatcactaaacaatggtttagaagaagcagaagaaacagttaatcgtgatatcccaccccttacagcaccagtaactccagatagtggttattcatcagcccacgcggaggccacctatgaagaagactgggaagtatttgacccctattatttcatcaaacatgtcccgccactgacagaagaacaactaaataggaaacctgctcttccgttgaaaacaagaagcacaccggaattctccctagttttagacttggatgaaacactagtgcattgtagtctaaatgagctagaagatgcagcacttacttttccagtccttttccaagatgtcatttatcaggtttatgtgagattaagaccatttttcagggaattcctggaacgaatgtctcagatgtatgagatcattctttttactgcttctaagaaggtgtatgcagacaagttactgaacatactagaccctaaaaagcaactggtcaggcaccggcttttccgtgaacattgtgtttgtgtacaaggaaactatataaaggacttaaatattcttggaagagatctttcaaaaactataataattgacaactcaccacaagcctttgcatatcagctttctaatggaatccctatagaaagttggtttatggataaaaatgacaatgaactcctaaaattgattccattcctggagaagcttgtagaactgaatgaagatgttcgaccacacatcagagacagatttcgcttgcatgatttgctgcccccagattaagtacaaagacttgtcaaatcactgaagggggagagaatgcaggacccttttggactaagacaaaaacattgccattactgttgaaattttgcatttttgtaccccgtcttgcttttcttatctttggtgcccaataataattaagggttacagaaagagactttatctatctcagatcgaatacatatagtaggtaggctaaaacagaagagtctttagaactagtgcaactccagtgaaattttttatgtacaggacatctgcagtttataaagaattctgtttctgccaccagcagtttgacctgtagtcacacaggattttatgataataacagagatgaaaatggacttttattttctctctgtttggtgctctaagtgggtttgtagccacttttctgttactttatgattctcatttcaacaggaatggccagtaaaagttgttttatttttcctgttaaggtttataacctttttacatttttgacctgtattagattagaatttcattatgcattccttttagttgaggcgcttcatagttttctggagatagtcaatttttagttttttattatacatttgaatggccgttttcctgctttgtctgcctgcacattgtatatttgtttaaaaatattctctacttttagtctatgtaagtttcatttagaaagacatgcatttatattttgtttctgtaatattctactgtaggtgaaatcttttcaaaaatcaagagactgggtagataagaatatatgaatgactaatatacaaaagatttaaaccattgtgatggcgtatattctcaaatggtaatatcttgcaatggcacacagatttaatggataaaggtatacctcagacttcactgtgctcacaaatctttgaggagaaagtttggtcacctgtttggcttgatttagttactgctgcctttggttttctccaggaatgaagtattcagcacagtgactcagtatttttagttattttgcatgggctggtagtacctctgttatgctctcagttacaatcaatttaaaactgtataacagtcttggtacctaacagtagctatgcataatcctgtggcacagtacactcccaagccaccaatgcagttaatatgctctcatagtggtttttctatgctatatgaaaatagtcttcaagccttggttctctaatgcagctaccacaagaggttgatatttttatagtggcgtgtaatctccttttcgggaggctttttatggaaggtagaatttgtaaaagttcgtatgctttgcctctcaactgcattaacatgccacaggctcagactgtttttgtgtaaaggatgtcaaagaacggcactttttctaaagagaagtttgatattttgtatgcttgttaagaaagtacagtattggaaattaaaggtggacaactgataattgaggagtatgtcaattaattttttatgtatattacctgtttacttgtacaacttactgtacaaattacatgcagcttcattttcaaatgaatccttaaaataaggaaatctttttaggaaaacatttaatttttgtatttttgattttaaaggcatgagttatgtcaattttcagtgtattaatgaagattttaacttttcatcaggttgagtgttttcttactatattatctgttgtgtatgtagttagcatattgtgtcactgaactgtttaaaaatctagcatgtagagcaagcctgttttgtggaaaatccttattcattaaaaaaataatcatggcagattttctgcaaaaaaaaaacaaaagcatttgcaattcagaatactgatttttttaattttatttaaagacgtaaagttccgttggggatcctcagct

SEQ ID NO: 330797 - DNA, 5027 bp, Homo sapiens
atctcagtcctcctcctcttccagggccgtctgccgggatctcctccccttctaaacctggtcctccagcggctctggcgccttggtaggcatgcactctttggcgcctcgtacgtccactgtgcggagccgctcctgtctggactttcccctgggaacagaaagggagctcacttcccgccagcttcacctcttaggttgcggcctgcgttgtgatttctggggttagatttcactttgctacccacccccactccgatctcaagttcctagtccccaacctctggttttacatgtggcacccataaaagatgaggctgagaacacggaaagcttctcagcagtcaaatcaaatccaaacacaacgcactgccagagcaaagaggaaatattcagaggttgatgatagcctgccttcaggaggagaaaaaccatcgaagaatgaaaccggcttgttgtcttcaattaaaaaatttattaaaggaagcacacctaaggaagagagagaaaatccttcaaaacggagtagaattgaacgtgatatagataacaatttgatcacgtcaacaccaagagcaggagaaaaacctaacaaacagatatctcgagtaagacggaaaagtcaagtaaatggagaagctggtagttatgaaatgacaaatcaacatgtaaaacaaaatggaaaattagaagataatccttcctctggcagtcctccaaggactactttgttggggaccatattttcacctgtcttcaactttttttcaccagcaaataaaaatggaacgtcaggatcagattctccaggacaggctgtggaagctgaagaaatagtaaaacaacttgatatggaacaggtggatgagatcactaccagtactactacatcaactaatggagcagcttactcaaatcaagcagttcaagtgagaccatcactaaacaatggtttagaagaagcagaagaaacagttaatcgtgatatcccaccccttacagcaccagtaactccagatagtggttattcatcagcccacgcggaggccacctatgaagaagactgggaagtatttgacccctattatttcatcaaacatgtcccgccactgacagaagaacaactaaataggaaacctgctcttccgttgaaaacaagaagcacaccggaattctccctagttttagacttggatgaaacactagtgcattgtagtctaaatgagctagaagatgcagcacttacttttccagtccttttccaagatgtcatttatcaggtttatgtgagattaagaccatttttcagggaattcctggaacgaatgtctcagatgtatgagatcattctttttactgcttctaagaaggtgtatgcagacaagttactgaacatactagaccctaaaaagcaactggtcaggcaccggcttttccgtgaacattgtgtttgtgtacaaggaaactatataaaggacttaaatattcttggaagagatctttcaaaaactataataattgacaactcaccacaagcctttgcatatcagctttctaatggaatccctatagaaagttggtttatggataaaaatgacaatgaactcctaaaattgattccattcctggagaagcttgtagaactgaatgaagatgttcgaccacacatcagagacagatttcgcttgcatgatttgctgcccccagattaagtacaaagacttgtcaaatcactgaagggggagagaatgcaggacccttttggactaagacaaaaacattgccattactgttgaaattttgcatttttgtaccccgtcttgcttttcttatctttggtgcccaataataattaagggttacagaaagagactttatctatctcagatcgaatacatatagtaggtaggctaaaacagaagagtctttagaactagtgcaactccagtgaaattttttatgtacaggacatctgcagtttataaagaattctgtttctgccaccagcagtttgacctgtagtcacacaggattttatgataataacagagatgaaaatggacttttattttctctctgtttggtgctctaagtgggtttgtagccacttttctgttactttatgattctcatttcaacaggaatggccagtaaaagttgttttatttttcctgttaaggtttataacctttttacatttttgacctgtattagattagaatttcattatgcattccttttagttgaggcgcttcatagttttctggagatagtcaatttttagttttttattatacatttgaatggccgttttcctgctttgtctgcctgcacattgtatatttgtttaaaaatattctctacttttagtctatgtaagtttcatttagaaagacatgcatttatattttgtttctgtaatattctactgtaggtgaaatcttttcaaaaatcaagagactgggtagataagaatatatgaatgactaatatacaaaagatttaaaccattgtgatggcgtatattctcaaatggtaatatcttgcaatggcacacagatttaatggataaaggtatacctcagacttcactgtgctcacaaatctttgaggagaaagtttggtcacctgtttggcttgatttagttactgctgcctttggttttctccaggaatgaagtattcagcacagtgactcagtatttttagttattttgcatgggctggtagtacctctgttatgctctcagttacaatcaatttaaaactgtataacagtcttggtacctaacagtagctatgcataatcctgtggcacagtacactcccaagccaccaatgcagttaatatgctctcatagtggtttttctatgctatatgaaaatagtcttcaagccttggttctctaatgcagctaccacaagaggttgatatttttatagtggcgtgtaatctccttttcgggaggctttttatggaaggtagaatttgtaaaagttcgtatgctttgcctctcaactgcattaacatgccacaggctcagactgtttttgtgtaaaggatgtcaaagaacggcactttttctaaagagaagtttgatattttgtatgcttgttaagaaagtacagtattggaaattaaaggtggacaactgataattgaggagtatgtcaattaattttttatgtatattacctgtttacttgtacaacttactgtacaaattacatgcagcttcattttcaaatgaatccttaaaataaggaaatctttttaggaaaacatttaatttttgtatttttgattttaaaggcatgagttatgtcaattttcagtgtattaatgaagattttaacttttcatcaggttgagtgttttcttactatattatctgttgtgtatgtagttagcatattgtgtcactgaactgtttaaaaatctagcatgtagagcaagcctgttttgtggaaaatccttattcattaaaaaaataatcatggcagattttctgcaaaaaaaaaacaaaagcatttgcaattcagaatactgatttttttaattttatttaaagaaaggtattttgcttgcaggaaaaaaatactacagattcattttaatgagaatctttgaaatgtatttatctttagggcatctgggcatctttatgctgtttgtcttctgtctttcttgaaataaaatgtacatacgttacctttacatatgctcttgctcaaaattgtgaacctagttacatttctccctgctcccttcctttttatgctcaaacagcgaaacccaaaacttaaaagatctgaactttcagcatgcattctgattgctgaaagatttcctgatttagtgcattctcaaaagggctttcccataatctaaagggaaatgtaagcacctatactcttgtgcctgtgggcacttcaataataaaaaccaactttttaaactaatcatcttttatcaatgataaagttgttttcagtcccacactaggagagttcctttaagtcagctgatcaagcataagatacttccgtaaagaaataaactaagaaaattttttatggcttgagaaaattccttgaggccaaattaatatatttttctttgttattttatttgagtcattttaaatttgttaatacaaaatttaagataatttacagagacaatttatccagcttccttctaccttaatacaatgttttgtcttcccattatcctctcttttctttatctgttggtagatgtaaaaaacttccatttagttaatcggaggtgtgtattttttaaattgaaatgtgcccagccccttcagctcacacaggaaacatgaactcttaaaaaactgactagtaaatgcaggagaggtggatacctgatgagacacagcgaaagtgacctgtatacacattacaactctggagtacatattaaagtcgtgctatttccagtggtaaatgtctgacttttaagacattcttttaaatatttgtatcattgttaggatgttttaatcagttgttttttaattccatgtaatatatgtagccctcatcagatttatatcaccatatttctccttgtgtcctaagagaattgatgacaattcgtaaccataaattgttttatattagctagtatgtatatttatttttacccaatggctttatctgtttcccaaaatttgtttgggatttgttgaaagcattgtgtaacttctataaacggctattttcttgtaactgtcagtgaaatgaatgtgtacattgttttcttgtatttctctgggttgttttttgtttttttttccaagggttaacatagaatgttttttttaaaaaattatctttggccaatgactttttcatctagatcttactttcattcaaccttctaaagaagttcgtttctcattgttttgttctgtcaacttgcctgaaaaacagagacttcatctcatcaatgaagaaagcatttcattattcctacagatctttcctgcgagcacaga

SEQ ID NO: 330798 - DNA, 4636 bp, Homo sapiens
ccaaagtgctgggattacaggcatgagtcaccacacctggcccagtctttgttattgagatggagttttgctgagaaattatttttatatcttttaattaaaaggttctcatgattaggggaacagctaattttttgatacctctggttgaaaaattacaattgcacacatgactaggatgcagaaactttgctcacaaatgttactctagcctgtaagtctttattcttcattgtttgaaatagctagcaaagattctctaaaagcaatatactcagctttgttcctgcaggaatgatcagtctaaataaatatattgtacggtgatgctgcatttagtttttctaaataggtgcatttttaaatgatgatagtacactgaatcatgatttcaggaacgtcaggatcagattctccaggacaggctgtggaagctgaagaaatagtaaaacaacttgatatggaacaggtggatgagatcactaccagtactactacatcaactaatggagcagcttactcaaatcaagcagttcaagtgagaccatcactaaacaatggtttagaagaagcagaagaaacagttaatcgtgatatcccaccccttacagcaccagtaactccagatagtggttattcatcagcccacgcggaggccacctatgaagaagactgggaagtatttgacccctattatttcatcaaacatgtcccgccactgacagaagaacaactaaataggaaacctgctcttccgttgaaaacaagaagcacaccggaattctccctagttttagacttggatgaaacactagtgcattgtagtctaaatgagctagaagatgcagcacttacttttccagtccttttccaagatgtcatttatcaggtttatgtgagattaagaccatttttcagggaattcctggaacgaatgtctcagatgtatgagatcattctttttactgcttctaagaaggtgtatgcagacaagttactgaacatactagaccctaaaaagcaactggtcaggcaccggcttttccgtgaacattgtgtttgtgtacaaggaaactatataaaggacttaaatattcttggaagagatctttcaaaaactataataattgacaactcaccacaagcctttgcatatcagctttctaatggaatccctatagaaagttggtttatggataaaaatgacaatgaactcctaaaattgattccattcctggagaagcttgtagaactgaatgaagatgttcgaccacacatcagagacagatttcgcttgcatgatttgctgcccccagattaagtacaaagacttgtcaaatcactgaagggggagagaatgcaggacccttttggactaagacaaaaacattgccattactgttgaaattttgcatttttgtaccccgtcttgcttttcttatctttggtgcccaataataattaagggttacagaaagagactttatctatctcagatcgaatacatatagtaggtaggctaaaacagaagagtctttagaactagtgcaactccagtgaaattttttatgtacaggacatctgcagtttataaagaattctgtttctgccaccagcagtttgacctgtagtcacacaggattttatgataataacagagatgaaaatggacttttattttctctctgtttggtgctctaagtgggtttgtagccacttttctgttactttatgattctcatttcaacaggaatggccagtaaaagttgttttatttttcctgttaaggtttataacctttttacatttttgacctgtattagattagaatttcattatgcattccttttagttgaggcgcttcatagttttctggagatagtcaatttttagttttttattatacatttgaatggccgttttcctgctttgtctgcctgcacattgtatatttgtttaaaaatattctctacttttagtctatgtaagtttcatttagaaagacatgcatttatattttgtttctgtaatattctactgtaggtgaaatcttttcaaaaatcaagagactgggtagataagaatatatgaatgactaatatacaaaagatttaaaccattgtgatggcgtatattctcaaatggtaatatcttgcaatggcacacagatttaatggataaaggtatacctcagacttcactgtgctcacaaatctttgaggagaaagtttggtcacctgtttggcttgatttagttactgctgcctttggttttctccaggaatgaagtattcagcacagtgactcagtatttttagttattttgcatgggctggtagtacctctgttatgctctcagttacaatcaatttaaaactgtataacagtcttggtacctaacagtagctatgcataatcctgtggcacagtacactcccaagccaccaatgcagttaatatgctctcatagtggtttttctatgctatatgaaaatagtcttcaagccttggttctctaatgcagctaccacaagaggttgatatttttatagtggcgtgtaatctccttttcgggaggctttttatggaaggtagaatttgtaaaagttcgtatgctttgcctctcaactgcattaacatgccacaggctcagactgtttttgtgtaaaggatgtcaaagaacggcactttttctaaagagaagtttgatattttgtatgcttgttaagaaagtacagtattggaaattaaaggtggacaactgataattgaggagtatgtcaattaattttttatgtatattacctgtttacttgtacaacttactgtacaaattacatgcagcttcattttcaaatgaatccttaaaataaggaaatctttttaggaaaacatttaatttttgtatttttgattttaaaggcatgagttatgtcaattttcagtgtattaatgaagattttaacttttcatcaggttgagtgttttcttactatattatctgttgtgtatgtagttagcatattgtgtcactgaactgtttaaaaatctagcatgtagagcaagcctgttttgtggaaaatccttattcattaaaaaaataatcatggcagattttctgcaaaaaaaaaacaaaagcatttgcaattcagaatactgatttttttaattttatttaaagaaaggtattttgcttgcaggaaaaaaatactacagattcattttaatgagaatctttgaaatgtatttatctttagggcatctgggcatctttatgctgtttgtcttctgtctttcttgaaataaaatgtacatacgttacctttacatatgctcttgctcaaaattgtgaacctagttacatttctccctgctcccttcctttttatgctcaaacagcgaaacccaaaacttaaaagatctgaactttcagcatgcattctgattgctgaaagatttcctgatttagtgcattctcaaaagggctttcccataatctaaagggaaatgtaagcacctatactcttgtgcctgtgggcacttcaataataaaaaccaactttttaaactaatcatcttttatcaatgataaagttgttttcagtcccacactaggagagttcctttaagtcagctgatcaagcataagatacttccgtaaagaaataaactaagaaaattttttatggcttgagaaaattccttgaggccaaattaatatatttttctttgttattttatttgagtcattttaaatttgttaatacaaaatttaagataatttacagagacaatttatccagcttccttctaccttaatacaatgttttgtcttcccattatcctctcttttctttatctgttggtagatgtaaaaaacttccatttagttaatcggaggtgtgtattttttaaattgaaatgtgcccagccccttcagctcacacaggaaacatgaactcttaaaaaactgactagtaaatgcaggagaggtggatacctgatgagacacagcgaaagtgacctgtatacacattacaactctggagtacatattaaagtcgtgctatttccagtggtaaatgtctgacttttaagacattcttttaaatatttgtatcattgttaggatgttttaatcagttgttttttaattccatgtaatatatgtagccctcatcagatttatatcaccatatttctccttgtgtcctaagagaattgatgacaattcgtaaccataaattgttttatattagctagtatgtatatttatttttacccaatggctttatctgtttcccaaaatttgtttgggatttgttgaaagcattgtgtaacttctataaacggctattttcttgtaactgtcagtgaaatgaatgtgtacattgttttcttgtatttctctgggttgttttttgtttttttttccaagggttaacatagaatgttttttttaaaaaattatctttggccaatgactttttcatctagatcttactttcattcaaccttctaaagaagttcgtttctcattgttttgttctgtcaacttgcctgaaaaacagagacttcatctcatcaatgaagaaagcatttcattattcctacagatctttcctgcgagcacaga

SEQ ID NO: 330799 - DNA, 3356 bp, Homo sapiens
aggaaaaaccgtccttcgggtccccgcctctccactcctaacgctttactccctactccccctgcgaccactacacagccggctacggaggcccctaatgtacaaatatcccccaggcccttgctcatcctgataggttttgtcctttcttaatcgacccagtactaaggccttgtgttcagtttttctccaggattcagactagagagtttcttccggcgtaaggaacttcaacgctcttcacggaagtaaaactcgcggaattgtggcgggagggggaggaggaagtcagggcgcctgcgcggagaggccgctttccatccgggtccctgtccgtgcggtgcagcaggtcggtaggcgggaaatggcgactggctgaaggagctggttctgttgctgctgcggggtaagcgggaaagacaccacacattgcgcagtcgggaccatcgccggagcctgaggacacttctctgtcgtcacagttagttttacatgtggcacccataaaagatgaggctgagaacacggaaagcttctcagcagtcaaatcaaatccaaacacaacgcactgccagagcaaagaggaaatattcagaggttgatgatagcctgccttcaggaggagaaaaaccatcgaagaatgaaaccggcttgttgtcttcaattaaaaaatttattaaaggaagcacacctaaggaagagagagaaaatccttcaaaacggagtagaattgaacgtgatatagataacaatttgatcacgtcaacaccaagagcaggagaaaaacctaacaaacagatatctcgagtaagacggaaaagtcaagtaaatggagaagctggtagttatgaaatgacaaatcaacatgtaaaacaaaatggaaaattagaagataatccttcctctggcagtcctccaaggactactttgttggggaccatattttcacctgtcttcaactttttttcaccagcaaataaaaatggaacgtcaggatcagattctccaggacaggctgtggaagctgaagaaatagtaaaacaacttgatatggaacaggtggatgagatcactaccagtactactacatcaactaatggagcagcttactcaaatcaagcagttcaagtgagaccatcactaaacaatggtttagaagaagcagaagaaacagttaatcgtgatatcccaccccttacagcaccagtaactccagatagtggttattcatcagcccacgcggaggccacctatgaagaagactgggaagtatttgacccctattatttcatcaaacatgtcccgccactgacagaagaacaactaaataggaaacctgctcttccgttgaaaacaagaagcacaccggaattctccctagttttagacttggatgaaacactagtgcattgtagtctaaatgagctagaagatgcagcacttacttttccagtccttttccaagatgtcatttatcaggtttatgtgagattaagaccatttttcagggaattcctggaacgaatgtctcagatgtatgagatcattctttttactgcttctaagaaggtgtatgcagacaagttactgaacatactagaccctaaaaagcaactggtcaggcaccggcttttccgtgaacattgtgtttgtgtacaaggaaactatataaaggacttaaatattcttggaagagatctttcaaaaactataataattgacaactcaccacaagcctttgcatatcagctttctaatggaatccctatagaaagttggtttatggataaaaatgacaatgaactcctaaaattgattccattcctggagaagcttgtagaactgaatgaagatgttcgaccacacatcagagacagatttcgcttgcatgatttgctgcccccagattaagtacaaagacttgtcaaatcactgaagggggagagaatgcaggacccttttggactaagacaaaaacattgccattactgttgaaattttgcatttttgtaccccgtcttgcttttcttatctttggtgcccaataataattaagggttacagaaagagactttatctatctcagatcgaatacatatagtaggtaggctaaaacagaagagtctttagaactagtgcaactccagtgaaattttttatgtacaggacatctgcagtttataaagaattctgtttctgccaccagcagtttgacctgtagtcacacaggattttatgataataacagagatgaaaatggacttttattttctctctgtttggtgctctaagtgggtttgtagccacttttctgttactttatgattctcatttcaacaggaatggccagtaaaagttgttttatttttcctgttaaggtttataacctttttacatttttgacctgtattagattagaatttcattatgcattccttttagttgaggcgcttcatagttttctggagatagtcaatttttagttttttattatacatttgaatggccgttttcctgctttgtctgcctgcacattgtatatttgtttaaaaatattctctacttttagtctatgtaagtttcatttagaaagacatgcatttatattttgtttctgtaatattctactgtaggtgaaatcttttcaaaaatcaagagactgggtagataagaatatatgaatgactaatatacaaaagatttaaaccattgtgatggcgtatattctcaaatggtaatatcttgcaatggcacacagatttaatggataaaggtatacctcagacttcactgtgctcacaaatctttgaggagaaagtttggtcacctgtttggcttgatttagttactgctgcctttggttttctccaggaatgaagtattcagcacagtgactcagtatttttagttattttgcatgggctggtagtacctctgttatgctctcagttacaatcaatttaaaactgtataacagtcttggtacctaacagtagctatgcataatcctgtggcacagtacactcccaagccaccaatgcagttaatatgctctcatagtggtttttctatgctatatgaaaatagtcttcaagccttggttctctaatgcagctaccacaagaggttgatatttttatagtggcgtgtaatctccttttcgggaggctttttatggaaggtagaatttgtaaaagttcgtatgctttgcctctcaactgcattaacatgccacaggctcagactgtttttgtgtaaaggatgtcaaagaacggcactttttctaaagagaagtttgatattttgtatgcttgttaagaaagtacagtattggaaattaaaggtggacaactgat

SEQ ID NO: 330800 - DNA, 5515 bp, Homo sapiens
aggaaaaaccgtccttcgggtccccgcctctccactcctaacgctttactccctactccccctgcgaccactacacagccggctacggaggcccctaatgtacaaatatcccccaggcccttgctcatcctgataggttttgtcctttcttaatcgacccagtactaaggccttgtgttcagtttttctccaggattcagactagagagtttcttccggcgtaaggaacttcaacgctcttcacggaagtaaaactcgcggaattgtggcgggagggggaggaggaagtcagggcgcctgcgcggagaggccgctttccatccgggtccctgtccgtgcggtgcagcaggtcggtaggcgggaaatggcgactggctgaaggagctggttctgttgctgctgcggggtaagcgggaaagacaccacacattgcgcagtcgggaccatcgccggagcctgaggacacttctctgtcgtcacagttagttttacatgtggcacccataaaagatgaggctgagaacacggaaagcttctcagcagtcaaatcaaatccaaacacaacgcactgccagagcaaagaggaaatattcagaggttgatgatagcctgccttcaggaggagaaaaaccatcgaagaatgaaaccggcttgttgtcttcaattaaaaaatttattaaaggaagcacacctaaggaagagagagaaaatccttcaaaacggagtagaattgaacgtgatatagataacaatttgatcacgtcaacaccaagagcaggagaaaaacctaacaaacagatatctcgagtaagacggaaaagtcaagtaaatggagaagctggtagttatgaaatgacaaatcaacatgtaaaacaaaatggaaaattagaagataatccttcctctggcagtcctccaaggactactttgttggggaccatattttcacctgtcttcaactttttttcaccagcaaataaaaatggaacgtcaggatcagattctccaggacaggctgtggaagctgaagaaatagtaaaacaacttgatatggaacaggtggatgagatcactaccagtactactacatcaactaatggagcagcttactcaaatcaagcagttcaagtgagaccatcactaaacaatggtttagaagaagcagaagaaacagttaatcgtgatatcccaccccttacagcaccagtaactccagatagtggttattcatcagcccacgcggaggccacctatgaagaagactgggaagtatttgacccctattatttcatcaaacatgtcccgccactgacagaagaacaactaaataggaaacctgctcttccgttgaaaacaagaagcacaccggaattctccctagttttagacttggatgaaacactagtgcattgtagtctaaatgagctagaagatgcagcacttacttttccagtccttttccaagatgtcatttatcaggtttatgtgagattaagaccatttttcagggaattcctggaacgaatgtctcagatgtatgagatcattctttttactgcttctaagaaggtgtatgcagacaagttactgaacatactagaccctaaaaagcaactggtcaggcaccggcttttccgtgaacattgtgtttgtgtacaaggaaactatataaaggacttaaatattcttggaagagatctttcaaaaactataataattgacaactcaccacaagcctttgcatatcagctttctaatggaatccctatagaaagttggtttatggataaaaatgacaatgaactcctaaaattgattccattcctggagaagcttgtagaactgaatgaagatgttcgaccacacatcagagacagatttcgcttgcatgatttgctgcccccagattaagtacaaagacttgtcaaatcactgaagggggagagaatgcaggacccttttggactaagacaaaaacattgccattactgttgaaattttgcatttttgtaccccgtcttgcttttcttatctttggtgcccaataataattaagggttacagaaagagactttatctatctcagatcgaatacatatagtaggtaggctaaaacagaagagtctttagaactagtgcaactccagtgaaattttttatgtacaggacatctgcagtttataaagaattctgtttctgccaccagcagtttgacctgtagtcacacaggattttatgataataacagagatgaaaatggacttttattttctctctgtttggtgctctaagtgggtttgtagccacttttctgttactttatgattctcatttcaacaggaatggccagtaaaagttgttttatttttcctgttaaggtttataacctttttacatttttgacctgtattagattagaatttcattatgcattccttttagttgaggcgcttcatagttttctggagatagtcaatttttagttttttattatacatttgaatggccgttttcctgctttgtctgcctgcacattgtatatttgtttaaaaatattctctacttttagtctatgtaagtttcatttagaaagacatgcatttatattttgtttctgtaatattctactgtaggtgaaatcttttcaaaaatcaagagactgggtagataagaatatatgaatgactaatatacaaaagatttaaaccattgtgatggcgtatattctcaaatggtaatatcttgcaatggcacacagatttaatggataaaggtatacctcagacttcactgtgctcacaaatctttgaggagaaagtttggtcacctgtttggcttgatttagttactgctgcctttggttttctccaggaatgaagtattcagcacagtgactcagtatttttagttattttgcatgggctggtagtacctctgttatgctctcagttacaatcaatttaaaactgtataacagtcttggtacctaacagtagctatgcataatcctgtggcacagtacactcccaagccaccaatgcagttaatatgctctcatagtggtttttctatgctatatgaaaatagtcttcaagccttggttctctaatgcagctaccacaagaggttgatatttttatagtggcgtgtaatctccttttcgggaggctttttatggaaggtagaatttgtaaaagttcgtatgctttgcctctcaactgcattaacatgccacaggctcagactgtttttgtgtaaaggatgtcaaagaacggcactttttctaaagagaagtttgatattttgtatgcttgttaagaaagtacagtattggaaattaaaggtggacaactgataattgaggagtatgtcaattaattttttatgtatattacctgtttacttgtacaacttactgtacaaattacatgcagcttcattttcaaatgaatccttaaaataaggaaatctttttaggaaaacatttaatttttgtatttttgattttaaaggcatgagttatgtcaattttcagtgtattaatgaagattttaacttttcatcaggttgagtgttttcttactatattatctgttgtgtatgtagttagcatattgtgtcactgaactgtttaaaaatctagcatgtagagcaagcctgttttgtggaaaatccttattcattaaaaaaataatcatggcagattttctgcaaaaaaaaaacaaaagcatttgcaattcagaatactgatttttttaattttatttaaagaaaggtattttgcttgcaggaaaaaaatactacagattcattttaatgagaatctttgaaatgtatttatctttagggcatctgggcatctttatgctgtttgtcttctgtctttcttgaaataaaatgtacatacgttacctttacatatgctcttgctcaaaattgtgaacctagttacatttctccctgctcccttcctttttatgctcaaacagcgaaacccaaaacttaaaagatctgaactttcagcatgcattctgattgctgaaagatttcctgatttagtgcattctcaaaagggctttcccataatctaaagggaaatgtaagcacctatactcttgtgcctgtgggcacttcaataataaaaaccaactttttaaactaatcatcttttatcaatgataaagttgttttcagtcccacactaggagagttcctttaagtcagctgatcaagcataagatacttccgtaaagaaataaactaagaaaattttttatggcttgagaaaattccttgaggccaaattaatatatttttctttgttattttatttgagtcattttaaatttgttaatacaaaatttaagataatttacagagacaatttatccagcttccttctaccttaatacaatgttttgtcttcccattatcctctcttttctttatctgttggtagatgtaaaaaacttccatttagttaatcggaggtgtgtattttttaaattgaaatgtgcccagccccttcagctcacacaggaaacatgaactcttaaaaaactgactagtaaatgcaggagaggtggatacctgatgagacacagcgaaagtgacctgtatacacattacaactctggagtacatattaaagtcgtgctatttccagtggtaaatgtctgacttttaagacattcttttaaatatttgtatcattgttaggatgttttaatcagttgttttttaattccatgtaatatatgtagccctcatcagatttatatcaccatatttctccttgtgtcctaagagaattgatgacaattcgtaaccataaattgttttatattagctagtatgtatatttatttttacccaatggctttatctgtttcccaaaatttgtttgggatttgttgaaagcattgtgtaacttctataaacggctattttcttgtaactgtcagtgaaatgaatgtgtacattgttttcttgtatttctctgggttgttttttgtttttttttccaagggttaacatagaatgtttttttttacaaaaaaaaaaaaaaaaaaaaacaaaaaacaacgtgtgtgtgggggccggcactcgcggcccctctcgaaaaagagctttcttataaaccacattcgtgtttgtggggcggcggggggcccccgtggtagtgtttacggtgtgaacacgtgtggctcatatgaggtgtgtttccccttagagagaacctcgcggggccctagagaccatatagggcgtgcgggcgaggtttcctctccaccacatatattaaaataaagcgcgcgccgggggggggaaacaacccagagagggtgtttttttttgaagaaaaattctcccacaaatatgagagagtttctgaggaggtgtcctacttaaacgggggagtctctcttctacacacaaagcggagagtgtcccacaaagagagagagtctgcgagttttctccaaatattaaccgcccccgcttgtggggtgga

SEQ ID NO: 330801 - DNA, 5146 bp, Homo sapiens
aggaaaaaccgtccttcgggtccccgcctctccactcctaacgctttactccctactccccctgcgaccactacacagccggctacggaggcccctaatgtacaaatatcccccaggcccttgctcatcctgataggttttgtcctttcttaatcgacccagtactaaggccttgtgttcagtttttctccaggattcagactagagagtttcttccggcgtaaggaacttcaacgctcttcacggaagtaaaactcgcggaattgtggcgggagggggaggaggaagtcagggcgcctgcgcggagaggccgctttccatccgggtccctgtccgtgcggtgcagcaggtcggtaggcgggaaatggcgactggctgaaggagctggttctgttgctgctgcgggttttacatgtggcacccataaaagatgaggctgagaacacggaaagcttctcagcagtcaaatcaaatccaaacacaacgcactgccagagcaaagaggaaatattcagaggttgatgatagcctgccttcaggaggagaaaaaccatcgaagaatgaaaccggcttgttgtcttcaattaaaaaatttattaaaggaagcacacctaaggaagagagagaaaatccttcaaaacggagtagaattgaacgtgatatagataacaatttgatcacgtcaacaccaagagcaggagaaaaacctaacaaacagatatctcgagtaagacggaaaagtcaagtaaatggagaagctggtagttatgaaatgacaaatcaacatgtaaaacaaaatggaaaattagaagataatccttcctctggcagtcctccaaggactactttgttggggaccatattttcacctgtcttcaactttttttcaccagcaaataaaaatggaacgtcaggatcagattctccaggacaggctgtggaagctgaagaaatagtaaaacaacttgatatggaacaggtggatgagatcactaccagtactactacatcaactaatggagcagcttactcaaatcaagcagttcaagtgagaccatcactaaacaatggtttagaagaagcagaagaaacagttaatcgtgatatcccaccccttacagcaccagtaactccagatagtggttattcatcagcccacgcggaggccacctatgaagaagactgggaagtatttgacccctattatttcatcaaacatgtcccgccactgacagaagaacaactaaataggaaacctgctcttccgttgaaaacaagaagcacaccggaattctccctagttttagacttggatgaaacactagtgcattgtagtctaaatgagctagaagatgcagcacttacttttccagtccttttccaagatgtcatttatcaggtttatgtgagattaagaccatttttcagggaattcctggaacgaatgtctcagatgtatgagatcattctttttactgcttctaagaaggtgtatgcagacaagttactgaacatactagaccctaaaaagcaactggtcaggcaccggcttttccgtgaacattgtgtttgtgtacaaggaaactatataaaggacttaaatattcttggaagagatctttcaaaaactataataattgacaactcaccacaagcctttgcatatcagctttctaatggaatccctatagaaagttggtttatggataaaaatgacaatgaactcctaaaattgattccattcctggagaagcttgtagaactgaatgaagatgttcgaccacacatcagagacagatttcgcttgcatgatttgctgcccccagattaagtacaaagacttgtcaaatcactgaagggggagagaatgcaggacccttttggactaagacaaaaacattgccattactgttgaaattttgcatttttgtaccccgtcttgcttttcttatctttggtgcccaataataattaagggttacagaaagagactttatctatctcagatcgaatacatatagtaggtaggctaaaacagaagagtctttagaactagtgcaactccagtgaaattttttatgtacaggacatctgcagtttataaagaattctgtttctgccaccagcagtttgacctgtagtcacacaggattttatgataataacagagatgaaaatggacttttattttctctctgtttggtgctctaagtgggtttgtagccacttttctgttactttatgattctcatttcaacaggaatggccagtaaaagttgttttatttttcctgttaaggtttataacctttttacatttttgacctgtattagattagaatttcattatgcattccttttagttgaggcgcttcatagttttctggagatagtcaatttttagttttttattatacatttgaatggccgttttcctgctttgtctgcctgcacattgtatatttgtttaaaaatattctctacttttagtctatgtaagtttcatttagaaagacatgcatttatattttgtttctgtaatattctactgtaggtgaaatcttttcaaaaatcaagagactgggtagataagaatatatgaatgactaatatacaaaagatttaaaccattgtgatggcgtatattctcaaatggtaatatcttgcaatggcacacagatttaatggataaaggtatacctcagacttcactgtgctcacaaatctttgaggagaaagtttggtcacctgtttggcttgatttagttactgctgcctttggttttctccaggaatgaagtattcagcacagtgactcagtatttttagttattttgcatgggctggtagtacctctgttatgctctcagttacaatcaatttaaaactgtataacagtcttggtacctaacagtagctatgcataatcctgtggcacagtacactcccaagccaccaatgcagttaatatgctctcatagtggtttttctatgctatatgaaaatagtcttcaagccttggttctctaatgcagctaccacaagaggttgatatttttatagtggcgtgtaatctccttttcgggaggctttttatggaaggtagaatttgtaaaagttcgtatgctttgcctctcaactgcattaacatgccacaggctcagactgtttttgtgtaaaggatgtcaaagaacggcactttttctaaagagaagtttgatattttgtatgcttgttaagaaagtacagtattggaaattaaaggtggacaactgataattgaggagtatgtcaattaattttttatgtatattacctgtttacttgtacaacttactgtacaaattacatgcagcttcattttcaaatgaatccttaaaataaggaaatctttttaggaaaacatttaatttttgtatttttgattttaaaggcatgagttatgtcaattttcagtgtattaatgaagattttaacttttcatcaggttgagtgttttcttactatattatctgttgtgtatgtagttagcatattgtgtcactgaactgtttaaaaatctagcatgtagagcaagcctgttttgtggaaaatccttattcattaaaaaaataatcatggcagattttctgcaaaaaaaaaacaaaagcatttgcaattcagaatactgatttttttaattttatttaaagaaaggtattttgcttgcaggaaaaaaatactacagattcattttaatgagaatctttgaaatgtatttatctttagggcatctgggcatctttatgctgtttgtcttctgtctttcttgaaataaaatgtacatacgttacctttacatatgctcttgctcaaaattgtgaacctagttacatttctccctgctcccttcctttttatgctcaaacagcgaaacccaaaacttaaaagatctgaactttcagcatgcattctgattgctgaaagatttcctgatttagtgcattctcaaaagggctttcccataatctaaagggaaatgtaagcacctatactcttgtgcctgtgggcacttcaataataaaaaccaactttttaaactaatcatcttttatcaatgataaagttgttttcagtcccacactaggagagttcctttaagtcagctgatcaagcataagatacttccgtaaagaaataaactaagaaaattttttatggcttgagaaaattccttgaggccaaattaatatatttttctttgttattttatttgagtcattttaaatttgttaatacaaaatttaagataatttacagagacaatttatccagcttccttctaccttaatacaatgttttgtcttcccattatcctctcttttctttatctgttggtagatgtaaaaaacttccatttagttaatcggaggtgtgtattttttaaattgaaatgtgcccagccccttcagctcacacaggaaacatgaactcttaaaaaactgactagtaaatgcaggagaggtggatacctgatgagacacagcgaaagtgacctgtatacacattacaactctggagtacatattaaagtcgtgctatttccagtggtaaatgtctgacttttaagacattcttttaaatatttgtatcattgttaggatgttttaatcagttgttttttaattccatgtaatatatgtagccctcatcagatttatatcaccatatttctccttgtgtcctaagagaattgatgacaattcgtaaccataaattgttttatattagctagtatgtatatttatttttacccaatggctttatctgtttcccaaaatttgtttgggatttgttgaaagcattgtgtaacttctataaacggctattttcttgtaactgtcagtgaaatgaatgtgtacattgttttcttgtatttctctgggttgttttttgtttttttttccaagggttaacatagaatgttttttttaaaaaattatctttggccaatgactttttcatctagatcttactttcattcaaccttctaaagaagttcgtttctcattgttttgttctgtcaacttgcctgaaaaacagagacttcatctcatcaatgaagaaagcatttcattattcctacagatctttcctgcgagcacaga

SEQ ID NO: 330802 - DNA, 515 bp, Homo sapiens
gtgtgtataggttctaagcacctaaacagatattcgctccacgctgcgggtgggctctctccacagagagagatcaccaccattcatggatcaccacctgtggatcaccaccattcatggatcaccacctgtggatcaccaccattcatggatcaccaccatgttcaatggatgtcaccagccatgttgatagtgactcaccacgatgtggatatctaccagcacagtataacatatgtgatgtcagcagcgtgatgctaacttagacagcaggtggcaatggcatattatgcccttgctgctggacgtcatgaatgcacgtgtccatcggcagttctacacataagctggtgtgacgatctcagccctagccatgtcctctcaactcctctctgccttgctggccttccaccaccagtgctgcgtacacagttctctacgtcccatgctggctcgcatgctccacaatcgatggagctcaggaccccgcgtgcacggatggcccgagctccatc

SEQ ID NO: 330803 - DNA, 273 bp, Homo sapiens
cttctacacaaattcataataacatattttatttgcatttggatagtttcatgtaataattaaacaagataaaaatattagagattgttgtacctttaactcatcatatcagctgaccatatttgagagtttactagctatttttcccaaaaggtacttcaacataaaattgaatacataacattggataactattgataacaagggcaacaaaatggaagcatccacgaggatggatggattagcccttggaaaacattttttttgccctag

SEQ ID NO: 330804 - DNA, 262 bp, Homo sapiens
aggtgtgagctactgtgcctggcttgaactgattaagttcgggtagttgagatttggagagaataaggaagtggccaggggtggtggctggcaggtggacaagcccaggtgtgatttccaggacttgatgctgacacctgtggaggaaggctcaccatgagacgaatgctgcgaggatgctggatgcacttcttccctttttatctctccagcggccccgtgaggaggtagccattgctatccctgttttagatgatgaaat

SEQ ID NO: 330805 - DNA, 750 bp, Homo sapiens
gtcagggcttatatgaggaaatctccaagaaacattcctggacattgcaatgcatcattgtacaaatttgatgaaagattttttttggagaaccaagttcaggaggcaggggaagaagaactattagaaaggaacactaataaattttttcttagctcttttaagaaagtttaatagtttgaagttgaaaatagtttaatagcctaaaaatagtttgagataggtgagatagttgaaaataggtgaaaggttgctaagaaaataacagataataagaattacaaataccttattaaaaatataaaaatatacccaggctcacaaataattaaaggaaaggaataaaaacaatagtaatatatcatttttcatctgtcagacaagtaaaatcaagaaagattagtaataccctttattgtcaaggtgagggtaaataaagtctcaagtgtccagggagaaacacacagggtgttcttcacagttttgtttgaaaaaaacaaacaaaataggccaggcgctgtggctcacgcctgtaatcttcctttctaatagatgtcattcgccaagggatcacatctatggtgtcgttaaagttccctctccttggggtttagatgatgtcctcaggccctgcttttgttctgggttcatgtcagtttttcattttgtgcattattttcatctggatttctagatacccttacaactctaaaaacgctgttgttttgggccctaaagtgctataattaa

SEQ ID NO: 330806 - DNA, 493 bp, Homo sapiens
cctgtctcaaaataaataaataaataaaaatctccttgcttatcaagtttctattctgtttatttctgtctattctctttttgtctcttttttggggtctgtgtattattacaaggagaaagctcattttacttaaagatgactctttgaattcaaaagtataaagacaagaaaaagtaaaaggcaaattatataaaaaatcaattttgaaatgtttctttgaatataattcctaaaaggaaaaaaaattaataagcaaaagtaacctactttttcacagctcaaattttaagactgagacctgttaaaaggatacagttcaaagaattatatttgatgaaaagggtagagatgttcagtcatacaccattaactaaaactattcaccagtaagaatattttcaaacatcactcacaaaatatctatgtggcatataacaaaatgagcaaacaatcctaatggtaagatttgtatagattttcctcacttcac

SEQ ID NO: 330807 - DNA, 683 bp, Homo sapiens
gtgtagaacccttttctcaggcaaaacctaacatctgaccgcaccctttttgctattaaaaaaaaaaaaaagcttctatttttttcctcctgtcgttaagataaattctccagtagacaacctctcccactaattgtgtattagcaacgtattttatcttgagagcttgtacactgggctctcaacgtggtgtggaaggtagcctgttacagtgctggattcataaaagggcctttatggtttgtgaaagaatatctgtgtgcttagggaggaaactttttgatctgcagaaaagccagaagacatctaggacatccataaaaattcatcagagagcattttactactgagctgcaaagggaaaaacttaaaatggatatgaaaagtgaagaaagtgatcataggagaaaaccatttcaggtgtctgatgatttgtgagcctcaagtgactactctgtggaatcatctgtccttgcctttgaattagctttccctaggccatgagtcaacattagtagtttatacatccaaattgatgacaagagcacctcaaaggcagcagcctcaaggagcagccatggccccagacttgtcgcacggatgcagaaaacttaatggaggaggctgaggtcagaatgggaagagtttttaaaaaataaaaaggggagctaatatgtgaggaa

SEQ ID NO: 330808 - DNA, 452 bp, Homo sapiens
ctttttattaacaagttgatgagatgagcattagtatacctataggaagtttttgaatgagtgccaattctgaatttacaaatcaacatttcttctctccagctttctttagcttgcccatggtgatgtgaagatgagaagaaatagcaaggcccaaccagttcttcatctggagacagttcaacgttctgcaaaccaggtaaaaataatacagacgattttaggaatgcatagtcactttataaaataaactattttctttctcaagtttgatctacagatttttgcagaagctatatttatcatctaatgtataacttgttaataaacatgacattgtatcaatttcgattatctgtgaagagcagagtgactaaagcatgcatttgtgcattgactcattaataaagttatagttgtagtataacttacttttataaaaatattttaaa

SEQ ID NO: 330809 - DNA, 419 bp, Homo sapiens
caactgttgctttttcatgatttcaggaatttcgcttgggggggggaatttaaattatccaaataaattgcaagcattctatccaaatggagctctttctgagatgaagagaattctcaatgtcaagatttgaacaagaagagaatggaatacacaatatggacatccataaaaattcatcagagagcattttactactgagctgcaaagggaaaaacttaaaatggatatgaaaagtgaagaaagtgatcataggagaaaaccatttcagatgacaagagcacctcaaaggcagcagcctcaaggagcagccatggccccagacttgtcgcacggatgcagaaaacttaatggaggaggctgaggtcagaatgggaagagtttttaaaaaataaaaaggggagctaatatgtgaggaa

SEQ ID NO: 330810 - DNA, 376 bp, Homo sapiens
tctcatgttgttgcttttatcattatgaattccttgcttgttgccacctaagatacgatggagcaagcacagtcttaaagaagatttgctgattttttgtttttctcagcagaccagagacatccataaaaattcatcagagagcattttactactgagctgcaaagggaaaaacttaaaatggatatgaaaagtgaagaaagtgatcataggagaaaaccatttcagatgacaagagcacctcaaaggcagcagcctcaaggagcagccatggccccagacttgtcgcacggatgcagaaaacttaatggaggaggctgaggtcagaatgggaagagtttttaaaaaataaaaaggggagctaatatgtgaggaa

SEQ ID NO: 330811 - DNA, 1149 bp, Homo sapiens
gtgtagaacccttttctcaggcaaaacctaacatctgaccgcaccctttttgctattaaaaaaaaaaaaaagcttctatttttttcctcctgtcgttaagataaattctccagtagacaacctctcccactaattgtgtattagcaacgtattttatcttgagagcttgtacactgggctctcaacgtggtgtggaaggtagcctgttacagtgctggattcataaaagggcctttatggtttgtgaaagaatatctgtgtgcttagggaggaaactttttgatctgcagaaaagccagaagacatctaggacatccataaaaattcatcagagagcattttactactgagctgcaaaggtaggaaaaataaattttttttggttagaaaatatacttctttcatctgcgtttcaataatttattccccttgttagatatacatggaattgatattgcttattctgactaagtgaaaagtgttatttctacttactgctcaattagaaacatgtagtgtttaattgtcagtttgaatttttctttcatactattacagtttatattttactataggcagaatttcctctttatcctaaattttgatattctccataatttcatcgtgccttgacattgctgtatataatttctatacatcaggaaggcaattctgtgtgcatgtgtgtgtgtatatatatagttagaagttagaaactgaaactcttttttgtctaccatcatttcatatttttcttgctatttcaaacctataatttttaaagaaacgactaacgtaatcattcatagaatatgctgtcagtaacttaacaatataaatgttaacatggaggcatttagttcagcatttgctttacttaatagagtgcagaaaatgtggcccttttctcagttagggtgtatgtgaagataaatttagaatttctagactagtaaatacttctctgataataacttaattatagctatttcaaaccaaattgtttaattgtggtgaatcatatgtaaattgttcagatgtaggtcaacacccacgcccacattctagcacctctttcctaattcaagacaactttgcagtgcctaaaagagctgaacagtgcagattagagacataagacaaaaaaaa

SEQ ID NO: 330812 - DNA, 1407 bp, Homo sapiens
tgagaacgctgtctgggcttggtaccaagagctggtatttcacagcagcgaccgcctcacagacgagctgtgggaagcaggagggagactctctcttagggtgccactactatggagacacagctgggctgaacaagatttgcttcaaacgacaacaagagagacagaaagtatctggttcaaccgctgcccgagcaggcaggcaccagaagagctagcagccaatccggccatgctcgaagccagctctgcagctcagccaatcagtgacatcattgctttctttagcttgcccatggtgatgtgaagatgagaagaaatagcaaggcccaaccagttcttcatctggagacagttcaacgttctgcaaaccagatgaaatagcaaggcccaaccagttcttcatctggagacagttcaacgttctgcaaaccagatcttcaggaattttactgggataattatccaaataaattgcaagcattctatccaaatggagctctttctgagatgaagagaattctcaatgtcaagatttgaacaagaagagaatggaatacacaatatggacatccataaaaattcatcagagagcattttactactgagctgcaaaggtaggaaaaataaattttttttggttagaaaatatacttctttcatctgcgtttcaataatttattccccttgttagatatacatggaattgatattgcttattctgactaagtgaaaagtgttatttctacttactgctcaattagaaacatgtagtgtttaattgtcagtttgaatttttctttcatactattacagtttatattttactataggcagaatttcctctttatcctaaattttgatattctccataatttcatcgtgccttgacattgctgtatataatttctatacatcaggaaggcaattctgtgtgcatgtgtgtgtgtatatatatagttagaagttagaaactgaaactcttttttgtctaccatcatttcatatttttcttgctatttcaaacctataatttttaaagaaacgactaacgtaatcattcatagaatatgctgtcagtaacttaacaatataaatgttaacatggaggcatttagttcagcatttgctttacttaatagagtgcagaaaatgtggcccttttctcagttagggtgtatgtgaagataaatttagaatttctagactagtaaatacttctctgataataacttaattatagctatttcaaaccaaattgtttaattgtggtgaatcatatgtaaattgttcagatgtaggtcaacacccacgcccacattctagcacctctttcctaattcaagacaactttgcagtgcctaaaagagctgaacagtgcagattagagacataagacaaaaaaaa

SEQ ID NO: 330813 - DNA, 1231 bp, Homo sapiens
ctttttattaacaagttgatgagatgagcattagtatacctataggaagtttttgaatgagtgccaattctgaatttacaaatcaacatttcttctctccagctttctttagcttgcccatggtgatgtgaagatgagaagaaatagcaaggcccaaccagttcttcatctggagacagttcaacgttctgcaaaccagatgaaatagcaaggcccaaccagttcttcatctggagacagttcaacgttctgcaaaccagatcttcaggaattttactgggataattatccaaataaattgcaagcattctatccaaatggagctctttctgagatgaagagaattctcaatgtcaagatttgaacaagaagagaatggaatacacaatatggacatccataaaaattcatcagagagcattttactactgagctgcaaaggtaggaaaaataaattttttttggttagaaaatatacttctttcatctgcgtttcaataatttattccccttgttagatatacatggaattgatattgcttattctgactaagtgaaaagtgttatttctacttactgctcaattagaaacatgtagtgtttaattgtcagtttgaatttttctttcatactattacagtttatattttactataggcagaatttcctctttatcctaaattttgatattctccataatttcatcgtgccttgacattgctgtatataatttctatacatcaggaaggcaattctgtgtgcatgtgtgtgtgtatatatatagttagaagttagaaactgaaactcttttttgtctaccatcatttcatatttttcttgctatttcaaacctataatttttaaagaaacgactaacgtaatcattcatagaatatgctgtcagtaacttaacaatataaatgttaacatggaggcatttagttcagcatttgctttacttaatagagtgcagaaaatgtggcccttttctcagttagggtgtatgtgaagataaatttagaatttctagactagtaaatacttctctgataataacttaattatagctatttcaaaccaaattgtttaattgtggtgaatcatatgtaaattgttcagatgtaggtcaacacccacgcccacattctagcacctctttcctaattcaagacaactttgcagtgcctaaaagagctgaacagtgcagattagagacataagacaaaaaaaa

SEQ ID NO: 330814 - DNA, 941 bp, Homo sapiens
tgagaacgctgtctgggcttggtaccaagagctggtatttcacagcagcgaccgcctcacagacgagctgtgggaagcaggagggagactctctcttagggtgccactactatggagacacagctgggctgaacaagatttgcttcaaacgacaacaagagagacagaaagtatctggttcaaccgctgcccgagcaggcaggcaccagaagagctagcagccaatccggccatgctcgaagccagctctgcagctcagccaatcagtgacatcattgctttctttagcttgcccatggtgatgtgaagatgagaagaaatagcaaggcccaaccagttcttcatctggagacagttcaacgttctgcaaaccagatgaaatagcaaggcccaaccagttcttcatctggagacagttcaacgttctgcaaaccagatcttcaggaattttactgggataattatccaaataaattgcaagcattctatccaaatggagctctttctgagatgaagagaattctcaatgtcaagatttgaacaagaagagaatggaatacacaatatggacatccataaaaattcatcagagagcattttactactgagctgcaaagggaaaaacttaaaatggatatgaaaagtgaagaaagtgatcataggagaaaaccatttcaggtgtctgatgatttgtgagcctcaagtgactactctgtggaatcatctgtccttgcctttgaattagctttccctaggccatgagtcaacattagtagtttatacatccaaattgatgacaagagcacctcaaaggcagcagcctcaaggagcagccatggccccagacttgtcgcacggatgcagaaaacttaatggaggaggctgaggtcagaatgggaagagtttttaaaaaataaaaaggggagctaatatgtgaggaa

SEQ ID NO: 330815 - DNA, 557 bp, Homo sapiens
caggggcagaaaatagcacacttttactctacgcaactgttgctttttcatgatcttcaggaattttactgggataattatccaaataaattgcaagcattctatccaaatggagctctttctgagatgaagagaattctcaatgtcaagatttgaacaagaagagaatggaatacacaatatggacatccataaaaattcatcagagagcattttactactgagctgcaaagggaaaaacttaaaatggatatgaaaagtgaagaaagtgatcataggagaaaaccatttcaggtgtctgatgatttgtgagcctcaagtgactactctgtggaatcatctgtccttgcctttgaattagctttccctaggccatgagtcaacattagtagtttatacatccaaattgatgacaagagcacctcaaaggcagcagcctcaaggagcagccatggccccagacttgtcgcacggatgcagaaaacttaatggaggaggctgaggtcagaatgggaagagtttttaaaaaataaaaaggggagctaatatgtgaggaa

SEQ ID NO: 330816 - DNA, 568 bp, Homo sapiens
gtgtagaacccttttctcaggcaaaacctaacatctgaccgcaccctttttgctattaaaaaaaaaaaaaagcttctatttttttcctcctgtcgttaagataaattctccagtagacaacctctcccactaattgtgtattagcaacgtattttatcttgagagcttgtacactgggctctcaacgtggtgtggaaggtagcctgttacagtgctggattcataaaagggcctttatggtttgtgaaagaatatctgtgtgcttagggaggaaactttttgatctgcagaaaagccagaagacatctaggacatccataaaaattcatcagagagcattttactactgagctgcaaagggaaaaacttaaaatggatatgaaaagtgaagaaagtgatcataggagaaaaccatttcagatgacaagagcacctcaaaggcagcagcctcaaggagcagccatggccccagacttgtcgcacggatgcagaaaacttaatggaggaggctgaggtcagaatgggaagagtttttaaaaaataaaaaggggagctaatatgtgaggaa

SEQ ID NO: 330817 - DNA, 826 bp, Homo sapiens
tgagaacgctgtctgggcttggtaccaagagctggtatttcacagcagcgaccgcctcacagacgagctgtgggaagcaggagggagactctctcttagggtgccactactatggagacacagctgggctgaacaagatttgcttcaaacgacaacaagagagacagaaagtatctggttcaaccgctgcccgagcaggcaggcaccagaagagctagcagccaatccggccatgctcgaagccagctctgcagctcagccaatcagtgacatcattgctttctttagcttgcccatggtgatgtgaagatgagaagaaatagcaaggcccaaccagttcttcatctggagacagttcaacgttctgcaaaccagatgaaatagcaaggcccaaccagttcttcatctggagacagttcaacgttctgcaaaccagatcttcaggaattttactgggataattatccaaataaattgcaagcattctatccaaatggagctctttctgagatgaagagaattctcaatgtcaagatttgaacaagaagagaatggaatacacaatatggacatccataaaaattcatcagagagcattttactactgagctgcaaagggaaaaacttaaaatggatatgaaaagtgaagaaagtgatcataggagaaaaccatttcagatgacaagagcacctcaaaggcagcagcctcaaggagcagccatggccccagacttgtcgcacggatgcagaaaacttaatggaggaggctgaggtcagaatgggaagagtttttaaaaaataaaaaggggagctaatatgtgaggaa

SEQ ID NO: 330818 - DNA, 976 bp, Homo sapiens
gtttagcagttccacgtctccaagggacattttcaaatgtatgtaaagaaatggttacagatttttaagaagcatcttccatgtccacatcctgttgtaatctctgtgccattttctcttccagctgcttccctttgcctacaagaggggctcggaaagatggatgtttttcttgacttctttgatatcctgaacttctctacgtagccctttatgtttcttcagtctgttcattataaatttagcttggcatttctgtttgatctcttcaactctcttcattggcatcaatagttttattccatagctctcactggatatttgataagtgcatttctatgtttttccaattcaaatgaattatccactgtaagccctttaccagctgttttccagaatgctttggtccacctacctttgtgaggattgtgcttctttttaaagtttttatgacatttagatttacaaaatctgaacaccttgcaatcattgcggacagacatcatgccatggccagggtagatgggccccgaacagaaataacactcttgagacacatgttgaacccacgtgggtccccaccgaccaaacgccaggcttgagaggaagtcaggtgtatgtttaacctaaactgccacactcttttctaaggtggtgtatcattttatgttaccatcagcagtatacaagagtgccagttcctttacatcctaataacacttggtatggttaatatttttaattttagccattcttacaggtatataacatcttgtgattttaatttctatttccctaatgacatgttgcacatcttttcatgtgcttatttgttattgttggtgacaaatgtatcttctttggtgaagtagatgttcaaatttatgttcatttgtattgggtttggagttattgtcaagttttgagagttatttatgtattctgcagacaagtcctttatcgataaatgctttgc

SEQ ID NO: 330819 - DNA, 186 bp, Homo sapiens
atggagcatgggcttgctggcagcgccaacttctcctcatcctcaccgccatctatttcaggtatcctgagcatgattatcattcggaccctccggaaggacattgccaactacaacaaggaggatgacattgtacgaggtcttggctggggagggatgaagttggatggggaggggaggaggacc

SEQ ID NO: 330820 - DNA, 3786 bp, Homo sapiens
  misc_feature (25)..(25): n is a, c, g, or t
  misc_feature (28)..(28): n is a, c, g, or t
gcaggagcggttgaagccagacgancancttgtggagttaaactccgtaaccaggagcaccacttccgctgacgtcattacggcgacacgtggatccaagatggcgacggcgatggattggttgccgtggtctttactgcttttctccctgatgtgtgaaacaagcgccttctatgtgcctggggtcgcgcctatcaacttccaccagaacgatcccgtagaaatcaaggctgtgaagctcaccagctctcgaacccagctaccttatgaatactattcactgcccttctgccagcccagcaagataacctacaaggcagagaatctgggagaggtgctgagaggggaccggattgtcaacacccctttccaggttctcatgaacagcgagaagaagtgtgaagttctgtgcagccagtccaacaagccagtgaccctgacagtggagcagagccgactcgtggccgagcggatcacagaagactactacgtccacctcattgctgacaacctgcctgtggccacccggctggagctctactccaaccgagacagcgatgacaagaagaaggaaaaagatgtgcagtttgaacacggctaccggctcggcttcacagatgtcaacaagatctacctgcacaaccacctctcattcatcctttactatcatcgggaggacatggaagaggaccaggagcacacgtaccgtgtcgtccgcttcgaggtgattccccagagcatcaggctggaggacctcaaagcagatgagaagagttcgtgcactctgcctgagggtaccaactcctcgccccaagaaattgaccccaccaaggagaatcagctgtacttcacctactctgtccactgggaggaaagtgatatcaaatgggcctctcgctgggacacttacctgaccatgagtgacgtccagatccactggttttctatcattaactccgttgttgtggtcttcttcctgtcaggtatcctgagcatgattatcattcggaccctccggaaggacattgccaactacaacaaggaggatgacattgaagacaccatggaggagtctgggtggaagttggtgcacggcgacgtcttcaggcccccccagtaccccatgatcctcagctccctgctgggctcaggcattcagctgttctgtatgatcctcatcgtcatctttgtagccatgcttgggatgctgtcgccctccagccggggagctctcatgaccacagcctgcttcctcttcatgttcatgggggtgtttggcggattttctgctggccgtctgtaccgcactttaaaaggccatcggtggaagaaaggagccttctgtacggcaactctgtaccctggtgtggtttttggcatctgcttcgtattgaattgcttcatttggggaaagcactcatcaggagcggtgccctttcccaccatggtggctctgctgtgcatgtggttcgggatctccctgcccctcgtctacttgggctactacttcggcttccgaaagcagccatatgacaaccctgtgcgcaccaaccagattccccggcagatccccgagcagcggtggtacatgaaccgatttgtgggcatcctcatggctgggatcttgcccttcggcgccatgttcatcgagctcttcttcatcttcagtgctatctgggagaatcagttctattacctctttggcttcctgttccttgttttcatcatcctggtggtatcctgttcacaaatcagcatcgtcatggtgtacttccagctgtgtgcagaggattaccgctggtggtggagaaatttcctagtctccgggggctctgcattctacgtcctggtttatgccatcttttatttcgttaacaagctggacatcgtggagttcatcccctctctcctctactttggctacacggccctcatggtcttgtccttctggctgctaacgggtaccatcggcttctatgcagcctacatgtttgttcgcaagatctatgctgctgtgaagatagactgattggagtggaccacggccaagcctgctccgtcctcggacaggaagccaccctgcgtgggggactgcaggcacgcaaaataaaataactcctgctcgtttggaatgtaactcctggcacagtgttcctggatcctggggctgcgtggggggcgggagggcctgtagataatcttgcgtttttcgtcatcttattccagttctgtgggggatgagtttttttgtgggttgctttttcttcagtgctaagaaagttccctccaacaggaactctctgacctgtttattcaggtgtatttctggtttggatttttttttccttctttgttttaacaaatggatccaggatggataaatccaccgagataagggttttggtcactgtctccacctcagttcctcagggctgttggccaccctatgactaactggaagaggacacgccagagcttcagtgaggtttccgagcctctccctgcccatcctcaccactgaggccacgacaaagcacagctccagctcggacagcaccctcagtgccagccagcctctgccagacctctctttccctcttctccccagcctcctccagggctgcccaaggcagggtttccagccaggcctcggggtcatcttttcaccaggagcaaacccaagtcttagttgctacaagaaaatcccctggaagtactgggggccaggttccccagacagcaggaattgcccctgttcagagcagccggagtttgctggaccacaaggaagaagagaagagacttgcagtgaactgtttttgtgccaagaaaccctggacctggggccaagtatttcccaagccaagcatccacttgtctgtgtctgggaagggatggccaaggccgctagggtccttacccctcaggatcactccccagccctttcctcaggaggtaccgctctccaaggtgtgctagcagtgggccctgcccaacttcaggcagaacagggaggcccagagattacagatcccctcctgtaagtggccaggcattctctccctgccctctctggcctctggggtcatactcacttctttagccagccccatcccctccaccccacacctgagttcttgcctcctccttttggggacacccaatccccaggaatggacaagaagccaacttagaaagaagggtctcacgtggctggcctggctcctccgtagacccctgttcttttcaacctctgcccacccgtgcatgtcatcacaaacatttgctcttaagttacaagagaccacatccacccagggattagggttcaagtagcagctgctaacccttgcaccagcccttgtgggactcccaacacaagacaaagctcaggatgctggtgatgctaggaagatgtccctcccctcactgccccacattctcccagtggctctaccagcctcacccatcaaaccagtgaatttctcaatcttgcctcacagtgactgcagcgccaagcggcatccaccaagcatcaagttggagaaaagggaacccaagcagtagagagcgatattggagtcttttgttcattcaaatcttggatttttttttttccctaagagattctctttttagggggaatgggaaacggacacctcataaagggttcaaagatcatcaatttttctgactttttaaatcattatcattattatttttaattaaaaaaatgcctgtatgcctttttttggtcggattgtaaataaatataccattgtccta

SEQ ID NO: 330821 - DNA, 2345 bp, Homo sapiens
acagtgtggctcaccccctgctctggggaagaggggccagagccacatgccaggcccacgggccctgatggtgtcatgatgatgtgtccactcctgcccttgtgacaggttggtgtgccaggggaaggggagcagggtggtcaagccagctgaagccccactgtgtgtccacaggctatctgggagaatcagttctattacctctttggcttcctgttccttgttttcatcatcctggtggtatcctgttcacaaatcagcatcgtcatggtgtacttccagctgtgtgcagaggattaccgctggtggtggagaaatttcctagtctccgggggctctgcattctacgtcctggtttatgccatcttttatttcgttaacaagctggacatcgtggagttcatcccctctctcctctactttggctacacggccctcatggtcttgtccttctggctgctaacgggtaccatcggcttctatgcagcctacatgtttgttcgcaagatctatgctgctgtgaagatagactgattggagtggaccacggccaagcctgctccgtcctcggacaggaagccaccctgcgtgggggactgcaggcacgcaaaataaaataactcctgctcgtttggaatgtaactcctggcacagtgttcctggatcctggggctgcgtggggggcgggagggcctgtagataatcttgcgtttttcgtcatcttattccagttctgtgggggatgagtttttttgtgggttgctttttcttcagtgctaagaaagttccctccaacaggaactctctgacctgtttattcaggtgtatttctggtttggatttttttttccttctttgttttaacaaatggatccaggatggataaatccaccgagataagggttttggtcactgtctccacctcagttcctcagggctgttggccaccctatgactaactggaagaggacacgccagagcttcagtgaggtttccgagcctctccctgcccatcctcaccactgaggccacgacaaagcacagctccagctcggacagcaccctcagtgccagccagcctctgccagacctctctttccctcttctccccagcctcctccagggctgcccaaggcagggtttccagccaggcctcggggtcatcttttcaccaggagcaaacccaagtcttagttgctacaagaaaatcccctggaagtactgggggccaggttccccagacagcaggaattgcccctgttcagagcagccggagtttgctggaccacaaggaagaagagaagagacttgcagtgaactgtttttgtgccaagaaaccctggacctggggccaagtatttcccaagccaagcatccacttgtctgtgtctgggaagggatggccaaggccgctagggtccttacccctcaggatcactccccagccctttcctcaggaggtaccgctctccaaggtgtgctagcagtgggccctgcccaacttcaggcagaacagggaggcccagagattacagatcccctcctgtaagtggccaggcattctctccctgccctctctggcctctggggtcatactcacttctttagccagccccatcccctccaccccacacctgagttcttgcctcctccttttggggacacccaaaacactgcttgtgagaaggaagatggaaggtaagttctgtcgttctttccccaatccccaggaatggacaagaagccaacttagaaagaagggtctcacgtggctggcctggctcctccgtagacccctgttcttttcaacctctgcccacccgtgcatgtcatcacaaacatttgctcttaagttacaagagaccacatccacccagggattagggttcaagtagcagctgctaacccttgcaccagcccttgtgggactcccaacacaagacaaagctcaggatgctggtgatgctaggaagatgtccctcccctcactgccccacattctcccagtggctctaccagcctcacccatcaaaccagtgaatttctcaatcttgcctcacagtgactgcagcgccaagcggcatccaccaagcatcaagttggagaaaagggaacccaagcagtagagagcgatattggagtcttttgttcattcaaatcttggatttttttttttccctaagagattctctttttagggggaatgggaaacggacacctcataaagggttcaaagatcatcaatttttctgactttttaaatcattatcattattatttttaattaaaaaaatgcctgtatgcctttttttggtcggattgtaaataaatataccattgtccta

SEQ ID NO: 330822 - DNA, 2523 bp, Homo sapiens
gctggctaagggtccctctttctggagggcctgcacaaatatccaagcatcaagcctcccgggtgatacatccgaacgtatgtgccttttttcccgccctgaactctttgtgggaatgaaattcccaccccaactgctgccattcaggtgaactcaattctggcttttgtgcttgaagtgactgctgggggaagaacgctttggttctgccaagtataaactttggaggatgaagggacaggagactatcaacgttcgacgaccctgagttctcactgctcctcgtgaagacttccttgtagacccgtgccaaactgtcttgtagaagcacatgtggttttaggtttggtatcatctgttgctgttctgactggtggctctgacacctggtgccttctcccacagacagagatgctacagaccctgatgcatccactcttaattttttggaacgaccgtctgtagactctcctcctctccatccttggcttcggatttcattgtgcaaggttttacactgacttatcgaagttcccgttgccatcttttatttcggtaccagctggacatcgtggagttcatcccctctctcctctactttggctacacggccctcatggtcttgtccttctggctgctaacgggtaccatcggcttctatgcagcctacatgtttgttcgcaagatctatgctgctgtgaagatagactgattggagtggaccacggccaagcctgctccgtcctcggacaggaagccaccctgcgtgggggactgcaggcacgcaaaataaaataactcctgctcgtttggaatgtaactcctggcacagtgttcctggatcctggggctgcgtggggggcgggagggcctgtagataatcttgcgtttttcgtcatcttattccagttctgtgggggatgagtttttttgtgggttgctttttcttcagtgctaagaaagttccctccaacaggaactctctgacctgtttattcaggtgtatttctggtttggatttttttttccttctttgttttaacaaatggatccaggatggataaatccaccgagataagggttttggtcactgtctccacctcagttcctcagggctgttggccaccctatgactaactggaagaggacacgccagagcttcagtgaggtttccgagcctctccctgcccatcctcaccactgaggccacgacaaagcacagctccagctcggacagcaccctcagtgccagccagcctctgccagacctctctttccctcttctccccagcctcctccagggctgcccaaggcagggtttccagccaggcctcggggtcatcttttcaccaggagcaaacccaagtcttagttgctacaagaaaatcccctggaagtactgggggccaggttccccagacagcaggaattgcccctgttcagagcagccggagtttgctggaccacaaggaagaagagaagagacttgcagtgaactgtttttgtgccaagaaaccctggacctggggccaagtatttcccaagccaagcatccacttgtctgtgtctgggaagggatggccaaggccgctagggtccttacccctcaggatcactccccagccctttcctcaggaggtaccgctctccaaggtgtgctagcagtgggccctgcccaacttcaggcagaacagggaggcccagagattacagatcccctcctgtaagtggccaggcattctctccctgccctctctggcctctggggtcatactcacttctttagccagccccatcccctccaccccacacctgagttcttgcctcctccttttggggacacccaaaacactgcttgtgagaaggaagatggaaggtaagttctgtcgttctttccccaatccccaggaatggacaagaagccaacttagaaagaagggtctcacgtggctggcctggctcctccgtagacccctgttcttttcaacctctgcccacccgtgcatgtcatcacaaacatttgctcttaagttacaagagaccacatccacccagggattagggttcaagtagcagctgctaacccttgcaccagcccttgtgggactcccaacacaagacaaagctcaggatgctggtgatgctaggaagatgtccctcccctcactgccccacattctcccagtggctctaccagcctcacccatcaaaccagtgaatttctcaatcttgcctcacagtgactgcagcgccaagcggcatccaccaagcatcaagttggagaaaagggaacccaagcagtagagagcgatattggagtcttttgttcattcaaatcttggatttttttttttccctaagagattctctttttagggggaatgggaaacggacacctcataaagggttcaaagatcatcaatttttctgactttttaaatcattatcattattatttttaattaaaaaaatgcctgtatgcctttttttggtcggattgtaaataaatataccattgtccta

SEQ ID NO: 330823 - DNA, 2024 bp, Homo sapiens
cctaggctaggtacgaggccgggtgttaatcggccgagggccatcttttatttcgttaacaagctggacatcgtggagttcatcccctctctcctctactttggctacacggccctcatggtcttgtccttctggctgctaacgggtaccatcggcttctatgcagcctacatgtttgttcgcaagatctatgctgctgtgaagatagactgattggagtggaccacggccaagcctgctccgtcctcggacaggaagccaccctgcgtgggggactgcaggcacgcaaaataaaataactcctgctcgtttggaatgtaactcctggcacagtgttcctggatcctggggctgcgtggggggcgggagggcctgtagataatcttgcgtttttcgtcatcttattccagttctgtgggggatgagtttttttgtgggttgctttttcttcagtgctaagaaagttccctccaacaggaactctctgacctgtttattcaggtgtatttctggtttggatttttttttccttctttgttttaacaaatggatccaggatggataaatccaccgagataagggttttggtcactgtctccacctcagttcctcagggctgttggccaccctatgactaactggaagaggacacgccagagcttcagtgaggtttccgagcctctccctgcccatcctcaccactgaggccacgacaaagcacagctccagctcggacagcaccctcagtgccagccagcctctgccagacctctctttccctcttctccccagcctcctccagggctgcccaaggcagggtttccagccaggcctcggggtcatcttttcaccaggagcaaacccaagtcttagttgctacaagaaaatcccctggaagtactgggggccaggttccccagacagcaggaattgcccctgttcagagcagccggagtttgctggaccacaaggaagaagagaagagacttgcagtgaactgtttttgtgccaagaaaccctggacctggggccaagtatttcccaagccaagcatccacttgtctgtgtctgggaagggatggccaaggccgctagggtccttacccctcaggatcactccccagccctttcctcaggaggtaccgctctccaaggtgtgctagcagtgggccctgcccaacttcaggcagaacagggaggcccagagattacagatcccctcctgtaagtggccaggcattctctccctgccctctctggcctctggggtcatactcacttctttagccagccccatcccctccaccccacacctgagttcttgcctcctccttttggggacacccaaaacactgcttgtgagaaggaagatggaaggtaagttctgtcgttctttccccaatccccaggaatggacaagaagccaacttagaaagaagggtctcacgtggctggcctggctcctccgtagacccctgttcttttcaacctctgcccacccgtgcatgtcatcacaaacatttgctcttaagttacaagagaccacatccacccagggattagggttcaagtagcagctgctaacccttgcaccagcccttgtgggactcccaacacaagacaaagctcaggatgctggtgatgctaggaagatgtccctcccctcactgccccacattctcccagtggctctaccagcctcacccatcaaaccagtgaatttctcaatcttgcctcacagtgactgcagcgccaagcggcatccaccaagcatcaagttggagaaaagggaacccaagcagtagagagcgatattggagtcttttgttcattcaaatcttggatttttttttttccctaagagattctctttttagggggaatgggaaacggacacctcataaagggttcaaagatcatcaatttttctgactttttaaatcattatcattattatttttaattaaaaaaatgcctgtatgcctttttttggtcggattgtaaataaatataccattgtccta

SEQ ID NO: 330824 - DNA, 2136 bp, Homo sapiens
  misc_feature (25)..(25): n is a, c, g, or t
  misc_feature (28)..(28): n is a, c, g, or t
gcaggagcggttgaagccagacgancancttgtggagttaaactccgtaaccaggagcaccacttccgctgacgtcattacggcgacacgtggatccaagatggcgacggcgatggattggttgccgtggtctttactgcttttctccctgatgtgtgaaacaagcgccttctatgtgcctggggtcgcgcctatcaacttccaccagaacgatcccgtagaaatcaaggctgtgaagctcaccagctctcgaacccagctaccttatgaatactattcactgcccttctgccagcccagcaagataacctacaaggcagagaatctgggagaggtgctgagaggggaccggattgtcaacacccctttccaggttctcatgaacagcgagaagaagtgtgaagttctgtgcagccagtccaacaagccagtgaccctgacagtggagcagagccgactcgtggccgagcggatcacagaagactactacgtccacctcattgctgacaacctgcctgtggccacccggctggagctctactccaaccgagacagcgatgacaagaagaaggaaaaagatgtgcagtttgaacacggctaccggctcggcttcacagatgtcaacaagatctacctgcacaaccacctctcattcatcctttactatcatcgggaggacatggaagaggaccaggagcacacgtaccgtgtcgtccgcttcgaggtgattccccagagcatcaggctggaggacctcaaagcagatgagaagagttcgtgcactctgcctgagggtaccaactcctcgccccaagaaattgaccccaccaaggagaatcagctgtacttcacctactctgtccactgggaggaaagtgatatcaaatgggcctctcgctgggacacttacctgaccatgagtgacgtccagatccactggttttctatcattaactccgttgttgtggtcttcttcctgtcaggtatcctgagcatgattatcattcggaccctccggaaggacattgccaactacaacaaggaggatgacattgaagacaccatggaggagtctgggtggaagttggtgcacggcgacgtcttcaggcccccccagtaccccatgatcctcagctccctgctgggctcaggcattcagctgttctgtatgatcctcatcgtcatctttgtagccatgcttgggatgctgtcgccctccagccggggagctctcatgaccacagcctgcttcctcttcatgttcatgggggtgtttggcggattttctgctggccgtctgtaccgcactttaaaaggccatcggtggaagaaaggagccttctgtacggcaactctgtaccctggtgtggtttttggcatctgcttcgtattgaattgcttcatttggggaaagcactcatcaggagcggtgccctttcccaccatggtggctctgctgtgcatgtggttcgggatctccctgcccctcgtctacttgggctactacttcggcttccgaaagcagccatatgacaaccctgtgcgcaccaaccagattccccggcagatccccgagcagcggtggtacatgaaccgatttgtgggcatcctcatggctgggatcttgcccttcggcgccatgttcatcgagctcttcttcatcttcagtgctatctgggagaatcagttctattacctctttggcttcctgttccttgttttcatcatcctggtggtatcctgttcacaaatcagcatcgtcatggtgtacttccagctgtgtgcagaggattaccgctggtggtggagaaatttcctagtctccgggggctctgcattctacgtcctggtttatgccatcttttatttcgttaacaagctggacatcgtggagttcatcccctctctcctctactttggctacacggccctcatggtcttgtccttctggctgctaacgggtaccatcggcttctatgcagcctacatgtttgttcgcaagatctatgctgctgtgaagatagactgattggagtggaccacggccaagcctgctccgtcctcggacaggaagccaccctgcgtgggggactgcaggcacgcaaaataaaataactcctgctcgtttggaatgta

SEQ ID NO: 330825 - DNA, 759 bp, Homo sapiens
  misc_feature (25)..(25): n is a, c, g, or t
  misc_feature (28)..(28): n is a, c, g, or t
gcaggagcggttgaagccagacgancancttgtggagttaaactccgtaaccaggagcaccacttccgctgacgtcattacggcgacacgtggatccaagatggcgacggcgatggattggttgccgtggtctttactgcttttctccctgatgtgtgaaacaagcgccttctatgtgcctggggtcgcgcctatcaacttccaccagaacgatcccgtagaaatcaaggctgtgaagctcaccagctctcgaacccagctaccttatgaatactattcactgcccttctgccagcccagcaagataacctacaaggcagagaatctgggagaggtgctgagaggggaccggattgtcaacacccctttccaggttctcatgaacagcgagaagaagtgtgaagttctgtgcagccagtccaacaagccagtgaccctgacagtggagcagagccgactcgtggccgagcggatcacagaagactactacgtccacctcattgctgacaacctgcctgtggccacccggctggagctctactccaaccgagacagcgatgacaagaagaaggaaaaagatgtgcagtttgaacacggctaccggctcggcttcacagatgtcaacaagatctacctgcacaaccacctctcattcatcctttactatcatcgggaggacatggaagaggaccattatctctcttaccctgttttctcgttttgagggggaattccccaatactacagtgtttggggtcc

SEQ ID NO: 330826 - DNA, 535 bp, Homo sapiens
ccttccaggttcatgccattctcctgcctcagcctcccgagtagctgggactacaggcgcctaccaccatgcccagctaattttttgtatttttagtagagacggggtttcaccctgttagccaggatggtctcgatctcctgacctcatgatccgcccgcctcggcctcccaaagtgctgggattacaggcgtgagccaccgcgcccacctcacccatcaaaccagtgaatttctcaatcttgcctcacagtgactgcagcgccaagcggcatccaccaagcatcaagttggagaaaagggaacccaagcagtagagagcgatattggagtcttttgttcattcaaatcttggatttttttttttccctaagagattctctttttagggggaatgggaaacggacacctcataaagggttcaaagatcatcaatttttctgactttttaaatcattatcattattatttttaattaaaaaaatgcctgtatgcctttttttggtcggattgtaaataaatataccattgtccta

SEQ ID NO: 330827 - DNA, 455 bp, Homo sapiens
tggcggggcattctgggcaaaaaggatagcttgaagaaaggcgtgctgatgagaacatagtgaggccaggagccaactgaagcagcagatagccagaggtggagccacaggcagcccttggacacatgagctgagaagtcagtaggaccaagcgatggaacagctgggatgctcctctccccaggatacccctacccatcccagcaaccctttcctccccacctccatgctctgtgctctcctcccctggtagctggagtggagctcccccgagaagaggccttgaggtggctgcatagccagttcataatggagcaagccgtgcatgccagctgtcgcacagtaaaacatcatgtctaggagggcatggagcatgggcttgctggcagcgccaacttctcctcatcctcaccgccatctatttcaggtatcctgagcatgattatcattcggac

SEQ ID NO: 330828 - DNA, 371 bp, Homo sapiens
gatcttcttcacttcttctccccaatccaaccctggcctctcttctgagcaggattggttgccgtggtctttactgcttttctccctgatgtgtgaaacaagcgccttctatgtgcctggggtcgcgcctatcaacttccaccagaacgatcccgtagaaatcaaggtaagtgtgttcctggatttttggagcctctgtgctaggcagtgtgtctggagcaccatggtgagctgttcgtgtccatcctgtggttgcagagaagaaagaatagtgccagttaccccggaactctgcctctccctctccctgtgcctctggttctcggtcccctctctgtttctggttctttctgtgtctctgtccctgtgta

SEQ ID NO: 330829 - DNA, 480 bp, Homo sapiens
tgacaagattgggagcactttgtacagtgttgttttttcccttcttttcttcacataatgtgccacatgtaatctcttcattttgacctcttcatctcttcacgttctcagtccactccttcctgttcctcccctacttcctccctggatggtgagctcctctgggatgctgaggtgccttcttcactgggagtccagatcagggctggggtcagcctcaagagattctggccaggagccctgtggtgggggcagggagtgtgcttctgctgcacaagtcgcctctccttctgtggagcccagaaggtcccctcccccttgcgcagcccccatcccgggcatcagggcctcgtgggggcctcatggtgccatgtctacaggtgccctttcccaccatggtggctctgctgtgcatgtggttcgggatctccctgcccctcgtctacttgggctactacttcggcttccgaaagcagccat

SEQ ID NO: 330830 - DNA, 4124 bp, Homo sapiens
  misc_feature (25)..(25): n is a, c, g, or t
  misc_feature (28)..(28): n is a, c, g, or t
gcaggagcggttgaagccagacgancancttgtggagttaaactccgtaaccaggagcaccacttccgctgacgtcattacggcgacacgtggatccaagatggcgacggcgatggtgagtgaaggagactccgggagcgggagctggagcggggccctccggggtatcccaggatcttccagcaccccatgcctggccctgagccacctccgggacccctgactcaggcctgagggctacctctgactgggcttgtcttccccgaaatccacctccctggccctgcccctgcactcaggcttgtgaaggccccgagttttgggggaggcgccgtttcggaggaagacctcggctgctgccttcgccggttcccattctacttttggtctccgcccactgattggttgccgtggtctttactgcttttctccctgatgtgtgaaacaagcgccttctatgtgcctggggtcgcgcctatcaacttccaccagaacgatcccgtagaaatcaaggctgtgaagctcaccagctctcgaacccagctaccttatgaatactattcactgcccttctgccagcccagcaagataacctacaaggcagagaatctgggagaggtgctgagaggggaccggattgtcaacacccctttccaggttctcatgaacagcgagaagaagtgtgaagttctgtgcagccagtccaacaagccagtgaccctgacagtggagcagagccgactcgtggccgagcggatcacagaagactactacgtccacctcattgctgacaacctgcctgtggccacccggctggagctctactccaaccgagacagcgatgacaagaagaaggaaaaagatgtgcagtttgaacacggctaccggctcggcttcacagatgtcaacaagatctacctgcacaaccacctctcattcatcctttactatcatcgggaggacatggaagaggaccaggagcacacgtaccgtgtcgtccgcttcgaggtgattccccagagcatcaggctggaggacctcaaagcagatgagaagagttcgtgcactctgcctgagggtaccaactcctcgccccaagaaattgaccccaccaaggagaatcagctgtacttcacctactctgtccactgggaggaaagtgatatcaaatgggcctctcgctgggacacttacctgaccatgagtgacgtccagatccactggttttctatcattaactccgttgttgtggtcttcttcctgtcaggtatcctgagcatgattatcattcggaccctccggaaggacattgccaactacaacaaggaggatgacattgaagacaccatggaggagtctgggtggaagttggtgcacggcgacgtcttcaggcccccccagtaccccatgatcctcagctccctgctgggctcaggcattcagctgttctgtatgatcctcatcgtcatctttgtagccatgcttgggatgctgtcgccctccagccggggagctctcatgaccacagcctgcttcctcttcatgttcatgggggtgtttggcggattttctgctggccgtctgtaccgcactttaaaaggccatcggtggaagaaaggagccttctgtacggcaactctgtaccctggtgtggtttttggcatctgcttcgtattgaattgcttcatttggggaaagcactcatcaggagcggtgccctttcccaccatggtggctctgctgtgcatgtggttcgggatctccctgcccctcgtctacttgggctactacttcggcttccgaaagcagccatatgacaaccctgtgcgcaccaaccagattccccggcagatccccgagcagcggtggtacatgaaccgatttgtgggcatcctcatggctgggatcttgcccttcggcgccatgttcatcgagctcttcttcatcttcagtgctatctgggagaatcagttctattacctctttggcttcctgttccttgttttcatcatcctggtggtatcctgttcacaaatcagcatcgtcatggtgtacttccagctgtgtgcagaggattaccgctggtggtggagaaatttcctagtctccgggggctctgcattctacgtcctggtttatgccatcttttatttcgttaacaagctggacatcgtggagttcatcccctctctcctctactttggctacacggccctcatggtcttgtccttctggctgctaacgggtaccatcggcttctatgcagcctacatgtttgttcgcaagatctatgctgctgtgaagatagactgattggagtggaccacggccaagcctgctccgtcctcggacaggaagccaccctgcgtgggggactgcaggcacgcaaaataaaataactcctgctcgtttggaatgtaactcctggcacagtgttcctggatcctggggctgcgtggggggcgggagggcctgtagataatcttgcgtttttcgtcatcttattccagttctgtgggggatgagtttttttgtgggttgctttttcttcagtgctaagaaagttccctccaacaggaactctctgacctgtttattcaggtgtatttctggtttggatttttttttccttctttgttttaacaaatggatccaggatggataaatccaccgagataagggttttggtcactgtctccacctcagttcctcagggctgttggccaccctatgactaactggaagaggacacgccagagcttcagtgaggtttccgagcctctccctgcccatcctcaccactgaggccacgacaaagcacagctccagctcggacagcaccctcagtgccagccagcctctgccagacctctctttccctcttctccccagcctcctccagggctgcccaaggcagggtttccagccaggcctcggggtcatcttttcaccaggagcaaacccaagtcttagttgctacaagaaaatcccctggaagtactgggggccaggttccccagacagcaggaattgcccctgttcagagcagccggagtttgctggaccacaaggaagaagagaagagacttgcagtgaactgtttttgtgccaagaaaccctggacctggggccaagtatttcccaagccaagcatccacttgtctgtgtctgggaagggatggccaaggccgctagggtccttacccctcaggatcactccccagccctttcctcaggaggtaccgctctccaaggtgtgctagcagtgggccctgcccaacttcaggcagaacagggaggcccagagattacagatcccctcctgtaagtggccaggcattctctccctgccctctctggcctctggggtcatactcacttctttagccagccccatcccctccaccccacacctgagttcttgcctcctccttttggggacacccaaaacactgcttgtgagaaggaagatggaaggtaagttctgtcgttctttccccaatccccaggaatggacaagaagccaacttagaaagaagggtctcacgtggctggcctggctcctccgtagacccctgttcttttcaacctctgcccacccgtgcatgtcatcacaaacatttgctcttaagttacaagagaccacatccacccagggattagggttcaagtagcagctgctaacccttgcaccagcccttgtgggactcccaacacaagacaaagctcaggatgctggtgatgctaggaagatgtccctcccctcactgccccacattctcccagtggctctaccagcctcacccatcaaaccagtgaatttctcaatcttgcctcacagtgactgcagcgccaagcggcatccaccaagcatcaagttggagaaaagggaacccaagcagtagagagcgatattggagtcttttgttcattcaaatcttggatttttttttttccctaagagattctctttttagggggaatgggaaacggacacctcataaagggttcaaagatcatcaatttttctgactttttaaatcattatcattattatttttaattaaaaaaatgcctgtatgcctttttttggtcggattgtaaataaatataccattgtccta

SEQ ID NO: 330831 - DNA, 3840 bp, Homo sapiens
  misc_feature (25)..(25): n is a, c, g, or t
  misc_feature (28)..(28): n is a, c, g, or t
gcaggagcggttgaagccagacgancancttgtggagttaaactccgtaaccaggagcaccacttccgctgacgtcattacggcgacacgtggatccaagatggcgacggcgatggattggttgccgtggtctttactgcttttctccctgatgtgtgaaacaagcgccttctatgtgcctggggtcgcgcctatcaacttccaccagaacgatcccgtagaaatcaaggctgtgaagctcaccagctctcgaacccagctaccttatgaatactattcactgcccttctgccagcccagcaagataacctacaaggcagagaatctgggagaggtgctgagaggggaccggattgtcaacacccctttccaggttctcatgaacagcgagaagaagtgtgaagttctgtgcagccagtccaacaagccagtgaccctgacagtggagcagagccgactcgtggccgagcggatcacagaagactactacgtccacctcattgctgacaacctgcctgtggccacccggctggagctctactccaaccgagacagcgatgacaagaagaaggaaaaagatgtgcagtttgaacacggctaccggctcggcttcacagatgtcaacaagatctacctgcacaaccacctctcattcatcctttactatcatcgggaggacatggaagaggaccaggagcacacgtaccgtgtcgtccgcttcgaggtgattccccagagcatcaggctggaggacctcaaagcagatgagaagagttcgtgcactctgcctgagggtaccaactcctcgccccaagaaattgaccccaccaaggagaatcagctgtacttcacctactctgtccactgggaggaaagtgatatcaaatgggcctctcgctgggacacttacctgaccatgagtgacgtccagatccactggttttctatcattaactccgttgttgtggtcttcttcctgtcaggtatcctgagcatgattatcattcggaccctccggaaggacattgccaactacaacaaggaggatgacattgaagacaccatggaggagtctgggtggaagttggtgcacggcgacgtcttcaggcccccccagtaccccatgatcctcagctccctgctgggctcaggcattcagctgttctgtatgatcctcatcgtcatctttgtagccatgcttgggatgctgtcgccctccagccggggagctctcatgaccacagcctgcttcctcttcatgttcatgggggtgtttggcggattttctgctggccgtctgtaccgcactttaaaaggccatcggtggaagaaaggagccttctgtacggcaactctgtaccctggtgtggtttttggcatctgcttcgtattgaattgcttcatttggggaaagcactcatcaggagcggtgccctttcccaccatggtggctctgctgtgcatgtggttcgggatctccctgcccctcgtctacttgggctactacttcggcttccgaaagcagccatatgacaaccctgtgcgcaccaaccagattccccggcagatccccgagcagcggtggtacatgaaccgatttgtgggcatcctcatggctgggatcttgcccttcggcgccatgttcatcgagctcttcttcatcttcagtgctatctgggagaatcagttctattacctctttggcttcctgttccttgttttcatcatcctggtggtatcctgttcacaaatcagcatcgtcatggtgtacttccagctgtgtgcagaggattaccgctggtggtggagaaatttcctagtctccgggggctctgcattctacgtcctggtttatgccatcttttatttcgttaacaagctggacatcgtggagttcatcccctctctcctctactttggctacacggccctcatggtcttgtccttctggctgctaacgggtaccatcggcttctatgcagcctacatgtttgttcgcaagatctatgctgctgtgaagatagactgattggagtggaccacggccaagcctgctccgtcctcggacaggaagccaccctgcgtgggggactgcaggcacgcaaaataaaataactcctgctcgtttggaatgtaactcctggcacagtgttcctggatcctggggctgcgtggggggcgggagggcctgtagataatcttgcgtttttcgtcatcttattccagttctgtgggggatgagtttttttgtgggttgctttttcttcagtgctaagaaagttccctccaacaggaactctctgacctgtttattcaggtgtatttctggtttggatttttttttccttctttgttttaacaaatggatccaggatggataaatccaccgagataagggttttggtcactgtctccacctcagttcctcagggctgttggccaccctatgactaactggaagaggacacgccagagcttcagtgaggtttccgagcctctccctgcccatcctcaccactgaggccacgacaaagcacagctccagctcggacagcaccctcagtgccagccagcctctgccagacctctctttccctcttctccccagcctcctccagggctgcccaaggcagggtttccagccaggcctcggggtcatcttttcaccaggagcaaacccaagtcttagttgctacaagaaaatcccctggaagtactgggggccaggttccccagacagcaggaattgcccctgttcagagcagccggagtttgctggaccacaaggaagaagagaagagacttgcagtgaactgtttttgtgccaagaaaccctggacctggggccaagtatttcccaagccaagcatccacttgtctgtgtctgggaagggatggccaaggccgctagggtccttacccctcaggatcactccccagccctttcctcaggaggtaccgctctccaaggtgtgctagcagtgggccctgcccaacttcaggcagaacagggaggcccagagattacagatcccctcctgtaagtggccaggcattctctccctgccctctctggcctctggggtcatactcacttctttagccagccccatcccctccaccccacacctgagttcttgcctcctccttttggggacacccaaaacactgcttgtgagaaggaagatggaaggtaagttctgtcgttctttccccaatccccaggaatggacaagaagccaacttagaaagaagggtctcacgtggctggcctggctcctccgtagacccctgttcttttcaacctctgcccacccgtgcatgtcatcacaaacatttgctcttaagttacaagagaccacatccacccagggattagggttcaagtagcagctgctaacccttgcaccagcccttgtgggactcccaacacaagacaaagctcaggatgctggtgatgctaggaagatgtccctcccctcactgccccacattctcccagtggctctaccagcctcacccatcaaaccagtgaatttctcaatcttgcctcacagtgactgcagcgccaagcggcatccaccaagcatcaagttggagaaaagggaacccaagcagtagagagcgatattggagtcttttgttcattcaaatcttggatttttttttttccctaagagattctctttttagggggaatgggaaacggacacctcataaagggttcaaagatcatcaatttttctgactttttaaatcattatcattattatttttaattaaaaaaatgcctgtatgcctttttttggtcggattgtaaataaatataccattgtccta

SEQ ID NO: 330832 - DNA, 3756 bp, Homo sapiens
  misc_feature (25)..(25): n is a, c, g, or t
  misc_feature (28)..(28): n is a, c, g, or t
gcaggagcggttgaagccagacgancancttgtggagttaaactccgtaaccaggagcaccacttccgctgacgtcattacggcgacacgtggatccaagatggcgacggcgatggattggttgccgtggtctttactgcttttctccctgatgtgtgaaacaagcgccttctatgtgcctggggtcgcgcctatcaacttccaccagaacgatcccgtagaaatcaaggctgtgaagctcaccagctctcgaacccagctaccttatgaatactattcactgcccttctgccagcccagcaagataacctacaaggcagagaatctgggagaggtgctgagaggggaccggattgtcaacacccctttccaggttctcatgaacagcgagaagaagtgtgaagttctgtgcagccagtccaacaagccagtgaccctgacagtggagcagagccgactcgtggccgagcggatcacagaagactactacgtccacctcattgctgacaacctgcctgtggccacccggctggagctctactccaaccgagacagcgatgacaagaagaaggaaaaagatgtgcagtttgaacacggctaccggctcggcttcacagatgtcaacaagatctacctgcacaaccacctctcattcatcctttactatcatcgggaggacatggaagaggaccaggagcacacgtaccgtgtcgtccgcttcgaggtgattccccagagcatcaggctggaggacctcaaagcagatgagaagagttcgtgcactctgcctgagggtaccaactcctcgccccaagaaattgaccccaccaaggagaatcagctgtacttcacctactctgtccactgggaggaaagtgatatcaaatgggcctctcgctgggacacttacctgaccatgagtgacgtccagatccactggttttctatcattaactccgttgttgtggtcttcttcctgtcaggtatcctgagcatgattatcattcggaccctccggaaggacattgccaactacaacaaggaggatgacattgaagacaccatggaggagtctgggtggaagttggtgcacggcgacgtcttcaggcccccccagtaccccatgatcctcagctccctgctgggctcaggcattcagctgttctgtatgatcctcatcgtcatctttgtagccatgcttgggatgctgtcgccctccagccggggagctctcatgaccacagcctgcttcctcttcatgttcatgggggtgtttggcggattttctgctggccgtctgtaccgcactttaaaaggccatcggtggaagaaaggagccttctgtgtgccctttcccaccatggtggctctgctgtgcatgtggttcgggatctccctgcccctcgtctacttgggctactacttcggcttccgaaagcagccatatgacaaccctgtgcgcaccaaccagattccccggcagatccccgagcagcggtggtacatgaaccgatttgtgggcatcctcatggctgggatcttgcccttcggcgccatgttcatcgagctcttcttcatcttcagtgctatctgggagaatcagttctattacctctttggcttcctgttccttgttttcatcatcctggtggtatcctgttcacaaatcagcatcgtcatggtgtacttccagctgtgtgcagaggattaccgctggtggtggagaaatttcctagtctccgggggctctgcattctacgtcctggtttatgccatcttttatttcgttaacaagctggacatcgtggagttcatcccctctctcctctactttggctacacggccctcatggtcttgtccttctggctgctaacgggtaccatcggcttctatgcagcctacatgtttgttcgcaagatctatgctgctgtgaagatagactgattggagtggaccacggccaagcctgctccgtcctcggacaggaagccaccctgcgtgggggactgcaggcacgcaaaataaaataactcctgctcgtttggaatgtaactcctggcacagtgttcctggatcctggggctgcgtggggggcgggagggcctgtagataatcttgcgtttttcgtcatcttattccagttctgtgggggatgagtttttttgtgggttgctttttcttcagtgctaagaaagttccctccaacaggaactctctgacctgtttattcaggtgtatttctggtttggatttttttttccttctttgttttaacaaatggatccaggatggataaatccaccgagataagggttttggtcactgtctccacctcagttcctcagggctgttggccaccctatgactaactggaagaggacacgccagagcttcagtgaggtttccgagcctctccctgcccatcctcaccactgaggccacgacaaagcacagctccagctcggacagcaccctcagtgccagccagcctctgccagacctctctttccctcttctccccagcctcctccagggctgcccaaggcagggtttccagccaggcctcggggtcatcttttcaccaggagcaaacccaagtcttagttgctacaagaaaatcccctggaagtactgggggccaggttccccagacagcaggaattgcccctgttcagagcagccggagtttgctggaccacaaggaagaagagaagagacttgcagtgaactgtttttgtgccaagaaaccctggacctggggccaagtatttcccaagccaagcatccacttgtctgtgtctgggaagggatggccaaggccgctagggtccttacccctcaggatcactccccagccctttcctcaggaggtaccgctctccaaggtgtgctagcagtgggccctgcccaacttcaggcagaacagggaggcccagagattacagatcccctcctgtaagtggccaggcattctctccctgccctctctggcctctggggtcatactcacttctttagccagccccatcccctccaccccacacctgagttcttgcctcctccttttggggacacccaaaacactgcttgtgagaaggaagatggaaggtaagttctgtcgttctttccccaatccccaggaatggacaagaagccaacttagaaagaagggtctcacgtggctggcctggctcctccgtagacccctgttcttttcaacctctgcccacccgtgcatgtcatcacaaacatttgctcttaagttacaagagaccacatccacccagggattagggttcaagtagcagctgctaacccttgcaccagcccttgtgggactcccaacacaagacaaagctcaggatgctggtgatgctaggaagatgtccctcccctcactgccccacattctcccagtggctctaccagcctcacccatcaaaccagtgaatttctcaatcttgcctcacagtgactgcagcgccaagcggcatccaccaagcatcaagttggagaaaagggaacccaagcagtagagagcgatattggagtcttttgttcattcaaatcttggatttttttttttccctaagagattctctttttagggggaatgggaaacggacacctcataaagggttcaaagatcatcaatttttctgactttttaaatcattatcattattatttttaattaaaaaaatgcctgtatgcctttttttggtcggattgtaaataaatataccattgtccta

SEQ ID NO: 330833 - DNA, 3796 bp, Homo sapiens
  misc_feature (25)..(25): n is a, c, g, or t
  misc_feature (28)..(28): n is a, c, g, or t
gcaggagcggttgaagccagacgancancttgtggagttaaactccgtaaccaggagcaccacttccgctgacgtcattacggcgacacgtggatccaagatggcgacggcgatggattggttgccgtggtctttactgcttttctccctgatgtgtgaaacaagcgccttctatgtgcctggggtcgcgcctatcaacttccaccagaacgatcccgtagaaatcaaggctgtgaagctcaccagctctcgaacccagctaccttatgaatactattcactgcccttctgccagcccagcaagataacctacaaggcagagaatctgggttctcatgaacagcgagaagaagtgtgaagttctgtgcagccagtccaacaagccagtgaccctgacagtggagcagagccgactcgtggccgagcggatcacagaagactactacgtccacctcattgctgacaacctgcctgtggccacccggctggagctctactccaaccgagacagcgatgacaagaagaaggaaaaagatgtgcagtttgaacacggctaccggctcggcttcacagatgtcaacaagatctacctgcacaaccacctctcattcatcctttactatcatcgggaggacatggaagaggaccaggagcacacgtaccgtgtcgtccgcttcgaggtgattccccagagcatcaggctggaggacctcaaagcagatgagaagagttcgtgcactctgcctgagggtaccaactcctcgccccaagaaattgaccccaccaaggagaatcagctgtacttcacctactctgtccactgggaggaaagtgatatcaaatgggcctctcgctgggacacttacctgaccatgagtgacgtccagatccactggttttctatcattaactccgttgttgtggtcttcttcctgtcaggtatcctgagcatgattatcattcggaccctccggaaggacattgccaactacaacaaggaggatgacattgaagacaccatggaggagtctgggtggaagttggtgcacggcgacgtcttcaggcccccccagtaccccatgatcctcagctccctgctgggctcaggcattcagctgttctgtatgatcctcatcgtcatctttgtagccatgcttgggatgctgtcgccctccagccggggagctctcatgaccacagcctgcttcctcttcatgttcatgggggtgtttggcggattttctgctggccgtctgtaccgcactttaaaaggccatcggtggaagaaaggagccttctgtacggcaactctgtaccctggtgtggtttttggcatctgcttcgtattgaattgcttcatttggggaaagcactcatcaggagcggtgccctttcccaccatggtggctctgctgtgcatgtggttcgggatctccctgcccctcgtctacttgggctactacttcggcttccgaaagcagccatatgacaaccctgtgcgcaccaaccagattccccggcagatccccgagcagcggtggtacatgaaccgatttgtgggcatcctcatggctgggatcttgcccttcggcgccatgttcatcgagctcttcttcatcttcagtgctatctgggagaatcagttctattacctctttggcttcctgttccttgttttcatcatcctggtggtatcctgttcacaaatcagcatcgtcatggtgtacttccagctgtgtgcagaggattaccgctggtggtggagaaatttcctagtctccgggggctctgcattctacgtcctggtttatgccatcttttatttcgttaacaagctggacatcgtggagttcatcccctctctcctctactttggctacacggccctcatggtcttgtccttctggctgctaacgggtaccatcggcttctatgcagcctacatgtttgttcgcaagatctatgctgctgtgaagatagactgattggagtggaccacggccaagcctgctccgtcctcggacaggaagccaccctgcgtgggggactgcaggcacgcaaaataaaataactcctgctcgtttggaatgtaactcctggcacagtgttcctggatcctggggctgcgtggggggcgggagggcctgtagataatcttgcgtttttcgtcatcttattccagttctgtgggggatgagtttttttgtgggttgctttttcttcagtgctaagaaagttccctccaacaggaactctctgacctgtttattcaggtgtatttctggtttggatttttttttccttctttgttttaacaaatggatccaggatggataaatccaccgagataagggttttggtcactgtctccacctcagttcctcagggctgttggccaccctatgactaactggaagaggacacgccagagcttcagtgaggtttccgagcctctccctgcccatcctcaccactgaggccacgacaaagcacagctccagctcggacagcaccctcagtgccagccagcctctgccagacctctctttccctcttctccccagcctcctccagggctgcccaaggcagggtttccagccaggcctcggggtcatcttttcaccaggagcaaacccaagtcttagttgctacaagaaaatcccctggaagtactgggggccaggttccccagacagcaggaattgcccctgttcagagcagccggagtttgctggaccacaaggaagaagagaagagacttgcagtgaactgtttttgtgccaagaaaccctggacctggggccaagtatttcccaagccaagcatccacttgtctgtgtctgggaagggatggccaaggccgctagggtccttacccctcaggatcactccccagccctttcctcaggaggtaccgctctccaaggtgtgctagcagtgggccctgcccaacttcaggcagaacagggaggcccagagattacagatcccctcctgtaagtggccaggcattctctccctgccctctctggcctctggggtcatactcacttctttagccagccccatcccctccaccccacacctgagttcttgcctcctccttttggggacacccaaaacactgcttgtgagaaggaagatggaaggtaagttctgtcgttctttccccaatccccaggaatggacaagaagccaacttagaaagaagggtctcacgtggctggcctggctcctccgtagacccctgttcttttcaacctctgcccacccgtgcatgtcatcacaaacatttgctcttaagttacaagagaccacatccacccagggattagggttcaagtagcagctgctaacccttgcaccagcccttgtgggactcccaacacaagacaaagctcaggatgctggtgatgctaggaagatgtccctcccctcactgccccacattctcccagtggctctaccagcctcacccatcaaaccagtgaatttctcaatcttgcctcacagtgactgcagcgccaagcggcatccaccaagcatcaagttggagaaaagggaacccaagcagtagagagcgatattggagtcttttgttcattcaaatcttggatttttttttttccctaagagattctctttttagggggaatgggaaacggacacctcataaagggttcaaagatcatcaatttttctgactttttaaatcattatcattattatttttaattaaaaaaatgcctgtatgcctttttttggtcggattgtaaataaatataccattgtccta

SEQ ID NO: 330834 - DNA, 2125 bp, Homo sapiens
tcaagcaactgtgaaattggtaggaaggggttctgccccaggacaacactgaccttcctctgtttcctcctcaggattaccgctggtggtggagaaatttcctagtctccgggggctctgcattctacgtcctggtttatgccatcttttatttcgttaacaagctggacatcgtggagttcatcccctctctcctctactttggctacacggccctcatggtcttgtccttctggctgctaacgggtaccatcggcttctatgcagcctacatgtttgttcgcaagatctatgctgctgtgaagatagactgattggagtggaccacggccaagcctgctccgtcctcggacaggaagccaccctgcgtgggggactgcaggcacgcaaaataaaataactcctgctcgtttggaatgtaactcctggcacagtgttcctggatcctggggctgcgtggggggcgggagggcctgtagataatcttgcgtttttcgtcatcttattccagttctgtgggggatgagtttttttgtgggttgctttttcttcagtgctaagaaagttccctccaacaggaactctctgacctgtttattcaggtgtatttctggtttggatttttttttccttctttgttttaacaaatggatccaggatggataaatccaccgagataagggttttggtcactgtctccacctcagttcctcagggctgttggccaccctatgactaactggaagaggacacgccagagcttcagtgaggtttccgagcctctccctgcccatcctcaccactgaggccacgacaaagcacagctccagctcggacagcaccctcagtgccagccagcctctgccagacctctctttccctcttctccccagcctcctccagggctgcccaaggcagggtttccagccaggcctcggggtcatcttttcaccaggagcaaacccaagtcttagttgctacaagaaaatcccctggaagtactgggggccaggttccccagacagcaggaattgcccctgttcagagcagccggagtttgctggaccacaaggaagaagagaagagacttgcagtgaactgtttttgtgccaagaaaccctggacctggggccaagtatttcccaagccaagcatccacttgtctgtgtctgggaagggatggccaaggccgctagggtccttacccctcaggatcactccccagccctttcctcaggaggtaccgctctccaaggtgtgctagcagtgggccctgcccaacttcaggcagaacagggaggcccagagattacagatcccctcctgtaagtggccaggcattctctccctgccctctctggcctctggggtcatactcacttctttagccagccccatcccctccaccccacacctgagttcttgcctcctccttttggggacacccaaaacactgcttgtgagaaggaagatggaaggtaagttctgtcgttctttccccaatccccaggaatggacaagaagccaacttagaaagaagggtctcacgtggctggcctggctcctccgtagacccctgttcttttcaacctctgcccacccgtgcatgtcatcacaaacatttgctcttaagttacaagagaccacatccacccagggattagggttcaagtagcagctgctaacccttgcaccagcccttgtgggactcccaacacaagacaaagctcaggatgctggtgatgctaggaagatgtccctcccctcactgccccacattctcccagtggctctaccagcctcacccatcaaaccagtgaatttctcaatcttgcctcacagtgactgcagcgccaagcggcatccaccaagcatcaagttggagaaaagggaacccaagcagtagagagcgatattggagtcttttgttcattcaaatcttggatttttttttttccctaagagattctctttttagggggaatgggaaacggacacctcataaagggttcaaagatcatcaatttttctgactttttaaatcattatcattattatttttaattaaaaaaatgcctgtatgcctttttttggtcggattgtaaataaatataccattgtccta

SEQ ID NO: 330835 - DNA, 2238 bp, Homo sapiens
  misc_feature (25)..(25): n is a, c, g, or t
  misc_feature (28)..(28): n is a, c, g, or t
gcaggagcggttgaagccagacgancancttgtggagttaaactccgtaaccaggagcaccacttccgctgacgtcattacggcgacacgtggatccaagatggcgacggcgatggattggttgccgtggtctttactgcttttctccctgatgtgtgaaacaagcgccttctatgtgcctggggtcgcgcctatcaacttccaccagaacgatcccgtagaaatcaaggctgtgaagctcaccagctctcgaacccagctaccttatgaatactattcactgcccttctgccagcccagcaagataacctacaaggcagagaatctgggagaggtgctgagaggggaccggattgtcaacacccctttccaggttctcatgaacagcgagaagaagtgtgaagttctgtgcagccagtccaacaagccagtgaccctgacagtggagcagagccgactcgtggccgagcggatcacagaagactactacgtccacctcattgctgacaacctgcctgtggccacccggctggagctctactccaaccgagacagcgatgacaagaagaaggaaaaagatgtgcagtttgaacacggctaccggctcggcttcacagatgtcaacaagatctacctgcacaaccacctctcattcatcctttactatcatcgggaggacatggaagaggaccaggagcacacgtaccgtgtcgtccgcttcgaggtgattccccagagcatcaggctggaggacctcaaagcagatgagaagagttcgtgcactctgcctgagggtaccaactcctcgccccaagaaattgaccccaccaaggagaatcagctgtacttcacctactctgtccactgggaggaaagtgatatcaaatgggcctctcgctgggacacttacctgaccatgagtgacgtccagatccactggttttctatcattaactccgttgttgtggtcttcttcctgtcaggtatcctgagcatgattatcattcggaccctccggaaggacattgccaactacaacaaggaggatgacattgaagacaccatggaggagtctgggtggaagttggtgcacggcgacgtcttcaggcccccccagtaccccatgatcctcagctccctgctgggctcaggcattcagctgttctgtatgatcctcatcgtcatctttgtagccatgcttgggatgctgtcgccctccagccggggagctctcatgaccacagcctgcttcctcttcatgttcatgggggtgtttggcggattttctgctggccgtctgtaccgcactttaaaaggccatcggtggaagaaaggagccttctgtacggcaactctgtaccctggtgtggtttttggcatctgcttcgtattgaattgcttcatttggggaaagcactcatcaggagcggtgccctttcccaccatggtggctctgctgtgcatgtggttcgggatctccctgcccctcgtctacttgggctactacttcggcttccgaaagcagccatatgacaaccctgtgcgcaccaaccagattccccggcagatccccgagcagcggtggtacatgaaccgatttgtgggcatcctcatggctgggatcttgcccttcggcgccatgttcatcgagctcttcttcatcttcagtgctatctgggagaatcagttctattacctctttggcttcctgttccttgttttcatcatcaaacatttgctcttaagttacaagagaccacatccacccagggattagggttcaagtagcagctgctaacccttgcaccagcccttgtgggactcccaacacaagacaaagctcaggatgctggtgatgctaggaagatgtccctcccctcactgccccacattctcccagtggctctaccagcctcacccatcaaaccagtgaatttctcaatcttgcctcacagtgactgcagcgccaagcggcatccaccaagcatcaagttggagaaaagggaacccaagcagtagagagcgatattggagtcttttgttcattcaaatcttggatttttttttttccctaagagattctctttttagggggaatgggaaacggacacctcataaagggttcaaagatcatcaatttttctgactttttaaatcattatcattattatttttaattaaaaaaatgcctgtatgcctttttttggtcggattgtaaataaatataccattgtccta

SEQ ID NO: 330836 - DNA, 2731 bp, Homo sapiens
  misc_feature (25)..(25): n is a, c, g, or t
  misc_feature (28)..(28): n is a, c, g, or t
gcaggagcggttgaagccagacgancancttgtggagttaaactccgtaaccaggagcaccacttccgctgacgtcattacggcgacacgtggatccaagatggcgacggcgatggattggttgccgtggtctttactgcttttctccctgatgtgtgaaacaagcgccttctatgtgcctggggtcgcgcctatcaacttccaccagaacgatcccgtagaaatcaaggctgtgaagctcaccagctctcgaacccagctaccttatgaatactattcactgcccttctgccagcccagcaagataacctacaaggcagagaatctgggagaggtgctgagaggggaccggattgtcaacacccctttccaggttctcatgaacagcgagaagaagtgtgaagttctgtgcagccagtccaacaagccagtgaccctgacagtggagcagagccgactcgtggccgagcggatcacagaagactactacgtccacctcattgctgacaacctgcctgtggccacccggctggagctctactccaaccgagacagcgatgacaagaagaaggaaaaagatgtgcagtttgaacacggctaccggctcggcttcacagatgtcaacaagatctacctgcacaaccacctctcattcatcctttactatcatcgggaggacatggaagaggaccaggagcacacgtaccgtgtcgtccgcttcgaggtgattccccagagcatcaggctggaggacctcaaagcagatgagaagagttcgtgcactctgcctgagggtaccaactcctcgccccaagaaattgaccccaccaaggagaatcagctgtacttcacctactctgtccactgggaggaaagtgatatcaaatgggcctctcgctgggacacttacctgaccatgagtgacgtccagatccactggttttctatcattaactccgttgttgtggtcttcttcctgtcaggtatcctgagcatgattatcattcggaccctccggaaggacattgccaactacaacaaggaggatgacattgaagacaccatggaggagtctgggtggaagttggtgcacggcgacgtcttcaggcccccccagtaccccatgatcctcagctccctgctgggctcaggcattcagctgttctgtatgatcctcatcgtcatctttgtagccatgcttgggatgctgtcgccctccagccggggagctctcatgaccacagcctgcttcctcttcatgttcatgggggtgtttggcggattttctgctggccgtctgtaccgcactttaaaaggccatcggtggaagaaaggagccttctgtacggcaactctgtaccctggtgtggtttttggcatctgcttcgtattgaattgcttcatttggggaaagcactcatcaggagcggtgccctttcccaccatggtggctctgctgtgcatgtggttcgggatctccctgcccctcgtctacttgggctactacttcggcttccgaaagcagccatatgacaaccctgtgcgcaccaaccagattccccggcagatccccgagcagcggtggtacatgaaccgatttgtgggcatcctcatggctgggatcttgcccttcggcgccatgttcatcgagctcttcttcatcttcagtgctatctgggagaatcagttctattacctctttggcttcctgttccttgttttcatcatcctggtggtatcctgttcacaaatcagcatcgtcatggtgtacttccagctgtgtgcagaggattaccgctggtggtggagaaatttcctagtctccgggggctctgcattctacgtcctggtttatgccatcttttatttcgttaacaagctgcttccctttgcctacaagaggggctcggaaagatggatgtttttcttgacttctttgatatcctgaacttctctacgtagccctttatgtttcttcagtctgttcattataaatttagcttggcatttctgtttgatctcttcaactctcttcattggcatcaatagttttattccatagctctcactggatatttgataagtgcatttctatgtttttccaattcaaatgaattatccactgtaagccctttaccagctgttttccagaatgctttggtccacctacctttgtgaggattgtgcttctttttaaagtttttatgacatttagatttacaaaatctgaacaccttgcaatcattgcggacagacatcatgccatggccagggtagatgggccccgaacagaaataacactcttgagacacatgttgaacccacgtgggtccccaccgaccaaacgccaggcttgagaggaagtcaggtgtatgtttaacctaaactgccacactcttttctaaggtggtgtatcattttatgttaccatcagcagtatacaagagtgccagttcctttacatcctaataacacttggtatggttaatatttttaattttagccattcttacaggtatataacatcttgtgattttaatttctatttccctaatgacatgttgcacatcttttcatgtgcttatttgttattgttggtgacaaatgtatcttctttggtgaagtagatgttcaaatttatgttcatttgtattgggtttggagttattgtcaagttttgagagttatttatgtattctgcagacaagtcctttatcgataaatgctttgc

SEQ ID NO: 330837 - DNA, 805 bp, Homo sapiens
  misc_feature (25)..(25): n is a, c, g, or t
  misc_feature (28)..(28): n is a, c, g, or t
gcaggagcggttgaagccagacgancancttgtggagttaaactccgtaaccaggagcaccacttccgctgacgtcattacggcgacacgtggatccaagatggcgacggcgatggtgagtgaaggagactccgggagcgggagctggagcggggccctccggggtatcccaggatcttccagcaccccatgcctggccctgagccacctccgggacccctgactcaggcctgagggctacctctgactgggcttgtcttccccgaaatccacctccctggccctgcccctgcactcaggcttgtgaaggccccgagttttgggggaggcgccgtttcggaggaagacctcggctgctgccttcgccggttcccattctacttttggtctccgcccactgattggttgccgtggtctttactgcttttctccctgatgtgtgaaacaagcgccttctatgtgcctggggtcgcgcctatcaacttccaccagaacgatcccgtagaaatcaaggctgtgaagctcaccagctctcgaacccagctaccttatgaatactattcactgcccttctgccagcccagcaagataacctacaaggcagagaatctgggagaggtgctgagaggggaccggattgtcaacacccctttccaggttctcatgaacagcgagaagaagtgtgaagttctgtgcagccagtccaacaagccagtgaccctgacagtggagcagagccgactcgtggccgagcggatcacagaagactactacgtccacctgtaagtcgccctgtgctccttgc

SEQ ID NO: 330838 - DNA, 3195 bp, Homo sapiens
atttgtcccaattttgaacaaagttagagagttttttcttcttttttcttctttcttaaagcgaactgtactcctctgctgttcctttgaacttggttcagtaggaagaagtgatatcctccccagaccatctgctttggggagcttggcaaaactgtccagcaaaatgaaaagactcacgtgctttttcatctgcttctttctttctgaagtatcaggcttcgaaatccccataaatggactttctgaatttgtagactatgaagatcttgtggaactggccccaggcaaatttcaattggtggcagagaaccggagatatcagagaagccttccaggagaatcggaagaaatgatggaagaggttgatcaagtaactctttatagctataaagtccagtctactattacttctcggatggccaccaccatgatccagagcaaagtggtgaacaattccccgcagcctcagaatgtcgtgtttgatgttcagatccccaaaggagcattcatttccaacttctccatgactgtggacggcaagacatttaggagctctattaaggagaaaactgtgggccgagctctttatgcacaggccagagcaaaaggcaagacggctggcttggtgaggagcagcgctcttgatatggaaaacttcagaacggaagtaaatgtcctcccaggagcaaaggtgcagttcgaacttcactaccaggaggtgaagtggaggaagctgggctcctatgagcacaggatctatctgcaacctggacggctggccaaacacttagaggtagatgtgtgggttatcgaaccacagggactgagatttcttcatgttcccgacacatttgaaggccatttcgatggtgttccggtcatttctaaaggacaacagaaggcgcacgtctccttcaagcccacggtagcacagcagagaatatgccctagctgccgggagactgcggtagatggggaactggtggtgctgtatgacgtgaaaagagaagagaaggctggtgaactggaggtgtttaatggatattttgtccacttctttgctcctgacaacctggacccaattcccaaaaacatcctctttgtcatcgatgtgagtggctccatgtggggagttaaaatgaaacaaactgtggaagcaatgaagaccatattggatgacctcagagcagaagaccatttctctgtgattgatttcaaccagaacattcgaacttggagaaatgatttaatttcagctacaaaaacacaggttgcagatagccaagaggtatattgagaaaatccagcccagtggaggcacaaacatcaacgaagcactcctacgggcaatcttcattttgaatgaagccaataacttgggactgttagaccccaactccgtctcgctgatcattttggtttctgatggagatccaacagtgggcgaactaaaactgtcaaaaattcagaaaaacgttaaggagaacatccaagacaatatctccttgttcagtttgggcatgggatttgatgtggactatgattttttgaagagactgtccaatgaaaaccatggaattgcacaaaggatttatggaaaccaggacacgtcttcccagcttaagaaattctacaaccaggtctccactccattgctccggaatgttcagttcaactatccccatacatcagtcacggacgtcactcaaaacaatttccataactactttggaggctcagagattgtggtggcaggaaaatttgaccctgctaaattggatcaaatagagagcgttatcacggcgacttcggctaacacgcagttagtcttggagaccctggcccagatggacgacttgcaggattttctatcgaaagacaagcatgcagatcccgatttcaccaggaaactgtgggcctatctaaccatcaaccaactgctagctgaacgaagcctggctcctacagctgccgccaagagaagaattacaagatcgatcctgcagatgtctctagaccaccacattgtgactccgctgacctcgctggtgatcgagaacgaggctggggatgagcgcatgctggcggatgccccaccgcaggatccctcctgctgctcaggggccctgtattacggcagcaaagtggttccagattccaccccgtcttgggccaatccttcaccaacgcccgtgatctccatgctggcacaaggatctcaggtgctagagtccacgccacccccacatgtgatgagagttgaaaatgacccacatttcatcatttatctaccaaaaagccaaaagaacatttgtttcaatattgactcagaacctggaaaaatcctcaacctggtttctgacccagaatcaggaattgtagtcaacggtcagcttgttggtgccaagaagcccaacaatggaaaactaagcacctattttggaaaactgggattttatttccaaagtgaagacataaaaatagaaatcagcactgagaccatcaccctgagccatggttctagcacattctccttgtcctggtccgacacggctcaagtcacgaatcagagggtgcagatctcagtgaagaaagaaaaagtggtaactatcaccctggataaagagatgtccttttctgttttacttcatcgtgtttggaagaagcatcccgtcaatgttgactttctgggaatctacataccccctacaaacaagttctcacctaaagcccacggactaataggccagttcatgcaggaaccaaagatacacatcttcaatgagagaccaggaaaggacccctgagaagccagaggccagcatggaagtgaaggggcagaagctgatcatcaccaggggcttacagaaagactacagaacggatctagtgtttggaacggacgttacctgctggtttgtgcacaacagtggaaaaggattcattgacgggcattacaaggattacttcgtgcctcagctctacagctttctcaaacggccttaaaggtttatagtttgggaaattatatatattaatatacatctttcccctgtcacttttgcagatattcttcggtttgaataattaaaatgaaccagatatcagggtggttaattaaaatgaaccagatatcagggtggtttataaagcctgtaaacacacctaagaaaataaacattttacaaatga

SEQ ID NO: 330839 - DNA, 3138 bp, Homo sapiens
atttgtcccaattttgaacaaagttagagagttttttcttcttttttcttctttcttaaagcgaactgtactcctctgctgttcctttgaacttggttcagtaggaagaagtgatatcctccccagaccatctgctttggggagcttggcaaaactgtccagcttcgaaatccccataaatggactttctgaatttgtagactatgaagatcttgtggaactggccccaggcaaatttcaattggtggcagagaaccggagatatcagagaagccttccaggagaatcggaagaaatgatggaagaggttgatcaagtaactctttatagctataaagtccagtctactattacttctcggatggccaccaccatgatccagagcaaagtggtgaacaattccccgcagcctcagaatgtcgtgtttgatgttcagatccccaaaggagcattcatttccaacttctccatgactgtggacggcaagacatttaggagctctattaaggagaaaactgtgggccgagctctttatgcacaggccagagcaaaaggcaagacggctggcttggtgaggagcagcgctcttgatatggaaaacttcagaacggaagtaaatgtcctcccaggagcaaaggtgcagttcgaacttcactaccaggaggtgaagtggaggaagctgggctcctatgagcacaggatctatctgcaacctggacggctggccaaacacttagaggtagatgtgtgggttatcgaaccacagggactgagatttcttcatgttcccgacacatttgaaggccatttcgatggtgttccggtcatttctaaaggacaacagaaggcgcacgtctccttcaagcccacggtagcacagcagagaatatgccctagctgccgggagactgcggtagatggggaactggtggtgctgtatgacgtgaaaagagaagagaaggctggtgaactggaggtgtttaatggatattttgtccacttctttgctcctgacaacctggacccaattcccaaaaacatcctctttgtcatcgatgtgagtggctccatgtggggagttaaaatgaaacaaactgtggaagcaatgaagaccatattggatgacctcagagcagaagaccatttctctgtgattgatttcaaccagaacattcgaacttggagaaatgatttaatttcagctacaaaaacacaggttgcagatagccaagaggtatattgagaaaatccagcccagtggaggcacaaacatcaacgaagcactcctacgggcaatcttcattttgaatgaagccaataacttgggactgttagaccccaactccgtctcgctgatcattttggtttctgatggagatccaacagtgggcgaactaaaactgtcaaaaattcagaaaaacgttaaggagaacatccaagacaatatctccttgttcagtttgggcatgggatttgatgtggactatgattttttgaagagactgtccaatgaaaaccatggaattgcacaaaggatttatggaaaccaggacacgtcttcccagcttaagaaattctacaaccaggtctccactccattgctccggaatgttcagttcaactatccccatacatcagtcacggacgtcactcaaaacaatttccataactactttggaggctcagagattgtggtggcaggaaaatttgaccctgctaaattggatcaaatagagagcgttatcacggcgacttcggctaacacgcagttagtcttggagaccctggcccagatggacgacttgcaggattttctatcgaaagacaagcatgcagatcccgatttcaccaggaaactgtgggcctatctaaccatcaaccaactgctagctgaacgaagcctggctcctacagctgccgccaagagaagaattacaagatcgatcctgcagatgtctctagaccaccacattgtgactccgctgacctcgctggtgatcgagaacgaggctggggatgagcgcatgctggcggatgccccaccgcaggatccctcctgctgctcaggggccctgtattacggcagcaaagtggttccagattccaccccgtcttgggccaatccttcaccaacgcccgtgatctccatgctggcacaaggatctcaggtgctagagtccacgccacccccacatgtgatgagagttgaaaatgacccacatttcatcatttatctaccaaaaagccaaaagaacatttgtttcaatattgactcagaacctggaaaaatcctcaacctggtttctgacccagaatcaggaattgtagtcaacggtcagcttgttggtgccaagaagcccaacaatggaaaactaagcacctattttggaaaactgggattttatttccaaagtgaagacataaaaatagaaatcagcactgagaccatcaccctgagccatggttctagcacattctccttgtcctggtccgacacggctcaagtcacgaatcagagggtgcagatctcagtgaagaaagaaaaagtggtaactatcaccctggataaagagatgtccttttctgttttacttcatcgtgtttggaagaagcatcccgtcaatgttgactttctgggaatctacataccccctacaaacaagttctcacctaaagcccacggactaataggccagttcatgcaggaaccaaagatacacatcttcaatgagagaccaggaaaggacccctgagaagccagaggccagcatggaagtgaaggggcagaagctgatcatcaccaggggcttacagaaagactacagaacggatctagtgtttggaacggacgttacctgctggtttgtgcacaacagtggaaaaggattcattgacgggcattacaaggattacttcgtgcctcagctctacagctttctcaaacggccttaaaggtttatagtttgggaaattatatatattaatatacatctttcccctgtcacttttgcagatattcttcggtttgaataattaaaatgaaccagatatcagggtggttaattaaaatgaaccagatatcagggtggtttataaagcctgtaaacacacctaagaaaataaacattttacaaatga

SEQ ID NO: 330840 - DNA, 3120 bp, Homo sapiens
atttgtcccaattttgaacaaagttagagagttttttcttcttttttcttctttcttaaagcgaactgtactcctctgctgttcctttgaacttggttcagtaggaagaagtgatatcctccccagaccatctgctttggggagcttggcaaaactgtccagcaaaatgaaaagactcacgtgctttttcatctgcttctttctttctgaagtatcaggcttcgaaatccccataaatggactttctgaaagaagccttccaggagaatcggaagaaatgatggaagaggttgatcaagtaactctttatagctataaagtccagtctactattacttctcggatggccaccaccatgatccagagcaaagtggtgaacaattccccgcagcctcagaatgtcgtgtttgatgttcagatccccaaaggagcattcatttccaacttctccatgactgtggacggcaagacatttaggagctctattaaggagaaaactgtgggccgagctctttatgcacaggccagagcaaaaggcaagacggctggcttggtgaggagcagcgctcttgatatggaaaacttcagaacggaagtaaatgtcctcccaggagcaaaggtgcagttcgaacttcactaccaggaggtgaagtggaggaagctgggctcctatgagcacaggatctatctgcaacctggacggctggccaaacacttagaggtagatgtgtgggttatcgaaccacagggactgagatttcttcatgttcccgacacatttgaaggccatttcgatggtgttccggtcatttctaaaggacaacagaaggcgcacgtctccttcaagcccacggtagcacagcagagaatatgccctagctgccgggagactgcggtagatggggaactggtggtgctgtatgacgtgaaaagagaagagaaggctggtgaactggaggtgtttaatggatattttgtccacttctttgctcctgacaacctggacccaattcccaaaaacatcctctttgtcatcgatgtgagtggctccatgtggggagttaaaatgaaacaaactgtggaagcaatgaagaccatattggatgacctcagagcagaagaccatttctctgtgattgatttcaaccagaacattcgaacttggagaaatgatttaatttcagctacaaaaacacaggttgcagatagccaagaggtatattgagaaaatccagcccagtggaggcacaaacatcaacgaagcactcctacgggcaatcttcattttgaatgaagccaataacttgggactgttagaccccaactccgtctcgctgatcattttggtttctgatggagatccaacagtgggcgaactaaaactgtcaaaaattcagaaaaacgttaaggagaacatccaagacaatatctccttgttcagtttgggcatgggatttgatgtggactatgattttttgaagagactgtccaatgaaaaccatggaattgcacaaaggatttatggaaaccaggacacgtcttcccagcttaagaaattctacaaccaggtctccactccattgctccggaatgttcagttcaactatccccatacatcagtcacggacgtcactcaaaacaatttccataactactttggaggctcagagattgtggtggcaggaaaatttgaccctgctaaattggatcaaatagagagcgttatcacggcgacttcggctaacacgcagttagtcttggagaccctggcccagatggacgacttgcaggattttctatcgaaagacaagcatgcagatcccgatttcaccaggaaactgtgggcctatctaaccatcaaccaactgctagctgaacgaagcctggctcctacagctgccgccaagagaagaattacaagatcgatcctgcagatgtctctagaccaccacattgtgactccgctgacctcgctggtgatcgagaacgaggctggggatgagcgcatgctggcggatgccccaccgcaggatccctcctgctgctcaggggccctgtattacggcagcaaagtggttccagattccaccccgtcttgggccaatccttcaccaacgcccgtgatctccatgctggcacaaggatctcaggtgctagagtccacgccacccccacatgtgatgagagttgaaaatgacccacatttcatcatttatctaccaaaaagccaaaagaacatttgtttcaatattgactcagaacctggaaaaatcctcaacctggtttctgacccagaatcaggaattgtagtcaacggtcagcttgttggtgccaagaagcccaacaatggaaaactaagcacctattttggaaaactgggattttatttccaaagtgaagacataaaaatagaaatcagcactgagaccatcaccctgagccatggttctagcacattctccttgtcctggtccgacacggctcaagtcacgaatcagagggtgcagatctcagtgaagaaagaaaaagtggtaactatcaccctggataaagagatgtccttttctgttttacttcatcgtgtttggaagaagcatcccgtcaatgttgactttctgggaatctacataccccctacaaacaagttctcacctaaagcccacggactaataggccagttcatgcaggaaccaaagatacacatcttcaatgagagaccaggaaaggacccctgagaagccagaggccagcatggaagtgaaggggcagaagctgatcatcaccaggggcttacagaaagactacagaacggatctagtgtttggaacggacgttacctgctggtttgtgcacaacagtggaaaaggattcattgacgggcattacaaggattacttcgtgcctcagctctacagctttctcaaacggccttaaaggtttatagtttgggaaattatatatattaatatacatctttcccctgtcacttttgcagatattcttcggtttgaataattaaaatgaaccagatatcagggtggttaattaaaatgaaccagatatcagggtggtttataaagcctgtaaacacacctaagaaaataaacattttacaaatga

SEQ ID NO: 330841 - DNA, 3488 bp, Homo sapiens
atttgtcccaattttgaacaaagttagagagttttttcttcttttttcttctttcttaaagcgaactgtactcctctgctgttcctttgaacttggttcagtaggaagaagtgatatcctccccagaccatctgctttggggagcttggcaaaactgtccagcaaaatgaaaagactcacgtgctttttcatctgcttctttctttctgaagtatcaggcttcgaaatccccataaatggactttctgaatttgtagactatgaagatcttgtggaactggccccaggcaaatttcaattggtggcagagaaccggagatatcagagaagccttccaggagaatcggaagaaatgatggaagaggttgatcaagtaactctttatagctataaagtccagtctactattacttctcggatggccaccaccatgatccagagcaaagtggtgaacaattccccgcagcctcagaatgtcgtgtttgatgttcagatccccaaaggagcattcatttccaacttctccatgactgtggacggcaagacatttaggagctctattaaggagaaaactgtgggccgagctctttatgcacaggccagagcaaaaggcaagacggctggcttggtgaggagcagcgctcttgatatggaaaacttcagaacggaagtaaatgtcctcccaggagcaaaggtgcagttcgaacttcactaccaggaggtgaagtggaggaagctgggctcctatgagcacaggatctatctgcaacctggacggctggccaaacacttagaggtagatgtgtgggttatcgaaccacagggactgagatttcttcatgttcccgacacatttgaaggccatttcgatggtgttccggtcatttctaaaggacaacagaaggcgcacgtctccttcaagcccacggtagcacagcagagaatatgccctagctgccgggagactgcggtagatggggaactggtggtgctgtatgacgtgaaaagagaagagaaggctggtgaactggaggtgtttaatggatattttgtccacttctttgctcctgacaacctggacccaattcccaaaaacatcctctttgtcatcgatgtgagtggctccatgtggggagttaaaatgaaacaaactgtggaagcaatgaagaccatattggatgacctcagagcagaagaccatttctctgtgattgatttcaaccagaacattcgaacttggagaaatgatttaatttcagctacaaaaacacaggttgcagatagccaagaggtatattgagaaaatccagcccagtggaggcacaaacatcaacgaagcactcctacgggcaatcttcattttgaatgaagccaataacttgggactgttagaccccaactccgtctcgctgatcattttggtttctgatggagatccaacagtgggcgaactaaaactgtcaaaaattcagaaaaacgttaaggagaacatccaagacaatatctccttgttcagtttgggcatgggatttgatgtggactatgattttttgaagagactgtccaatgaaaaccatggaattgcacaaaggatttatggaaaccaggacacgtcttcccagcttaagaaattctacaaccaggtctccactccattgctccggaatgttcagttcaactatccccatacatcagtcacggacgtcactcaaaacaatttccataactactttggaggctcagagattgtggtggcaggaaaatttgaccctgctaaattggatcaaatagagagcgttatcacggcgacttcggctaacacgcagttagtcttggagaccctggcccagatggacgacttgcaggattttctatcgaaagacaagcatgcagatcccgatttcaccaggaaactgtgggcctatctaaccatcaaccaactgctagctgaacgaagcctggctcctacagctgccgccaagagaagaattacaagatcgatcctgcagatgtctctagaccaccacattgtgactccgctgacctcgctggtgatcgagaacgaggctggggatgagcgcatgctggcggatgccccaccgcaggatccctcctgctgctcaggggccctgtattacggcagcaaagtggttccagattccaccccgtcttgggccaatccttcaccaacgcccgtgatctccatgctggcacaaggatctcaggtgctagagtccacgccacccccacatgtgatgagagttgaaaatgacccacatttcatcatttatctaccaaaaagccaaaagaacatttgtttcaatattgactcagaacctggaaaaatcctcaacctggtttctgacccagaatcaggaattgtagtcaacggtcagcttgttggtgccaagaagcccaacaatggaaaactaagcacctattttggaaaactgggattttatttccaaagtgaagacataaaaatagaaatcagcactgagaccatcaccctgagccatggttctagcacattctccttgtcctggtccgacacggctcaagtcacgaatcagagggtgcagatctcagtgaagaaagaaaaagtggtaactatcaccctggataaagagatgtccttttctgttttacttcatcgtgtttggaagaagcatcccgtcaatgttgactttctgggaatctacataccccctacaaacaagttctcacctaaagcccacggactaataggccagttcatgcaggaaccaaagatacacatcttcaatgagagaccaggaaaggacccctgagaagccagaggccagcatggaagtgaaggggcagaagctgatcatcaccaggggcttacagaaagactacagaacggatctagtgtttggaacggacgttacctgctggtttgtgcacaacagtggaaaaggattcattgacgggcattacaaggattacttcgtgcctcagctctacagctttctcaaacggccttaaaggtttatagtttgggaaattatatatattaatatacatctttcccctgtcacttttgcagatattcttcggtttgaataattaaaatgaaccagatatcagggtggttaattaaaatgaaccagatatcagggtggtttataaagcctgtaaacacacctaagaaaataaacattttacaaatgaacaaatgaaaaaaaaaaaaaaaaaaaaactcgagttttttttttttttttttctcatttaacttttttaatgggtctcaaaattctgtgacaaatttttggtcaagttgtttccattaaaaagtactgattttaaaaactaataacttaaaactgccacacgcaaaaaagaaaaccaaagtggtccacaaaacattctcctttccttctgaaggttttacgatgcattgttatcattaaacagtcttttactactaaacttaaatggccaattgaaacacacagttctgagac

SEQ ID NO: 330842 - DNA, 3141 bp, Homo sapiens
atttgtcccaattttgaacaaagttagagagttttttcttcttttttcttctttcttaaagcgaactgtactcctctgctgttcctttgaacttggttcagtaggaagaagtgatatcctccccagaccatctgctttggggagcttggcaaaactgtccagcaaaatgaaaagactcacgtgctttttcatctgcttctttctttctgaagtatcaggcttcgaaatccccataaatggactttctgaatttgtagactatgaagatcttgtggaactggccccaggcaaatttcaattggtggcagagaaccggagatatcagagaagccttccaggagaatcggaagaaatgatggaagaggttgatcaagtaactctttatagctataaagtccagtctactattacttctcggatggccaccaccatgatccagagcaaagtggtgaacaattccccgcagcctcagaatgtcgtgtttgatgttcagatccccaaaggagcattcatttccaacttctccatgactgtggacggcaagacatttaggagctctattaaggagaaaactgtgggccgagctctttatgcacaggccagagcaaaaggcaagacggctggcttggtgaggagcagcgctcttgatatggaaaacttcagaacggaagtaaatgtcctcccaggagcaaaggtgcagttcgaacttcactaccaggaggtgaagtggaggaagctgggctcctatgagcacaggatctatctgcaacctggacggctggccaaacacttagaggtagatgtgtgggttatcgaaccacagggactgagatttcttcatgttcccgacacatttgaaggccatttcgatggtgttccggtcatttctaaaggacaacagaaggcgcacgtctccttcaagcccacggtagcacagcagagaatatgccctagctgccgggagactgcggtagatggggaactggtggtgctgtatgacgtgaaaagagaagagaaggctggtgaactggaggtgtttaatggatattttgtccacttctttgctcctgacaacctggacccaattcccaaaaacatcctctttgtcatcgatgtgagtggctccatgtggggagttaaaatgaaacaaactgtggaagcaatgaagaccatattggatgacctcagagcagaagaccatttctctgtgattgatttcaaccagaacattcgaacttggagaaatgatttaatttcagctacaaaaacacaggttgcagatagccaagaggtatattgagaaaatccagcccagtggaggcacaaacatcaacgaagcactcctacgggcaatcttcattttgaatgaagccaataacttgggactgttagaccccaactccgtctcgctgatcattttggtttctgatggagatccaacagtgggcgaactaaaactgtcaaaaattcagaaaaacgttaaggagaacatccaagacaatatctccttgttcagtttgggcatgggatttgatgtggactatgattttttgaagagactgtccaatgaaaaccatggaattgcacaaaggatttatggaaaccaggacacgtcttcccagcttaagaaattctacaaccaggtctccactccattgctccggaatgttcagttcaactatccccatacatcagtcacggacgtcactcaaaacaatttccataactactttggaggctcagagattgtggtggcaggaaaatttgaccctgctaaattggatcaaatagagagcgttatcacggcgacttcggctaacacgcagttagtcttggagaccctggcccagatggacgacttgcaggattttctatcgaaagacaagcatgcagatcccgatttcaccaggaaactgtgggcctatctaaccatcaaccaactgctagctgaacgaagcctggctcctacagctgccgccaagagaagaattacaagatcgatcctgcagatgtctctagaccaccacattgtgactccgctgacctcgctggtgatcgagaacgaggctggggatgagcgcatgctggcggatgccccaccgcaggatccctcctgctgctcaggggccctgtattacggcagcaaagtggttccagattccaccccgtcttgggccaatccttcaccaacgcccgtgatctccatgctggcacaaggatctcaggtgctagagtccacgccacccccacatgtgatgagagttgaaaatgacccacatttcatcatttatctaccaaaaagccaaaagaacatttgtttcaatattgactcagaacctggaaaaatcctcaacctggtttctgacccagaatcaggaattgtagtcaacggtcagcttgttggtgccaagaagcccaacaatggaaaactaagcacctattttggaaaactgggattttatttccaaagtgaagacataaaaatagaaatcagcactgagaccatcaccctgagccatggttctagcacattctccttgtcctggtccgacacggctcaagtcacgaatcagagggtgcagatctcagtgaagaaagaaaaagtggtaactatcaccctggataaagagatgtccttttctgttttacttcatcgtgtttggaagaagcatcccgtcaatgttgactttctgggaatctacataccccctacaaacaagttctcacctaaagcccacggactaataggccagttcatgcaggaaccaaagatacacatcttcaatgagagaccaggaaaggacccctgagaagccagaggccagcatggaagtgaaggggcagaagctgatcatcaccaggggcttacagaaagactacagaacggatctagtgtttggaacggacgttacctgctggtttgtgcacaacagtggaaaaggattcattgacgggcattacaaggattacttcgtgcctcagctctacagctttctcaaacggccttaaagtgcagatattcttcggtttgaataattaaaatgaaccagatatcagggtggttaattaaaatgaaccagatatcagggtggtttataaagcctgtaaacacacctaagaaaataaacattttacaaatga

SEQ ID NO: 330843 - DNA, 3143 bp, Homo sapiens
atttgtcccaattttgaacaaagttagagagttttttcttcttttttcttctttcttaaagcgaactgtactcctctgctgttcctttgaacttggttcagtaggaagaagtgatatcctccccagaccatctgctttggggagcttggcaaaactgtccagcaaaatgaaaagactcacgtgctttttcatctgcttctttctttctgaagtatcaggcttcgaaatccccataaatggactttctgaatttgtagactatgaagatcttgtggaactggccccaggcaaatttcaattggtggcagagaaccggagatatcagagaagccttccaggagaatcggaagaaatgatggaagaggttgatcaagtaactctttatagctataaagtccagtctactattacttctcggatggccaccaccatgatccagagcaaagtggtgaacaattccccgcagcctcagaatgtcgtgtttgatgttcagatccccaaaggagcattcatttccaacttctccatgactgtggacggcaagacatttaggagctctattaaggagaaaactgtgggccgagctctttatgcacaggccagagcaaaaggcaagacggctggcttggtgaggagcagcgctcttgatatggaaaacttcagaacggaagtaaatgtcctcccaggagcaaaggtgcagttcgaacttcactaccaggaggtgaagtggaggaagctgggctcctatgagcacaggatctatctgcaacctggacggctggccaaacacttagaggtagatgtgtgggttatcgaaccacagggactgagatttcttcatgttcccgacacatttgaaggccatttcgatggtgttccggtcatttctaaaggacaacagaaggcgcacgtctccttcaagcccacggtagcacagcagagaatatgccctagctgccgggagactgcggtagatggggaactggtggtgctgtatgacgtgaaaagagaagagaaggctggtgaactggaggtgtttaatggatattttgtccacttctttgctcctgacaacctggacccaattcccaaaaacatcctctttgtcatcgatgtgagtggctccatgtggggagttaaaatgaaacaaactgtggaagcaatgaagaccatattggatgacctcagagcagaagaccatttctctgtgattgatttcaaccagaacattcgaacttggagaaatgatttaatttcagctacaaaaacacaggttgcagatagccaagaggtatattgagaaaatccagcccagtggaggcacaaacatcaacgaagcactcctacgggcaatcttcattttgaatgaagccaataacttgggactgttagaccccaactccgtctcgctgatcattttggtttctgatggagatccaacagtgggcgaactaaaactgtcaaaaattcagaaaaacgttaaggagaacatccaagacaatatctccttgttcagtttgggcatgggatttgatgtggactatgattttttgaagagactgtccaatgaaaaccatggaattgcacaaaggatttatggaaaccaggacacgtcttcccagcttaagaaattctacaaccaggtctccactccattgctccggaatgttcagttcaactatccccatacatcagtcacggacgtcactcaaaacaatttccataactactttggaggctcagagattgtggtggcaggaaaatttgaccctgctaaattggatcaaatagagagcgttatcacggcgacttcggctaacacgcagttagtcttggagaccctggcccagatggacgacttgcaggattttctatcgaaagacaagcatgcagatcccgatttcaccaggaaactgtgggcctatctaaccatcaaccaactgctagctgaacgaagcctggctcctacagctgccgccaagagaagaattacaagatcgatcctgcagatgtctctagaccaccacattgtgactccgctgacctcgctggtgatcgagaacgaggctggggatgagcgcatgctggcggatgccccaccgcaggatccctcctgctgctcaggggccctgtattacggcagcaaagtggttccagattccaccccgtcttgggccaatccttcaccaacgcccgtgatctccatgctggcacaaggatctcaggtgctagagtccacgccacccccacatgtgatgagagttgaaaatgacccacatttcatcatttatctaccaaaaagccaaaagaacatttgtttcaatattgactcagaacctggaaaaatcctcaacctggtttctgacccagaatcaggaattgtagtcaacggtcagcttgttggtgccaagaagcccaacaatggaaaactaagcacctattttggaaaactgggattttatttccaaagtgaagacataaaaatagaaatcagcactgagaccatcaccctgagccatggttctagcacattctccttgtcctggtccgacacggctcaagtcacgaatcagagggtgcagatctcagtgaagaaagtcatcgtgtttggaagaagcatcccgtcaatgttgactttctgggaatctacataccccctacaaacaagttctcacctaaagcccacggactaataggccagttcatgcaggaaccaaagatacacatcttcaatgagagaccaggaaaggacccctgagaagccagaggccagcatggaagtgaaggggcagaagctgatcatcaccaggggcttacagaaagactacagaacggatctagtgtttggaacggacgttacctgctggtttgtgcacaacagtggaaaaggattcattgacgggcattacaaggattacttcgtgcctcagctctacagctttctcaaacggccttaaaggtttatagtttgggaaattatatatattaatatacatctttcccctgtcacttttgcagatattcttcggtttgaataattaaaatgaaccagatatcagggtggttaattaaaatgaaccagatatcagggtggtttataaagcctgtaaacacacctaagaaaataaacattttacaaatga

SEQ ID NO: 330844 - DNA, 3139 bp, Homo sapiens
atttgtcccaattttgaacaaagttagagagttttttcttcttttttcttctttcttaaagcgaactgtactcctctgctgttcctttgaacttggttcagtaggaagaagtgatatcctccccagaccatctgctttggggagcttggcaaaactgtccagcaaaatgaaaagactcacgtgctttttcatctgcttctttctttctgaagtatcaggcttcgaaatccccataaatggactttctgaatttgtagactatgaagatcttgtggaactggccccaggcaaatttcaattggtggcagagaaccggagatatcagagaagccttccaggagaatcggaagaaatgatggaagaggttgatcaagtaactctttatagctataaagtccagtctactattacttctcggatggccaccaccatgatccagagcaaagtggtgaacaattccccgcagcctcagaatgtcgtgtttgatgttcagatccccaaaggagcattcatttccaacttctccatgactgtggacggcaagacatttaggagctctattaaggagaaaactgtgggccgagctctttatgcacaggccagagcaaaaggcaagacggctggcttggtgaggagcagcgctcttgatatggaaaacttcagaacggaagtaaatgtcctcccaggagcaaaggtgcagttcgaacttcactaccaggaggtgaagtggaggaagctgggctcctatgagcacaggatctatctgcaacctggacggctggccaaacacttagaggtagatgtgtgggttatcgaaccacagggactgagatttcttcatgttcccgacacatttgaaggccatttcgatggtgttccggtcatttctaaaggacaacagaaggcgcacgtctccttcaagcccacggtagcacagcagagaatatgccctagctgccgggagactgcggtagatggggaactggtggtgctgtatgacgtgaaaagagaagagaaggctggtgaactggaggtgtttaatggatattttgtccacttctttgctcctgacaacctggacccaattcccaaaaacatcctctttgtcatcgatgtgagtggctccatgtggggagttaaaatgaaacaaactgtggaagcaatgaagaccatattggatgacctcagagcagaagaccatttctctgtgattgatttcaaccagaacattcgaacttggagaaatgatttaatttcagctacaaaaacacaggttgcagatagccaagaggtatattgagaaaatccagcccagtggaggcacaaacatcaacgaagcactcctacgggcaatcttcattttgaatgaagccaataacttgggactgttagaccccaactccgtctcgctgatcattttggtttctgatggagatccaacagtgggcgaactaaaactgtcaaaaattcagaaaaacgttaaggagaacatccaagacaatatctccttgttcagtttgggcatgggatttgatgtggactatgattttttgaagagactgtccaatgaaaaccatggaattgcacaaaggatttatggaaaccaggacacgtcttcccagcttaagaaattctacaaccaggtctccactccattgctccggaatgttcagttcaactatccccatacatcagtcacggacgtcactcaaaacaatttccataactactttggaggctcagagattgtggtggcaggaaaatttgaccctgctaaattggatcaaatagagagcgttatcacggcgacttcggctaacacgcagttagtcttggagaccctggcccagatggacgacttgcaggattttctatcgaaagacaagcatgcagatcccgatttcaccaggaaactgtgggcctatctaaccatcaaccaactgctagctgaacgaagcctggctcctacagctgccgccaagagaagaattacaagatcgatcctgcagatgtctctagaccaccacattgtgactccgctgacctcgctggtgatcgagaacgaggctggggatgagcgcatgctggcggatgccccaccgcaggatccctcctgctgctcaggggccctgtattacggcagcaaagtggttccagattccaccccgtcttgggccaatccttcaccaacgcccgtgatctccatgctggcacaaggatctcaggtgctagagtccacgccacccccacatgtgatgagagttgaaaatgacccacatttcatcatttatctaccaaaaagccaaaagaacatttgtttcaatattgactcagaacctggaaaaatcctcaacctggtttctgacccagaatcaggaattgtagtcaacggtcagcttgttggtgccaagaagcccaacaatggaaaactaagcacctattttggaaaactgggattttatttccaaagtgaagacataaaaatagaaatcagcactgagaccatcaccctgagccatggttctagcacattctccttgtcctggtccgacacggctcaagtcacgaatcagagggtgcagatctcagtgaagaaagaaaaagtggtaactatcaccctggataaagagatgtccttttctgttttacttcatcgtgtttggaagaagcatcccgtcaatgttgactttctgggaatctacataccccctacaaacaagttctcacctaaagcccacggactaataggccagttcatgcaggaaccaaagatacacatcttcaatgagagaccaggaaaggacccctgagaagccagaggccagcatggaagtgaaggggcagaagctgatcatcaccaggggcttacagaaagactacagaacggatctagtgtttggaacggacgttacctgctggtttgtgcacaacagtggaaaaggattcattgacgggcattacaaggattacttcgtgcctcagctctacagatctttcccctgtcacttttgcagatattcttcggtttgaataattaaaatgaaccagatatcagggtggttaattaaaatgaaccagatatcagggtggtttataaagcctgtaaacacacctaagaaaataaacattttacaaatga

SEQ ID NO: 330845 - DNA, 955 bp, Homo sapiens
atttgtcccaattttgaacaaagttagagagttttttcttcttttttcttctttcttaaagcgaactgtactcctctgctgttcctttgaacttggttcagtaggaagaagtgatatcctccccagaccatctgctttggggagcttggcaaaactgtccagcaaaatgaaaagactcacgtgctttttcatctgcttctttctttctgaagtatcaggcttcgaaatccccataaatggactttctgaatttgtagactatgaagatcttgtggaactggccccaggcaaatttcaattggtggcagagaaccggagatatcagagaagccttccaggagaatcggaagaaatgatggaagaggttgatcaagtaactctttatagctataaagtccagtctactattatcatcgtgtttggaagaagcatcccgtcaatgttgactttctgggaatctacataccccctacaaacaagttctcacctaaagcccacggactaataggccagttcatgcaggaaccaaagatacacatcttcaatgagagaccaggaaaggacccctgagaagccagaggccagcatggaagtgaaggggcagaagctgatcatcaccaggggcttacagaaagactacagaacggatctagtgtttggaacggacgttacctgctggtttgtgcacaacagtggaaaaggattcattgacgggcattacaaggattacttcgtgcctcagctctacagctttctcaaacggccttaaaggtttatagtttgggaaattatatatattaatatacatctttcccctgtcacttttgcagatattcttcggtttgaataattaaaatgaaccagatatcagggtggttaattaaaatgaaccagatatcagggtggtttataaagcctgtaaacacacctaagaaaataaacattttacaaatga

SEQ ID NO: 330846 - DNA, 569 bp, Homo sapiens
gtgaacaaatccaccagctgaaatccatactgactctatcgcagagtgagctccaaacgccatgattgtgtcctctgcgtagaagcttcccaatgagtttctgttaatccatcatttatctataaactgttgcaagcgcttagataactagcggaattgtctgggaggagtgaagagttcatattaggggtgagaagaatgactttctcaaaaggtctgttctggaatggtttaattcctcttggactttcacaccagggtgcagatctcagtgaagaaagaaaaagtggtaactatcaccctggataaagagatgtccttttctgttttacttcatcgtgtttggaagaagcatcccgtcaatgttgactttctgggaatctacataccccctacaaacaagttctcacctaaagcccacggactaataggtaaagtgtctattgaccatctgacaagggtggggccgctctaattctttagcagctttggttgacagtggttacaagttgaggacatggcaggtgtggactcatgagcacagaggactaacatagcagtgtggggtc

SEQ ID NO: 330847 - DNA, 517 bp, Homo sapiens
gtctgaaaccttgcaaacagcatggcaggctagagatgctccctgcaaaagccctggcatgtccttcccatcagtaatgggtccaccgatatcgcggggattcagaacgtccattgggcagctcctcttccctgtgtgctggagaaggggcagcgccaagcactgggaaggggctagaggcagaggctctgatgtcaccgttctttctaggcgcacgtctccttcaagcccacggtagcacagcagagaatatgccctagctgccgggagactgcggtagatggggaactggtggtgctgtatgacgtgaaaagagaagagaaggctggtgaactggaggtgagtgcacaccggctctggttctactgccaagctcgtgccaaagagctgctcctttttgaacaaactcccaggcctatgggtggtttctagctgccagggcaagtgtttctagctgcagagaagggactaaaatcatattctttgaatataccgctaagcattatcttttatgtat

SEQ ID NO: 330848 - DNA, 445 bp, Homo sapiens
cctggccaagatggtgaaaacccgtctctactaaaaatacaaaaattagccgggcttggtggcgggtgcccgtaatcccagctacttgtggggctgaggtgggataattgcttgaacccaggagccggagattgcagtgagacgagatcccaccactgcactccagcctgggcaacagagtgagacatcgtctcaaaataaataaataaataaaataaaatgctttagatctacaaagcagtaggaacataatttctctctctctctctgtgaattgtagaaattctacaaccaggtctccactccattgctccggaatgttcagttcaactatccccatacatcagtcacggacgtcactcaaaacaatttccataactactttggaggctcagagattgtggtggcaggaaaatttgaccctgctaaattggatcaaatagag

SEQ ID NO: 330849 - DNA, 731 bp, Homo sapiens
atttgtcccaattttgaacaaagttagagagttttttcttcttttttcttctttcttaaagcgaactgtactcctctgctgttcctttgaacttggttcagtaggaagaagtgatatcctccccagaccatctgctttggggagcttggcaaaactgtccagcaaaatgaaaagactcacgtgctttttcatctgcttctttctttctgaagtatcaggcttcgaaatccccataaatggactttctgaatttgtagactatgaagatcttgtggaactggccccaggcaaatttcaattggtggcagagaaccggagatatcagagaagccttccaggagaatcggaagaaatgatggaagaggttgatcaagtaactctttatagctataaagtccagtctactattacttctcggatggccaccaccatgatccagagcaaagtggtgaacaattccccgcagcctcagaatgtcgtgtttgatgttcagatccccaaaggagcattcatttccaacttctccatgactgtggacggcaagacatttaggagctctattaaggagaaaactgtgggccgagctctttatgcacaggccagagcaaaaggcaagacggctggcttggtgaggtaaggcctgagtgagcaaggcttgcccttgcctctcaatgacggtttcctctcctacttccttcccacagcagcaaagcagcctctggaaaggcaca

SEQ ID NO: 330850 - DNA, 3141 bp, Homo sapiens
atttgtcccaattttgaacaaagttagagagttttttcttcttttttcttctttcttaaagcgaactgtactcctctgctgttcctttgaacttggttcagtaggaagaagtgatatcctccccagaccatctgctttggggagcttggcaaaactgtccagcaaaatgaaaagactcacgtgctttttcatctgcttctttctttctgaagtatcaggcttcgaaatccccataaatggactttctgaatttgtagactatgaagatcttgtggaactggccccaggcaaatttcaattggtggcagagaaccggagatatcagagaagccttccaggagaatcggaagaaatgatggaagaggttgatcaagtaactctttatagctataaagtccagtctactattacttctcggatggccaccaccatgatccagagcaaagtggtgaacaattccccgcagcctcagaatgtcgtgtttgatgttcagatccccaaaggagcattcatttccaacttctccatgactgtggacggcaagacatttaggagctctattaaggagaaaactgtgggccgagctctttatgcacaggccagagcaaaaggcaagacggctggcttggtgaggagcagcgctcttgatatggaaaacttcagaacggaagtaaatgtcctcccaggagcaaaggtgcagttcgaacttcactaccaggaggtgaagtggaggaagctgggctcctatgagcacaggatctatctgcaacctggacggctggccaaacacttagaggtagatgtgtgggttatcgaaccacagggactgagatttcttcatgttcccgacacatttgaaggccatttcgatggtgttccggtcatttctaaaggacaacagaaggcgcacgtctccttcaagcccacggtagcacagcagagaatatgccctagctgccgggagactgcggtagatggggaactggtggtgctgtatgacgtgaaaagagaagagaaggctggtgaactggaggtgtttaatggatattttgtccacttctttgctcctgacaacctggacccaattcccaaaaacatcctctttgtcatcgatgtgagtggctccatgtggggagttaaaatgaaacaaactgtggaagcaatgaagaccatattggatgacctcagagcagaagaccatttctctgtgattgatttcaaccagaacattcgaacttggagaaatgatttaatttcagctacaaaaacacaggttgcagatagccaagaggtatattgagaaaatccagcccagtggaggcacaaacatcaacgaagcactcctacgggcaatcttcattttgaatgaagccaataacttgggactgttagaccccaactccgtctcgctgatcattttggtttctgatggagatccaacagtgggcgaactaaaactgtcaaaaattcagaaaaacgttaaggagaacatccaagacaatatctccttgttcagtttgggcatgggatttgatgtggactatgattttttgaagagactgtccaatgaaaaccatggaattgcacaaaggatttatggaaaccaggacacgtcttcccagcttaagaaattctacaaccaggtctccactccattgctccggaatgttcagttcaactatccccatacatcagtcacggacgtcactcaaaacaatttccataactactttggaggctcagagattgtggtggcaggagctaacacgcagttagtcttggagaccctggcccagatggacgacttgcaggattttctatcgaaagacaagcatgcagatcccgatttcaccaggaaactgtgggcctatctaaccatcaaccaactgctagctgaacgaagcctggctcctacagctgccgccaagagaagaattacaagatcgatcctgcagatgtctctagaccaccacattgtgactccgctgacctcgctggtgatcgagaacgaggctggggatgagcgcatgctggcggatgccccaccgcaggatccctcctgctgctcaggggccctgtattacggcagcaaagtggttccagattccaccccgtcttgggccaatccttcaccaacgcccgtgatctccatgctggcacaaggatctcaggtgctagagtccacgccacccccacatgtgatgagagttgaaaatgacccacatttcatcatttatctaccaaaaagccaaaagaacatttgtttcaatattgactcagaacctggaaaaatcctcaacctggtttctgacccagaatcaggaattgtagtcaacggtcagcttgttggtgccaagaagcccaacaatggaaaactaagcacctattttggaaaactgggattttatttccaaagtgaagacataaaaatagaaatcagcactgagaccatcaccctgagccatggttctagcacattctccttgtcctggtccgacacggctcaagtcacgaatcagagggtgcagatctcagtgaagaaagaaaaagtggtaactatcaccctggataaagagatgtccttttctgttttacttcatcgtgtttggaagaagcatcccgtcaatgttgactttctgggaatctacataccccctacaaacaagttctcacctaaagcccacggactaataggccagttcatgcaggaaccaaagatacacatcttcaatgagagaccaggaaaggacccctgagaagccagaggccagcatggaagtgaaggggcagaagctgatcatcaccaggggcttacagaaagactacagaacggatctagtgtttggaacggacgttacctgctggtttgtgcacaacagtggaaaaggattcattgacgggcattacaaggattacttcgtgcctcagctctacagctttctcaaacggccttaaaggtttatagtttgggaaattatatatattaatatacatctttcccctgtcacttttgcagatattcttcggtttgaataattaaaatgaaccagatatcagggtggttaattaaaatgaaccagatatcagggtggtttataaagcctgtaaacacacctaagaaaataaacattttacaaatga

SEQ ID NO: 330851 - DNA, 3068 bp, Homo sapiens
atttgtcccaattttgaacaaagttagagagttttttcttcttttttcttctttcttaaagcgaactgtactcctctgctgttcctttgaacttggttcagtaggaagaagtgatatcctccccagaccatctgctttggggagcttggcaaaactgtccagcaaaatgaaaagactcacgtgctttttcatctgcttctttctttctgaagtatcaggcttcgaaatccccataaatggactttctgaatttgtagactatgaagatcttgtggaactggccccaggcaaatttcaattggtggcagagaaccggagatatcagagaagccttccaggagaatcggaagaaatgatggaagaggttgatcaagtaactctttatagctataaagtccagtctactattacttctcggatggccaccaccatgatccagagcaaagtggtgaacaattccccgcagcctcagaatgtcgtgtttgatgttcagatccccaaaggagcattcatttccaacttctccatgactgtggacggcaagacatttaggagctctattaaggagaaaactgtgggccgagctctttatgcacaggccagagcaaaaggcaagacggctggcttggtgaggagcagcgctcttgatatggaaaacttcagaacggaagtaaatgtcctcccaggagcaaaggtgcagttcgaacttcactaccaggaggtgaagtggaggaagctgggctcctatgagcacaggatctatctgcaacctggacggctggccaaacacttagaggtagatgtgtgggttatcgaaccacagggactgagatttcttcatgttcccgacacatttgaaggccatttcgatggtgttccggtcatttctaaaggacaacagaaggcgcacgtctccttcaagcccacggtagcacagcagagaatatgccctagctgccgggagactgcggtagatggggaactggtggtgctgtatgacgtgaaaagagaagagaaggctggtgaactggaggtgtttaatggatattttgtccacttctttgctcctgacaacctggacccaattcccaaaaacatcctctttgtcatcgatgtgagtggctccatgtggggagttaaaatgaaacaaactgtggaagcaatgaagaccatattggatgacctcagagcagaagaccatttctctgtgattgatttcaaccagaacattcgaacttggagaaatgatttaatttcagctacaaaaacacaggttgcagatagccaagaggtatattgagaaaatccagcccagtggaggcacaaacatcaacgaagcactcctacgggcaatcttcattttgaatgaagccaataacttgggactgttagaccccaactccgtctcgctgatcattttggtttctgatggagatccaacagtgggcgaactaaaactgtcaaaaattcagaaaaacgttaaggagaacatccaagacaatatctccttgttcagtttgggcatgggatttgatgtggactatgattttttgaagagactgtccaatgaaaaccatggaattgcacaaaggatttatggaaaccaggacacgtcttcccagcttaagaaattctacaaccaggtctccactccattgctccggaatgttcagttcaactatccccatacatcagtcacggacgtcactcaaaacaatttccataactactttggaggctcagagattgtggtggcaggaaaatttgaccctgctaaattggatcaaatagagagcgttatcacggcgacttcggctaacacgcagttagtcttggagaccctggcccagatggacgacttgcaggattttctatcgaaagacaagcatgcagatcccgatttcaccaggaaactgtgggcctatctaaccatcaaccaactgctagctgaacgaagcctggctcctacagctgccgccaagagaagaattacaagatcgatcctgcagatgtctctagaccaccacattgtgactccgctgacctcgctggtgatcgagaacgaggctggggatgagcgcatgctggcggatgccccaccgcaggatccctcctgctgctcaggggccctgtattacggcagcaaagtggttccagattccaccccgtcttgggccaatccttcaccaacgcccgtgatctccatgctggcacaaggatctcaggtgctagagtccacgccacccccacatgtgatgagagttgaaaatgacccacatttcatcatttatctaccaaaaagccaaaagaacatttgtttcaatattgactcagaacctggaaaaatcctcaacctggtttctgacccagaatcaggaattgtagtcaacggtcagcttgttggtgccaagaagcccaacaatggaaaactaagcacctattttggaaaactgggattttatttccaaagtgaagacataaaaatagaaatcagcactgagaccatcaccctgagccatggttctagcacattctccttgtcctggtccgacacggctcaagtcacgaatcagaggcaagtatgattccatctgaacttgggcctgtccgtgacacacgactgcataaataaatccaggcatcagtgacatcaacattgaaaaaaaatcatcattttaaatataaggaagttgaggttcagaaaaattgttctcactccctactctgttcctggcagtgggcactgtgtgtttttggtcaccgttgggtcccaggacctagtccagtgcctggcatcagtaaacactcactgtgtatgtgctaatcagtgaacaaatccaccagctgaaatccatactgactctatcgcagagtgagctccaaacgccatgattgtgtcctctgcgtagaagcttcccaatgagtttctgttaatccatcatttatctataaactgttgcaagcgcttagataactagcggaattgtctgggaggagtgaagagttcatattaggggtgagaagaatgactttctcaaaaggtctgttctggaatggtttaattcctc

SEQ ID NO: 330852 - DNA, 2556 bp, Homo sapiens
atttgtcccaattttgaacaaagttagagagttttttcttcttttttcttctttcttaaagcgaactgtactcctctgctgttcctttgaacttggttcagtaggaagaagtgatatcctccccagaccatctgctttggggagcttggcaaaactgtccagcaaaatgaaaagactcacgtgctttttcatctgcttctttctttctgaagtatcaggcttcgaaatccccataaatggactttctgaatttgtagactatgaagatcttgtggaactggccccaggcaaatttcaattggtggcagagaaccggagatatcagagaagccttccaggagaatcggaagaaatgatggaagaggttgatcaagtaactctttatagctataaagtccagtctactattacttctcggatggccaccaccatgatccagagcaaagtggtgaacaattccccgcagcctcagaatgtcgtgtttgatgttcagatccccaaaggagcattcatttccaacttctccatgactgtggacggcaagacatttaggagctctattaaggagaaaactgtgggccgagctctttatgcacaggccagagcaaaaggcaagacggctggcttggtgaggagcagcgctcttgatatggaaaacttcagaacggaagtaaatgtcctcccaggagcaaaggtgcagttcgaacttcactaccaggaggtgaagtggaggaagctgggctcctatgagcacaggatctatctgcaacctggacggctggccaaacacttagaggtagatgtgtgggttatcgaaccacagggactgagatttcttcatgttcccgacacatttgaaggccatttcgatggtgttccggtcatttctaaaggacaacagaaggcgcacgtctccttcaagcccacggtagcacagcagagaatatgccctagctgccgggagactgcggtagatggggaactggtggtgctgtatgacgtgaaaagagaagagaaggctggtgaactggaggtgtttaatggatattttgtccacttctttgctcctgacaacctggacccaattcccaaaaacatcctctttgtcatcgatgtgagtggctccatgtggggagttaaaatgaaacaaactgtggaagcaatgaagaccatattggatgacctcagagcagaagaccatttctctgtgattgatttcaaccagaacattcgaacttggagaaatgatttaatttcagctacaaaaacacaggttgcagatagccaagaggtatattgagaaaatccagcccagtggaggcacaaacatcaacgaagcactcctacgggcaatcttcattttgaatgaagccaataacttgggactgttagaccccaactccgtctcgctgatcattttggtttctgatggagatccaacagtgggcgaactaaaactgtcaaaaattcagaaaaacgttaaggagaacatccaagacaatatctccttgttcagtttgggcatgggatttgatgtggactatgattttttgaagagactgtccaatgaaaaccatggaattgcacaaaggatttatggaaaccaggacacgtcttcccagcttaagaaattctacaaccaggtctccactccattgctccggaatgttcagttcaactatccccatacatcagtcacggacgtcactcaaaacaatttccataactactttggaggctcagagattgtggtggcaggaaaatttgaccctgctaaattggatcaaatagagagcgttatcacggcgacttcggctaacacgcagttagtcttggagaccctggcccagatggacgacttgcaggattttctatcgaaagacaagcatgcagatcccgatttcaccaggaaactgtgggcctatctaaccatcaaccaactgctagctgaacgaagcctggctcctacagctgccgccaagagaagaattacaagatcgatcctgcagatgtctctagaccaccacattgtgactccgctgacctcgctggtgatcgagaacgaggctggggatgagcgcatgctggcggatgccccaccgcaggatccctcctgctgctcaggggccctgtattacggcagcaaagtggttccagattccaccccgtcttgggccaatccttcaccaacgcccgtgatctccatgctggcacaaggatctcaggtgctagagtccacgccacccccacatgtgatgagagttgaaaatgacccacatttcatcatttatctaccaaaaagccaaaagaacatttgtttcaatattgactcagaacctggaaaaatcctcaacctggtttctgacccagaatcaggtaaaataaaaataaattatatttgcaccaattaggtcattgtcatgctttcctgtcactgcctgggatttctttctttctcagcttaatagaagttctatatatttcagtgatattagtgagaaattaaattataaatatattcttaactattttgaaccattatagttcaaaatatat

SEQ ID NO: 330853 - DNA, 2020 bp, Homo sapiens
  misc_feature (1999)..(1999): n is a, c, g, or t
atttgtcccaattttgaacaaagttagagagttttttcttcttttttcttctttcttaaagcgaactgtactcctctgctgttcctttgaacttggttcagtaggaagaagtgatatcctccccagaccatctgctttggggagcttggcaaaactgtccagcaaaatgaaaagactcacgtgctttttcatctgcttctttctttctgaagtatcaggcttcgaaatccccataaatggactttctgaatttgtagactatgaagatcttgtggaactggccccaggcaaatttcaattggtggcagagaaccggagatatcagagaagccttccaggagaatcggaagaaatgatggaagaggttgatcaagtaactctttatagctataaagtccagtctactattacttctcggatggccaccaccatgatccagagcaaagtggtgaacaattccccgcagcctcagaatgtcgtgtttgatgttcagatccccaaaggagcattcatttccaacttctccatgactgtggacggcaagacatttaggagctctattaaggagaaaactgtgggccgagctctttatgcacaggccagagcaaaaggcaagacggctggcttggtgaggagcagcgctcttgatatggaaaacttcagaacggaagtaaatgtcctcccaggagcaaaggtgcagttcgaacttcactaccaggaggtgaagtggaggaagctgggctcctatgagcacaggatctatctgcaacctggacggctggccaaacacttagaggtagatgtgtgggttatcgaaccacagggactgagatttcttcatgttcccgacacatttgaaggccatttcgatggtgttccggtcatttctaaaggacaacagaaggcgcacgtctccttcaagcccacggtagcacagcagagaatatgccctagctgccgggagactgcggtagatggggaactggtggtgctgtatgacgtgaaaagagaagagaaggctggtgaactggaggtgtttaatggatattttgtccacttctttgctcctgacaacctggacccaattcccaaaaacatcctctttgtcatcgatgtgagtggctccatgtggggagttaaaatgaaacaaactgtggaagcaatgaagaccatattggatgacctcagagcagaagaccatttctctgtgattgatttcaaccagaacattcgaacttggagaaatgatttaatttcagctacaaaaacacaggttgcagatagccaagaggtatattgagaaaatccagcccagtggaggcacaaacatcaacgaagcactcctacgggcaatcttcattttgaatgaagccaataacttgggactgttagaccccaactccgtctcgctgatcattttggtttctgatggagatccaacagtgggcgaactaaaactgtcaaaaattcagaaaaacgttaaggagaacatccaagacaatatctccttgttcagtttgggcatgggatttgatgtggactatgattttttgaagagactgtccaatgaaaaccatggaattgcacaaaggatttatggaaaccaggacacgtcttcccagcttaagaaattctacaaccaggtctccactccattgctccggaatgttcagttcaactatccccatacatcagtcacggacgtcactcaaaacaatttccataactactttggaggctcagagattgtggtggcaggaaaatttgaccctgctaaattggatcaaatagagagcgttatcacggcgacttcggctaacacgcagttagtcttggagaccctggcccagatggacgacttgcaggattttctatcgaaagacaagcatgcagatcccgatttcaccaggaaactgtgggcctatctaaccatcaaccaactgctagctgaacgtgcttctgtctcgactgcactttgagaaggatgcagactcatctnagcgtatcattgctcccatgc

SEQ ID NO: 330854 - DNA, 2735 bp, Homo sapiens
  misc_feature (799)..(799): n is a, c, g, or t
  misc_feature (1232)..(1232): n is a, c, g, or t
  misc_feature (1393)..(1393): n is a, c, g, or t
tttacaccaaggactaaaaaaagataggaaaaacttgttggagacccgattgcacatcactggcagagaactgaggtccaaaatagctgaaacctttggacttcaagaaaattatatcaaaattgtcataaataagaagcaactacaactagtagctgggatcacaggtgcacatcaccacaggtgcacatcaccatgcccagataatttttttgtatttgttgtagagatgaggtttcactatgttgcccatgctagtctcaaactcctgggctcaagtgatccacccaccacagcctctcaaagtgctgggattacaggtgtgagccaccgcacccagcctcccttctgcatttattgctggaattctgaaaaatttgtttttgctcatcagttattttatatgtggaggtacaatttgtataggaaagttagaataaaatactttgtttctttctccttattttcttgttttcagaataaatgagttgcttcactatcaccctccaaaggtgaccaaagaggtttctttttcttttcattttcttaagtgtcattattaactcatggatttaaaacatttgatgtgtttcaaacttcagtgcttaaattggtcatgctggctggcaggcagcccatgtttttttgacctgaccctgctagtctttgcagtctctgatttctggaatccaaagatactccaggctcatcttgggcatttaatgcccagaccaggaatcagcaatttcccaaggagtcctggttcctcttcatgggaaacggtactaagagactatgntgcagacatattcaacatttgaaaagtagacttgattttttgaaaatggtcaaaagttaacaaatttagtgttaacttcttttctgttttggtgcattcccaagataatactgtatactcccagaagatgaatgcaaatatttatagttttccattggtcagtgcctttgggttctaagtgaacaagtcccaactttaacgtacacaaaaaaggaattgggaggggaggggccgggctgggaatagtgagaatgagggctggtttgtgcttctggggtctctgtctctgcctctttctggatgtcagtttcattctcttctgcaaacagtgtagggtaaacaggctttaaattaggtcctaaaagtttaggtaaatttttcattcccttccatagttgtttctaattttttattatggaaaatttcaaatagncataaaaataaaaattagtataatgagcttccatatacactcataactaagcttctgcagttataaagacatggttgatcttcatacatctgtgtgagcctccctcaatctttttatcctggacaaatccttgaaataatttttaggtctcagggaaccantgaatacaaatttggctacatcttcagttcatgatacattaacatgtccggtaagtggtaggtataataatgaaataataattaacaatgtctttctaagtagagaaagtttttttttcctgggcatctatttatcctgggcatctatttatcctggccaacttgtagcatatttttgtgtgtgtgtgatttctctcttttcataaaggaaatcagcagtaatgtaagccaaatagaatgcagatggaggaaacttcagtttttccatttccttttccatttgacttttcccccttacttctccaagtaagctagaagttttgtcacaacttcctaccatatgtcttggagtatggtatgtagtatgaccaagaatagtttctttccccaaattgtatgaaacagtgacttcctggcagtgcagaacggtgaccctgaggtagggaaacatgaggggagctcagtgtctggagaagtttcaggttacggggcagggagggcaaacccaggcagagccttgtgctccctggagttaaagagatggagctgggcttgcaggaggccaaggaggtgagaggagcaagctgccagagagagggtgtcagagagcttcagaggagcccttttgagtcttctgctcagtaatgatcagcacatgtgtgtgaggaaaccgcccagggctgggcaaggtaccacatgaaagaagcagggaataatcctccgagttcatagaaggccaggaatagtttatgttcccaccagccagagtggaggatttggtagtcacagggcgtcaaatagagtcttcagaagggtgttgcctcagcactagggcataatttggtttcacttaataaagcttaaaagctactcctgaacagtacccttaacttaccgttttcaaataagtgcatccctaacaaaactcaataatttagcaattcaaaaatatccagcatccactgaaaaattagcaggcatgcaaagaaacaagcaaatgtaacctataacaagcaaaaaaatcagtcagtagcaacagatccagaagtgacacagaagatagaattagtagacaaggacattaaaacagtgactgtaatccatctgctgaagaaggcagaggaacaactgaacatgtcagataaagacatgggagacattcaaaagacccacattagaatgtaagagatgaaaagtacaacatccaagatgaaaagtacattaggtgggatgaactgcagaatagacactatagaagagaagattagttaaatgttacataaggcaatagaaactatctgaaaaaacagagaaaaggctaaaaaaaaaaaaaaatgaacag

SEQ ID NO: 330855 - DNA, 3259 bp, Homo sapiens
ccggaatgaaaacaaacggcggccgctgccgcatccgggcactctgctggtcgcggcgggagtggcgtggcgcagggatggcacaaaagaaatatcttcaagcaaaattgacccagtttttaagggaagacaggattcaactttggaaacctccatatacagatgaaaataaaaaagttggtttggcattaaaggaccttgctaagcagtactctgacagactagaatgctgtgaaaatgaagtagaaaaggtaatagaagaaatacgttgcaaggcaattgagcgtggaacaggaaatgacaattatagaacaacgggaattgctacaatcgaggtgtttttaccaccaagactaaaaaaagataggaaaaacttgttggagacccgattgcacatcactggcagagaactgaggtccaaaatagctgaaacctttggacttcaagaaaattatatcaaaattgtcataaataagaagcaactacaactagggaaaacccttgaagaacaaggcgtggctcacaatgtgaaagcgatggtgcttgaactaaaacaatctgaagaggacgcgaggaaaaacttccagttagaggaagaggagcaaaatgaggccaaactcaaagaaaaacaaattcagaggaccaagagaggactagaaatactggcaaagagagcagcagagacagtggtggatccagaaatgacaccgtacttagacatagctaaccagacaggcagatcaatcagaattcccccatcagaaagaaaagcccttatgttagctatgggatatcatgagaagggcagagctttcctgaaaagaaaagaatatggaatagccttgccatgtctgttggacgctgacaaatatttctgtgagtgttgcagagagctgctggacacagtggataactatgccgtcctccagctggatatagtgtggtgttacttccgcctggaacagctggaatgccttgatgatgcagaaaaaaaattaaacttggcccagaaatgctttaaaaattgttacggagaaaatcatcagagactggtccacataaaaggaaattgtgggaaagagaaggtactgtttctaagactctacttacttcaagggatccgaaactatcacagtggaaatgatgtagaggcttatgagtatcttaacaaggcacgtcagctctttaaagagctatatattgatccatcaaaagtggacaatttgttgcagttggggtttactgcccaggaagcccggcttggcctgagggcgtgtgatgggaacgtggatcatgcggccactcatattaccaaccgcagagaggaactggcccaaataaggaaggaggaaaaagagaagaaaagacgccgcctcgagaacatcaggtttctgaaagggatgggctactccacgcacgcggcccagcagattctgctcagcaatcctcagatgtggtggttaaatgattccaatcctgaaaccgacaaccgtcaagaaagtccttcccaggaaaacattgaccgattggtgtacatgggttttgatgcactcgtggccgaagctgcgctgagagtgttcagaggcaacgtccagctggccgcccagacccttgctcacaacggaggaagcctgcctcccgagctgccgctgtcgccagaagactctttgtccccgccagccacgtccccttctgactccgcaggaacctctagtgcctcaacagacgaagacatggagacagaggccgtcaatgagatactggaagacattccagagcatgaggaagactatcttgactcaactctggaagatgaagaaattattattgcagagtacctatcctatgtagaaaataggaagtcagcaacaaagaaaaactaaataatgaacagaaatagcgctaattttctgcttataaatgctatcattatgaaaaggctaatgcagctctttctgttcttactttttatctgaattacaagtcctctttgggtgtaggagggggtgggcaggggacaagtccaggaggggtcccagggccttcatgcatggtctcggggaagaagcttcctctggcctggcgcaggccgttccatctgcctcccaggtctgcgtccctaaccccttccccagcttggtgttttaccccgaaacaggaaggaacaggggtcctgtagaacaggggtcctggggaaggtgtccagggcagggtcctgggaagggtgtcccgactgcttcctctccagctgtggctccatctgcccagcttgcctgcctcctgcacccactgccctgaccttcctgcttcccacgctgccatctctgccagggtgccacatgggttcctgtgccaccctttccccgcccctcaaatcgtcctttaagtcttccttccaagtgctgtggggcataacgatgaggcgctggccttgggggccacaccaggtcgcagcaaatggcttcagcctgggacgccagtgttttatgctcttagttcagtaaaatacgcccccgaaattcaagattgagtgtcaggctttatatatattcagcattcctcattacagaaatcttctattgaatgggaaaggtttaaatgctaaccaaagcaatttatttttaattaatatttttagactctgtgctgtcatactgaactcactgctagctaagagacctatcagagatttagatatattttctccaggttttttgtgggttttctttgttgttgttgttgttctagccatgtgacagaggctctttctaaaagtatgtagttcgctgtgtgtcggctccagcagtaaccgtcctcactgcgccacgcactcctctgtagatgtgtgcccagtgggagttccttccagccccaggaccgcagcagcagccaggtgccgagtggattgagtgccaggtgcatccaagactttccctcccttccagaaggcactgactgaagacaggatggatcatgcggagccggctgaaatgctccaactttttcaaagtgtgggtggtccagtttggactgatgggaatcttcttgtcattctttttaaacggatgataccgatggaaataaaaggatgtctgtttccactgagttttgtgaggagatgatggaaggatgatctcagaagcagagggcatctgctgtgaaagatgccgcacgccaagcggggctggggtgcatcctgggcaggggactgaaatgtacctgtcagggtttgcctcagaagtgcctggtgagctgaggt

SEQ ID NO: 330856 - DNA, 3412 bp, Homo sapiens
ccggaatgaaaacaaacggcggccgctgccgcatccgggcactctgctggtcgcggcgggagtggcgtggcgcagggatggcacaaaagaaatatcttcaagcaaaattgacccagtttttaagggaagacaggattcaactttggaaacctccatatacagatgaaaataaaaaagttggtttggcattaaaggaccttgctaagcagtactctgacagactagaatgctgtgaaaatgaagtagaaaaggtaatagaagaaatacgttgcaaggcaattgagcgtggaacaggaaatgacaattatagaacaacgggaattgctacaatcgaggtgtttttaccaccaagactaaaaaaagataggaaaaacttgttggagacccgattgcacatcactggcagagaactgaggtccaaaatagctgaaacctttggacttcaagaaaattatatcaaaattgtcataaataagaagcaactacaactagggaaaacccttgaagaacaaggcgtggctcacaatgtgaaagcgatggtgcttgaactaaaacaatctgaagaggacgcgaggaaaaacttccagttagaggaagaggagcaaaatgaggccaaactcaaagaaaaacaaattcagaggaccaagagaggactagaaatactggcaaagagagcagcagagacagtggtggatccagaaatgacaccgtacttagacatagctaaccagacaggcagatcaatcagaattcccccatcagaaagaaaagcccttatgttagctatgggatatcatgagaagggcagagctttcctgaaaagaaaagaatatggaatagccttgccatgtctgttggacgctgacaaatatttctgtgagtgttgcagagagctgctggacacagtggataactatgccgtcctccagctggatatagtgtggtgttacttccgcctggaacagctggaatgccttgatgatgcagaaaaaaaattaaacttggcccagaaatgctttaaaaattgttacggagaaaatcatcagagactggtccacataaaaggaaattgtgggaaagagaaggtactgtttctaagactctacttacttcaagggatccgaaactatcacagtggaaatgatgtagaggcttatgagtatcttaacaaggcacgtcagctctttaaagagctatatattgatccatcaaaagtggacaatttgttgcagttggggtttactgcccaggaagcccggcttggcctgagggcgtgtgatgggaacgtggatcatgcggccactcatattaccaaccgcagagaggaactggcccaaataaggaaggaggaaaaagagaagaaaagacgccgcctcgagaacatcaggtttctgaaagggatgggctactccacgcacgcggcccagcaggtactccacgcagccagcgggaacttggatgaggccctgaagattctgctcagcaatcctcagatgtggtggttaaatgattccaatcctgaaaccgacaaccgtcaagaaagtccttcccaggaaaacattgaccgattggtgtacatgggttttgatgcactcgtggccgaagctgcgctgagagtgttcagaggcaacgtccagctggccgcccagacccttgctcacaacggaggaagcctgcctcccgagctgccgctgtcgccagaagactctttgtccccgccagccacgtccccttctgactccgcaggaacctctagtgcctcaacagacgaagacatggagacagaggccgtcaatgagatactggaagacattccagagcatgaggaagactatcttgactcaactctggaagatgaagaaattattattgcagagtacctatcctatgtagaaaataggaagtcagcaacaaagaaaaactaaataatgaacagaaatagcgctaattttctgcttataaatgctatcattatgaaaaggctaatgcagctctttctgttcttactttttatctgaattacaagtcctctttgggtgtaggagggggtgggcaggggacaagtccaggaggggtcccagggccttcatgcatggtctcggggaagaagcttcctctggcctggcgcaggccgttccatctgcctcccaggtctgcgtccctaaccccttccccagcttggtgttttaccccgaaacaggaaggaacaggggtcctgtagaacaggggtcctggggaaggtgtccagggcagggtcctgggaagggtgtcccgactgcttcctctccagctgtggctccatctgcccagcttgcctgcctcctgcacccactgccctgaccttcctgcttcccacgctgccatctctgccagggtgccacatgggttcctgtgccaccctttccccgcccctcaaatcgtcctttaagtcttccttccaagtgctgtggggcataacgatgaggcgctggccttgggggccacaccaggtcgcagcaaatggcttcagcctgggacgccagtgttttatgctcttagttcagtaaaatacgcccccgaaattcaagattgagtgtcaggctttatatatattcagcattcctcattacagaaatcttctattgaatgggaaaggtttaaatgctaaccaaagcaatttatttttaattaatatttttagactctgtgctgtcatactgaactcactgctagctaagagacctatcagagatttagatatattttctccaggttttttgtgggttttctttgttgttgttgttgttctagccatgtgacagaggctctttctaaaagtatgtagttcgctgtgtgtcggctccagcagtaaccgtcctcactgcgccacgcactcctctgtagatgtgtgcccagtgggagttccttccagccccaggaccgcagcagcagccaggtgccgagtggattgagtgccaggtgcatccaagactttccctcccttccagaaggcactgactgaagacaggatggatcatgcggagccggctgaaatgctccaactttttcaaagtgtgggtggtccagtttggactgatgggaatcttcttgtcattctttttaaacggatgataccgatggaaataaaaggtgggaaatatattcaaaaattgtcaccctaattttgcattaatttactcagcctccccagctgtaggtgttgaaagtgtctgggtgactagctcttcattttgattgcaggatgtctgtttccactgagttttgtgaggagatgatggaaggatgatctcagaagcagagggcatctgctgtgaaagatgccgcacgccaagcggggctggggtgcatcctgggcaggggactgaaatgtacctgtcagggtttgcctcagaagtgcctggtgagctgaggt

SEQ ID NO: 330857 - DNA, 3202 bp, Homo sapiens
ccggaatgaaaacaaacggcggccgctgccgcatccgggcactctgctggtcgcggcgggagtggcgtggcgcagggatggcacaaaagaaatatcttcaagcaaaattgacccagtttttaagggaagacaggattcaactttggaaacctccatatacagatgaaaataaaaaagttggtttggcattaaaggataggaaaaacttgttggagacccgattgcacatcactggcagagaactgaggtccaaaatagctgaaacctttggacttcaagaaaattatatcaaaattgtcataaataagaagcaactacaactagggaaaacccttgaagaacaaggcgtggctcacaatgtgaaagcgatggtgcttgaactaaaacaatctgaagaggacgcgaggaaaaacttccagttagaggaagaggagcaaaatgaggccaaactcaaagaaaaacaaattcagaggaccaagagaggactagaaatactggcaaagagagcagcagagacagtggtggatccagaaatgacaccgtacttagacatagctaaccagacaggcagatcaatcagaattcccccatcagaaagaaaagcccttatgttagctatgggatatcatgagaagggcagagctttcctgaaaagaaaagaatatggaatagccttgccatgtctgttggacgctgacaaatatttctgtgagtgttgcagagagctgctggacacagtggataactatgccgtcctccagctggatatagtgtggtgttacttccgcctggaacagctggaatgccttgatgatgcagaaaaaaaattaaacttggcccagaaatgctttaaaaattgttacggagaaaatcatcagagactggtccacataaaaggaaattgtgggaaagagaaggtactgtttctaagactctacttacttcaagggatccgaaactatcacagtggaaatgatgtagaggcttatgagtatcttaacaaggcacgtcagctctttaaagagctatatattgatccatcaaaagtggacaatttgttgcagttggggtttactgcccaggaagcccggcttggcctgagggcgtgtgatgggaacgtggatcatgcggccactcatattaccaaccgcagagaggaactggcccaaataaggaaggaggaaaaagagaagaaaagacgccgcctcgagaacatcaggtttctgaaagggatgggctactccacgcacgcggcccagcagattctgctcagcaatcctcagatgtggtggttaaatgattccaatcctgaaaccgacaaccgtcaagaaagtccttcccaggaaaacattgaccgattggtgtacatgggttttgatgcactcgtggccgaagctgcgctgagagtgttcagaggcaacgtccagctggccgcccagacccttgctcacaacggaggaagcctgcctcccgagctgccgctgtcgccagaagactctttgtccccgccagccacgtccccttctgactccgcaggaacctctagtgcctcaacagacgaagacatggagacagaggccgtcaatgagatactggaagacattccagagcatgaggaagactatcttgactcaactctggaagatgaagaaattattattgcagagtacctatcctatgtagaaaataggaagtcagcaacaaagaaaaactaaataatgaacagaaatagcgctaattttctgcttataaatgctatcattatgaaaaggctaatgcagctctttctgttcttactttttatctgaattacaagtcctctttgggtgtaggagggggtgggcaggggacaagtccaggaggggtcccagggccttcatgcatggtctcggggaagaagcttcctctggcctggcgcaggccgttccatctgcctcccaggtctgcgtccctaaccccttccccagcttggtgttttaccccgaaacaggaaggaacaggggtcctgtagaacaggggtcctggggaaggtgtccagggcagggtcctgggaagggtgtcccgactgcttcctctccagctgtggctccatctgcccagcttgcctgcctcctgcacccactgccctgaccttcctgcttcccacgctgccatctctgccagggtgccacatgggttcctgtgccaccctttccccgcccctcaaatcgtcctttaagtcttccttccaagtgctgtggggcataacgatgaggcgctggccttgggggccacaccaggtcgcagcaaatggcttcagcctgggacgccagtgttttatgctcttagttcagtaaaatacgcccccgaaattcaagattgagtgtcaggctttatatatattcagcattcctcattacagaaatcttctattgaatgggaaaggtttaaatgctaaccaaagcaatttatttttaattaatatttttagactctgtgctgtcatactgaactcactgctagctaagagacctatcagagatttagatatattttctccaggttttttgtgggttttctttgttgttgttgttgttctagccatgtgacagaggctctttctaaaagtatgtagttcgctgtgtgtcggctccagcagtaaccgtcctcactgcgccacgcactcctctgtagatgtgtgcccagtgggagttccttccagccccaggaccgcagcagcagccaggtgccgagtggattgagtgccaggtgcatccaagactttccctcccttccagaaggcactgactgaagacaggatggatcatgcggagccggctgaaatgctccaactttttcaaagtgtgggtggtccagtttggactgatgggaatcttcttgtcattctttttaaacggatgataccgatggaaataaaaggtgggaaatatattcaaaaattgtcaccctaattttgcattaatttactcagcctccccagctgtaggtgttgaaagtgtctgggtgactagctcttcattttgattgcaggatgtctgtttccactgagttttgtgaggagatgatggaaggatgatctcagaagcagagggcatctgctgtgaaagatgccgcacgccaagcggggctggggtgcatcctgggcaggggactgaaatgtacctgtcagggtttgcctcagaagtgcctggtgagctgaggt

SEQ ID NO: 330858 - DNA, 3066 bp, Homo sapiens
cggcactgtggtctccactgcctgaggaaacaagcagtaaaacggaaagtttaaaaaggaccttgtctcctacagtttcaaatagccgtctagtaagatggctttattgtgatgtttaatagctgaaacctttggacttcaagaaaattatatcaaaattgtcataaataagaagcaactacaactagggaaaacccttgaagaacaaggcgtggctcacaatgtgaaagcgatggtgcttgaactaaaacaatctgaagaggacgcgaggaaaaacttccagttagaggaagaggagcaaaatgaggccaaactcaaagaaaaacaaattcagaggaccaagagaggactagaaatactggcaaagagagcagcagagacagtggtggatccagaaatgacaccgtacttagacatagctaaccagacaggcagatcaatcagaattcccccatcagaaagaaaagcccttatgttagctatgggatatcatgagaagggcagagctttcctgaaaagaaaagaatatggaatagccttgccatgtctgttggacgctgacaaatatttctgtgagtgttgcagagagctgctggacacagtggataactatgccgtcctccagctggatatagtgtggtgttacttccgcctggaacagctggaatgccttgatgatgcagaaaaaaaattaaacttggcccagaaatgctttaaaaattgttacggagaaaatcatcagagactggtccacataaaaggaaattgtgggaaagagaaggtactgtttctaagactctacttacttcaagggatccgaaactatcacagtggaaatgatgtagaggcttatgagtatcttaacaaggcacgtcagctctttaaagagctatatattgatccatcaaaagtggacaatttgttgcagttggggtttactgcccaggaagcccggcttggcctgagggcgtgtgatgggaacgtggatcatgcggccactcatattaccaaccgcagagaggaactggcccaaataaggaaggaggaaaaagagaagaaaagacgccgcctcgagaacatcaggtttctgaaagggatgggctactccacgcacgcggcccagcagattctgctcagcaatcctcagatgtggtggttaaatgattccaatcctgaaaccgacaaccgtcaagaaagtccttcccaggaaaacattgaccgattggtgtacatgggttttgatgcactcgtggccgaagctgcgctgagagtgttcagaggcaacgtccagctggccgcccagacccttgctcacaacggaggaagcctgcctcccgagctgccgctgtcgccagaagactctttgtccccgccagccacgtccccttctgactccgcaggaacctctagtgcctcaacagacgaagacatggagacagaggccgtcaatgagatactggaagacattccagagcatgaggaagactatcttgactcaactctggaagatgaagaaattattattgcagagtacctatcctatgtagaaaataggaagtcagcaacaaagaaaaactaaataatgaacagaaatagcgctaattttctgcttataaatgctatcattatgaaaaggctaatgcagctctttctgttcttactttttatctgaattacaagtcctctttgggtgtaggagggggtgggcaggggacaagtccaggaggggtcccagggccttcatgcatggtctcggggaagaagcttcctctggcctggcgcaggccgttccatctgcctcccaggtctgcgtccctaaccccttccccagcttggtgttttaccccgaaacaggaaggaacaggggtcctgtagaacaggggtcctggggaaggtgtccagggcagggtcctgggaagggtgtcccgactgcttcctctccagctgtggctccatctgcccagcttgcctgcctcctgcacccactgccctgaccttcctgcttcccacgctgccatctctgccagggtgccacatgggttcctgtgccaccctttccccgcccctcaaatcgtcctttaagtcttccttccaagtgctgtggggcataacgatgaggcgctggccttgggggccacaccaggtcgcagcaaatggcttcagcctgggacgccagtgttttatgctcttagttcagtaaaatacgcccccgaaattcaagattgagtgtcaggctttatatatattcagcattcctcattacagaaatcttctattgaatgggaaaggtttaaatgctaaccaaagcaatttatttttaattaatatttttagactctgtgctgtcatactgaactcactgctagctaagagacctatcagagatttagatatattttctccaggttttttgtgggttttctttgttgttgttgttgttctagccatgtgacagaggctctttctaaaagtatgtagttcgctgtgtgtcggctccagcagtaaccgtcctcactgcgccacgcactcctctgtagatgtgtgcccagtgggagttccttccagccccaggaccgcagcagcagccaggtgccgagtggattgagtgccaggtgcatccaagactttccctcccttccagaaggcactgactgaagacaggatggatcatgcggagccggctgaaatgctccaactttttcaaagtgtgggtggtccagtttggactgatgggaatcttcttgtcattctttttaaacggatgataccgatggaaataaaaggtgggaaatatattcaaaaattgtcaccctaattttgcattaatttactcagcctccccagctgtaggtgttgaaagtgtctgggtgactagctcttcattttgattgcaggatgtctgtttccactgagttttgtgaggagatgatggaaggatgatctcagaagcagagggcatctgctgtgaaagatgccgcacgccaagcggggctggggtgcatcctgggcaggggactgaaatgtacctgtcagggtttgcctcagaagtgcctggtgagctgaggt

SEQ ID NO: 330859 - DNA, 2558 bp, Homo sapiens
cagcacgacgagccaggtgtgctggctgacgttgtggatggtcaggacgctgacaaatatttctgtgagtgttgcagagagctgctggacacagtggataactatgccgtcctccagctggatatagtgtggtgttacttccgcctggaacagctggaatgccttgatgatgcagaaaaaaaattaaacttggcccagaaatgctttaaaaattgttacggagaaaatcatcagagactggtccacataaaaggaaattgtgggaaagagaaggtactgtttctaagactctacttacttcaagggatccgaaactatcacagtggaaatgatgtagaggcttatgagtatcttaacaaggcacgtcagctctttaaagagctatatattgatccatcaaaagtggacaatttgttgcagttggggtttactgcccaggaagcccggcttggcctgagggcgtgtgatgggaacgtggatcatgcggccactcatattaccaaccgcagagaggaactggcccaaataaggaaggaggaaaaagagaagaaaagacgccgcctcgagaacatcaggtttctgaaagggatgggctactccacgcacgcggcccagcagattctgctcagcaatcctcagatgtggtggttaaatgattccaatcctgaaaccgacaaccgtcaagaaagtccttcccaggaaaacattgaccgattggtgtacatgggttttgatgcactcgtggccgaagctgcgctgagagtgttcagaggcaacgtccagctggccgcccagacccttgctcacaacggaggaagcctgcctcccgagctgccgctgtcgccagaagactctttgtccccgccagccacgtccccttctgactccgcaggaacctctagtgcctcaacagacgaagacatggagacagaggccgtcaatgagatactggaagacattccagagcatgaggaagactatcttgactcaactctggaagatgaagaaattattattgcagagtacctatcctatgtagaaaataggaagtcagcaacaaagaaaaactaaataatgaacagaaatagcgctaattttctgcttataaatgctatcattatgaaaaggctaatgcagctctttctgttcttactttttatctgaattacaagtcctctttgggtgtaggagggggtgggcaggggacaagtccaggaggggtcccagggccttcatgcatggtctcggggaagaagcttcctctggcctggcgcaggccgttccatctgcctcccaggtctgcgtccctaaccccttccccagcttggtgttttaccccgaaacaggaaggaacaggggtcctgtagaacaggggtcctggggaaggtgtccagggcagggtcctgggaagggtgtcccgactgcttcctctccagctgtggctccatctgcccagcttgcctgcctcctgcacccactgccctgaccttcctgcttcccacgctgccatctctgccagggtgccacatgggttcctgtgccaccctttccccgcccctcaaatcgtcctttaagtcttccttccaagtgctgtggggcataacgatgaggcgctggccttgggggccacaccaggtcgcagcaaatggcttcagcctgggacgccagtgttttatgctcttagttcagtaaaatacgcccccgaaattcaagattgagtgtcaggctttatatatattcagcattcctcattacagaaatcttctattgaatgggaaaggtttaaatgctaaccaaagcaatttatttttaattaatatttttagactctgtgctgtcatactgaactcactgctagctaagagacctatcagagatttagatatattttctccaggttttttgtgggttttctttgttgttgttgttgttctagccatgtgacagaggctctttctaaaagtatgtagttcgctgtgtgtcggctccagcagtaaccgtcctcactgcgccacgcactcctctgtagatgtgtgcccagtgggagttccttccagccccaggaccgcagcagcagccaggtgccgagtggattgagtgccaggtgcatccaagactttccctcccttccagaaggcactgactgaagacaggatggatcatgcggagccggctgaaatgctccaactttttcaaagtgtgggtggtccagtttggactgatgggaatcttcttgtcattctttttaaacggatgataccgatggaaataaaaggtgggaaatatattcaaaaattgtcaccctaattttgcattaatttactcagcctccccagctgtaggtgttgaaagtgtctgggtgactagctcttcattttgattgcaggatgtctgtttccactgagttttgtgaggagatgatggaaggatgatctcagaagcagagggcatctgctgtgaaagatgccgcacgccaagcggggctggggtgcatcctgggcaggggactgaaatgtacctgtcagggtttgcctcagaagtgcctggtgagctgaggt

SEQ ID NO: 330860 - DNA, 2070 bp, Homo sapiens
gcgagtttcactctggctgccttctcctgagagtcggagccacagccagagccctgcccaggccgagccggagctgcagcccgagcgtggtggtgccctcagccccgtcctcttgtcctcctcagcctcgattctgctcagcaatcctcagatgtggtggttaaatgattccaatcctgaaaccgacaaccgtcaagaaagtccttcccaggaaaacattgaccgattggtgtacatgggttttgatgcactcgtggccgaagctgcgctgagagtgttcagaggcaacgtccagctggccgcccagacccttgctcacaacggaggaagcctgcctcccgagctgccgctgtcgccagaagactctttgtccccgccagccacgtccccttctgactccgcaggaacctctagtgcctcaacagacgaagacatggagacagaggccgtcaatgagatactggaagacattccagagcatgaggaagactatcttgactcaactctggaagatgaagaaattattattgcagagtacctatcctatgtagaaaataggaagtcagcaacaaagaaaaactaaataatgaacagaaatagcgctaattttctgcttataaatgctatcattatgaaaaggctaatgcagctctttctgttcttactttttatctgaattacaagtcctctttgggtgtaggagggggtgggcaggggacaagtccaggaggggtcccagggccttcatgcatggtctcggggaagaagcttcctctggcctggcgcaggccgttccatctgcctcccaggtctgcgtccctaaccccttccccagcttggtgttttaccccgaaacaggaaggaacaggggtcctgtagaacaggggtcctggggaaggtgtccagggcagggtcctgggaagggtgtcccgactgcttcctctccagctgtggctccatctgcccagcttgcctgcctcctgcacccactgccctgaccttcctgcttcccacgctgccatctctgccagggtgccacatgggttcctgtgccaccctttccccgcccctcaaatcgtcctttaagtcttccttccaagtgctgtggggcataacgatgaggcgctggccttgggggccacaccaggtcgcagcaaatggcttcagcctgggacgccagtgttttatgctcttagttcagtaaaatacgcccccgaaattcaagattgagtgtcaggctttatatatattcagcattcctcattacagaaatcttctattgaatgggaaaggtttaaatgctaaccaaagcaatttatttttaattaatatttttagactctgtgctgtcatactgaactcactgctagctaagagacctatcagagatttagatatattttctccaggttttttgtgggttttctttgttgttgttgttgttctagccatgtgacagaggctctttctaaaagtatgtagttcgctgtgtgtcggctccagcagtaaccgtcctcactgcgccacgcactcctctgtagatgtgtgcccagtgggagttccttccagccccaggaccgcagcagcagccaggtgccgagtggattgagtgccaggtgcatccaagactttccctcccttccagaaggcactgactgaagacaggatggatcatgcggagccggctgaaatgctccaactttttcaaagtgtgggtggtccagtttggactgatgggaatcttcttgtcattctttttaaacggatgataccgatggaaataaaaggtgggaaatatattcaaaaattgtcaccctaattttgcattaatttactcagcctccccagctgtaggtgttgaaagtgtctgggtgactagctcttcattttgattgcaggatgtctgtttccactgagttttgtgaggagatgatggaaggatgatctcagaagcagagggcatctgctgtgaaagatgccgcacgccaagcggggctggggtgcatcctgggcaggggactgaaatgtacctgtcagggtttgcctcagaagtgcctggtgagctgaggt

SEQ ID NO: 330861 - DNA, 2275 bp, Homo sapiens
ccggaatgaaaacaaacggcggccgctgccgcatccgggcactctgctggtcgcggcgggagtggcgtggcgcagggatggcacaaaagaaatatcttcaagcaaaattgacccagtttttaagggaagacaggattcaactttggaaacctccatatacagatgaaaataaaaaagttggtttggcattaaaggaccttgctaagcagtactctgacagactagaatgctgtgaaaatgaagtagaaaaggtaatagaagaaatacgttgcaaggcaattgagcgtggaacaggaaatgacaattatagaacaacgggaattgctacaatcgaggtgtttttaccaccaagactaaaaaaagataggaaaaacttgttggagacccgattgcacatcactggcagagaactgaggtccaaaatagctgaaacctttggacttcaagaaaattatatcaaaattgtcataaataagaagcaactacaactagggaaaacccttgaagaacaaggcgtggctcacaatgtgaaagcgatggtgcttgaactaaaacaatctgaagaggacgcgaggaaaaacttccagttagaggaagaggagcaaaatgaggccaaactcaaagaaaaacaaattcagaggaccaagagaggactagaaatactggcaaagagagcagcagagacagtggtggatccagaaatgacaccgtacttagacatagctaaccagacaggcagatcaatcagaattcccccatcagaaagaaaagcccttatgttagctatgggatatcatgagaagggcagagctttcctgaaaagaaaagaatatggaatagccttgccatgtctgttggacgctgacaaatatttctgtgagtgttgcagagagctgctggacacagtggataactatgccgtcctccagctggatatagtgtggtgttacttccgcctggaacagctggaatgccttgatgatgcagaaaaaaaattaaacttggcccagaaatgctttaaaaattgttacggagaaaatcatcagagactggtccacataaaaggaaattgtgggaaagagaaggtactgtttctaagactctacttacttcaagggatccgaaactatcacagtggaaatgatgtagaggcttatgagtatcttaacaaggcacgtcagctctttaaagagctatatattgatccatcaaaagtggacaatttgttgcagttggggtttactgcccaggaagcccggcttggcctgagggcgtgtgatgggaacgtggatcatgcggccactcatattaccaaccgcagagaggaactggcccaaataaggaaggaggaaaaagagaagaaaagacgccgcctcgagaacatcaggtttctgaaagggatgggctactccacgcacgcggcccagcaggtactccacgcagccagcgggaacttggatgaggccctgaaggtagcagctccctcggggcctctggccttgtccctgagcagtgggtcctgcccagagctccctccatggctctccagcatcctcccgggctcactcctatgggctgccccgtcatccggatctgaagggcaggtttctcctgggctccagcccagacacaggctgcgtgaggccacgtgaggccccatgctcagtgcttggcccaggcctggctccaaaacgtggtgcctgtccacaccagcacagtccacaggccaggactttgtgtagggtttctgtgtgcagcagagtttagtgaaacaggcagtttccacggcagaaaaaagagaatgggaattcaacttgtagtataattgtttggcattaaaattttaaatgtaagtatctagttttatttatttagtccatcgtacatgttggcaaagggagagcttttcaaagaacccctcaggagtgacagcaggttgggatccagacagcagtgactttacctgggccacttccttccctgtgttggagaagcatatcgaatcctcagtagggcaggtgctgcgctgcgtctcagcagcttggcatggaaccaccctctgccctcttggccccgcaggtcagtgagagacaaactcagagcacacgtggtgaggggtcccgagggggtgcacaggaggcagggggctggctgtgtggaggcagcagtccagacagatgctggggcagcgcggcgggcaggaagcggagtggtaggagctggcttaggttgtgcacgtgctgggggcggggctggggggacagagatggggttg

SEQ ID NO: 330862 - DNA, 3830 bp, Homo sapiens
  misc_feature (2023)..(2023): n is a, c, g, or t
  misc_feature (2456)..(2456): n is a, c, g, or t
  misc_feature (2617)..(2617): n is a, c, g, or t
ccggaatgaaaacaaacggcggccgctgccgcatccgggcactctgctggtcgcggcgggagtggcgtggcgcagggatggcacaaaagaaatatcttcaagcaaaattgacccagtttttaagggaagacaggattcaactttggaaacctccatatacagatgaaaataaaaaagttggtttggcattaaaggaccttgctaagcagtactctgacagactagaatgctgtgaaaatgaagtagaaaaggtaatagaagaaatacgttgcaaggcaattgagcgtggaacaggaaatgacaattatagaacaacgggaattgctacaatcgaggtgtttttaccaccaagactaaaaaaagataggaaaaacttgttggagacccgattgcacatcactggcagagaactgaggtccaaaatagctgaaacctttggacttcaagaaaattatatcaaaattgtcataaataagaagcaactacaactagggaaaacccttgaagaacaaggcgtggctcacaatgtgaaagcgatggtgcttgaactaaaacaatctgaagaggacgcgaggaaaaacttccagttagaggaagaggagcaaaatgaggccaaactcaaagaaaaacaaattcagaggaccaagagaggactagaaatactggcaaagagagcagcagagacagtggtggatccagaaatgacaccgtacttagacatagctaaccagacaggcagatcaatcagaattcccccatcagaaagaaaagcccttatgttagctatgggatatcatgagaagggcagagctttcctgaaaagaaaagaatatggaatagccttgccatgtctgttggacgctgacaaatatttctggtaggcgcttttgtacttggtgaacaccagctttaaggaagatggcccagactatacagaacaccctgccatgcccttgagactgcagactttcatctacaacagtggttaatgtaaaagagtagttatggtgtaaactggtgaatttcttcttccctttgtatttctaattgacctttcctccctgtaaagaaaagaattttcaagcaggtaggatatcctctcttcttctgtacatgtgctatgttgctagtcggaactttccattataaagtttcctgtcagcttttcacctaatggttttggggtagtattgatgattattcctcaaatccgttgtttaagagctgtataatggtgatattattccttctgtacttattttttttgagacagagtctcactctgtcacccaggctggaatgcagtggcatgatctcagctcactgcaacttccatctcctgggctcaagtgatcctcccacctcagcctcctaagtagctgggatcacaggtgcacatcaccacaggtgcacatcaccatgcccagataatttttttgtatttgttgtagagatgaggtttcactatgttgcccatgctagtctcaaactcctgggctcaagtgatccacccaccacagcctctcaaagtgctgggattacaggtgtgagccaccgcacccagcctcccttctgcatttattgctggaattctgaaaaatttgtttttgctcatcagttattttatatgtggaggtacaatttgtataggaaagttagaataaaatactttgtttctttctccttattttcttgttttcagaataaatgagttgcttcactatcaccctccaaaggtgaccaaagaggtttctttttcttttcattttcttaagtgtcattattaactcatggatttaaaacatttgatgtgtttcaaacttcagtgcttaaattggtcatgctggctggcaggcagcccatgtttttttgacctgaccctgctagtctttgcagtctctgatttctggaatccaaagatactccaggctcatcttgggcatttaatgcccagaccaggaatcagcaatttcccaaggagtcctggttcctcttcatgggaaacggtactaagagactatgntgcagacatattcaacatttgaaaagtagacttgattttttgaaaatggtcaaaagttaacaaatttagtgttaacttcttttctgttttggtgcattcccaagataatactgtatactcccagaagatgaatgcaaatatttatagttttccattggtcagtgcctttgggttctaagtgaacaagtcccaactttaacgtacacaaaaaaggaattgggaggggaggggccgggctgggaatagtgagaatgagggctggtttgtgcttctggggtctctgtctctgcctctttctggatgtcagtttcattctcttctgcaaacagtgtagggtaaacaggctttaaattaggtcctaaaagtttaggtaaatttttcattcccttccatagttgtttctaattttttattatggaaaatttcaaatagncataaaaataaaaattagtataatgagcttccatatacactcataactaagcttctgcagttataaagacatggttgatcttcatacatctgtgtgagcctccctcaatctttttatcctggacaaatccttgaaataatttttaggtctcagggaaccantgaatacaaatttggctacatcttcagttcatgatacattaacatgtccggtaagtggtaggtataataatgaaataataattaacaatgtctttctaagtagagaaagtttttttttcctgggcatctatttatcctgggcatctatttatcctggccaacttgtagcatatttttgtgtgtgtgtgatttctctcttttcataaaggaaatcagcagtaatgtaagccaaatagaatgcagatggaggaaacttcagtttttccatttccttttccatttgacttttcccccttacttctccaagtaagctagaagttttgtcacaacttcctaccatatgtcttggagtatggtatgtagtatgaccaagaatagtttctttccccaaattgtatgaaacagtgacttcctggcagtgcagaacggtgaccctgaggtagggaaacatgaggggagctcagtgtctggagaagtttcaggttacggggcagggagggcaaacccaggcagagccttgtgctccctggagttaaagagatggagctgggcttgcaggaggccaaggaggtgagaggagcaagctgccagagagagggtgtcagagagcttcagaggagcccttttgagtcttctgctcagtaatgatcagcacatattgattttatttttaactgacatgaggccatttctgcccacgctcttgatgcttagtaaaacatgaacgagcctgttaaagcaacatgcaggagatggagaagttcggccacatgcccattgctttcctgcgagtggcaggagagtcttctgtcactgggaccagaatgtgcctagaggcaggaaatctcaacacgactgtgagatcagaccacaatccacaaagcgctgctgtttctctcaaaggcaggttctcaggctgagccgtagatttggagaaagcacccctcacccagctccacatctgtgtgtctgcgtgcacacgtgtgtaaaacatggtgtatgtgttctcaaacattcacgaaattagaaatgttgagagagatgaaaataaatataaaaatactgctgtgatacatttttcttgccgcacccacaactggactgtgtacatgggccctctttaggagacttaaactcaatgctgaaacactttgcacaatgcctggcgtgttatgcactcaataaacattagtgtctatcgttaaaaaaaaaa

SEQ ID NO: 330863 - DNA, 1502 bp, Homo sapiens
ccggaatgaaaacaaacggcggccgctgccgcatccgggcactctgctggtcgcggcgggagtggcgtggcgcagggatggcacaaaagaaatatcttcaagcaaaattgacccagtttttaagggaagacaggattcaactttggaaacctccatatacagatgaaaataaaaaagttggtttggcattaaaggaccttgctaagcagtactctgacagactagaatgctgtgaaaatgaagtagaaaaggtaatagaagaaatacgttgcaaggcaattgagcgtggaacaggaaatgacaattatagaacaacgggaattgctacaatcgaggtgtttttaccaccaagactaaaaaaagataggaaaaacttgttggagacccgattgcacatcactggcagagaactgaggtccaaaatagctgaaacctttggacttcaagaaaattatatcaaaattgtcataaataagaagcaactacaactagggaaaacccttgaagaacaaggcgtggctcacaatgtgaaagcgatggtgcttgaactaaaacaatctgaagaggacgcgaggaaaaacttccagttagaggaagaggagcaaaatgaggccaaactcaaagaaaaacaaattcagaggaccaagagaggactagaaatactggcaaagagagcagcagagacagtggtggatccagaaatgacaccgtacttagacatagctaaccagacaggcagatcaatcagaattcccccatcagaaagaaaagcccttatgttagctatgggatatcatgagaagggcagagctttcctgaaaagaaaagaatatggaatagccttgccatgtctgttggacgctgacaaatatttctgtgagtgttgcagagagctgctggacacagtggataactatgccgtcctccagctggatatagtgtggtgttacttccgcctggaacagctggaatgccttgatgatgcagaaaaaaaattaaacttggcccagaaatgctttaaaaattgttacggagaaaatcatcagagactggtccacataaaaggaaattgtgggaaagagaaggtactgtttctaagactctacttacttcaagggatccgaaactatcacagtggaaatgatgtagaggcttatgagtatcttaacaaggcacgtcagctctttaaagagctatatattgatccatcaaaagtggacaatttgttgcagttggggtttactgcccaggaagcccggcttggcctgagggcgtgtgatgggaacgtggatcatgcggccactcatattaccaaccgcagagaggtacccactttcacatgccctagctctcttgggtatgaaagaacaaaaaaagataatcccacaggagtgttaataaccaggaactctttattactccagattgggaaggaaggagaaacttgtccttttttttttcttgagacagagtctcactttgtcatccaggctggagtgcag

SEQ ID NO: 330864 - DNA, 3776 bp, Homo sapiens
  misc_feature (1969)..(1969): n is a, c, g, or t
  misc_feature (2402)..(2402): n is a, c, g, or t
  misc_feature (2563)..(2563): n is a, c, g, or t
ccggaatgaaaacaaacggcggccgctgccgcatccgggcactctgctggtcgcggcgggagtggcgtggcgcagggatggcacaaaagaaatatcttcaagcaaaattgacccagtttttaagggaagacaggattcaactttggaaacctccatatacagatgaaaataaaaaagttggtttggcattaaaggaccttgctaagcagtactctgacagactagaatgctgtgaaaatgaagtagaaaaggtaatagaagaaatacgttgcaaggcaattgagcgtggaacaggaaatgacaattatagaacaacgggaattgctacaatcgaggtgtttttaccaccaagactaaaaaaagataggaaaaacttgttggagacccgattgcacatcactggcagagaactgaggtccaaaatagctgaaacctttggacttcaagaaaattatatcaaaattgtcataaataagaagcaactacaactagggaaaacccttgaagaacaaggcgtggctcacaatgtgaaagcgatggtgcttgaactaaaacaatctgaagaggacgcgaggaaaaacttccagttagaggaagaggagcaaaatgaggccaaactcaaagaaaaacaaattcagaggaccaagagaggactagaaatactggcaaagagagcagcagagacagtggtggatccagaaatgacaccgtacttagacatagctaaccagacaggcagatcaatcagaattcccccatcagaaagaaaagcccttatgttagctatgggatatcatgagaagggcagagctttcctgaaaagaaaagaatatggaatagccttgccatgtctgttggacgctgacaaatatttctggtaggcgcttttgtacttggtgaacaccagctttaaggaagatggcccagactatacagaacaccctgccatgcccttgagactgcagactttcatctacaacagtggttaatgtaaaagagtagttatggtgtaaactggtgaatttcttcttccctttgtatttctaattgacctttcctccctgtaaagttgctagtcggaactttccattataaagtttcctgtcagcttttcacctaatggttttggggtagtattgatgattattcctcaaatccgttgtttaagagctgtataatggtgatattattccttctgtacttattttttttgagacagagtctcactctgtcacccaggctggaatgcagtggcatgatctcagctcactgcaacttccatctcctgggctcaagtgatcctcccacctcagcctcctaagtagctgggatcacaggtgcacatcaccacaggtgcacatcaccatgcccagataatttttttgtatttgttgtagagatgaggtttcactatgttgcccatgctagtctcaaactcctgggctcaagtgatccacccaccacagcctctcaaagtgctgggattacaggtgtgagccaccgcacccagcctcccttctgcatttattgctggaattctgaaaaatttgtttttgctcatcagttattttatatgtggaggtacaatttgtataggaaagttagaataaaatactttgtttctttctccttattttcttgttttcagaataaatgagttgcttcactatcaccctccaaaggtgaccaaagaggtttctttttcttttcattttcttaagtgtcattattaactcatggatttaaaacatttgatgtgtttcaaacttcagtgcttaaattggtcatgctggctggcaggcagcccatgtttttttgacctgaccctgctagtctttgcagtctctgatttctggaatccaaagatactccaggctcatcttgggcatttaatgcccagaccaggaatcagcaatttcccaaggagtcctggttcctcttcatgggaaacggtactaagagactatgntgcagacatattcaacatttgaaaagtagacttgattttttgaaaatggtcaaaagttaacaaatttagtgttaacttcttttctgttttggtgcattcccaagataatactgtatactcccagaagatgaatgcaaatatttatagttttccattggtcagtgcctttgggttctaagtgaacaagtcccaactttaacgtacacaaaaaaggaattgggaggggaggggccgggctgggaatagtgagaatgagggctggtttgtgcttctggggtctctgtctctgcctctttctggatgtcagtttcattctcttctgcaaacagtgtagggtaaacaggctttaaattaggtcctaaaagtttaggtaaatttttcattcccttccatagttgtttctaattttttattatggaaaatttcaaatagncataaaaataaaaattagtataatgagcttccatatacactcataactaagcttctgcagttataaagacatggttgatcttcatacatctgtgtgagcctccctcaatctttttatcctggacaaatccttgaaataatttttaggtctcagggaaccantgaatacaaatttggctacatcttcagttcatgatacattaacatgtccggtaagtggtaggtataataatgaaataataattaacaatgtctttctaagtagagaaagtttttttttcctgggcatctatttatcctgggcatctatttatcctggccaacttgtagcatatttttgtgtgtgtgtgatttctctcttttcataaaggaaatcagcagtaatgtaagccaaatagaatgcagatggaggaaacttcagtttttccatttccttttccatttgacttttcccccttacttctccaagtaagctagaagttttgtcacaacttcctaccatatgtcttggagtatggtatgtagtatgaccaagaatagtttctttccccaaattgtatgaaacagtgacttcctggcagtgcagaacggtgaccctgaggtagggaaacatgaggggagctcagtgtctggagaagtttcaggttacggggcagggagggcaaacccaggcagagccttgtgctccctggagttaaagagatggagctgggcttgcaggaggccaaggaggtgagaggagcaagctgccagagagagggtgtcagagagcttcagaggagcccttttgagtcttctgctcagtaatgatcagcacatattgattttatttttaactgacatgaggccatttctgcccacgctcttgatgcttagtaaaacatgaacgagcctgttaaagcaacatgcaggagatggagaagttcggccacatgcccattgctttcctgcgagtggcaggagagtcttctgtcactgggaccagaatgtgcctagaggcaggaaatctcaacacgactgtgagatcagaccacaatccacaaagcgctgctgtttctctcaaaggcaggttctcaggctgagccgtagatttggagaaagcacccctcacccagctccacatctgtgtgtctgcgtgcacacgtgtgtaaaacatggtgtatgtgttctcaaacattcacgaaattagaaatgttgagagagatgaaaataaatataaaaatactgctgtgatacatttttcttgccgcacccacaactggactgtgtacatgggccctctttaggagacttaaactcaatgctgaaacactttgcacaatgcctggcgtgttatgcactcaataaacattagtgtctatcgttaaaaaaaaaa

SEQ ID NO: 330865 - DNA, 229 bp, Homo sapiens
ccattagaaggatgagattataaacacagctcccttcctaaacattaggatctctcttttagagcagtcagcctttgaatatataccaagaacggggaaagaattccagtcattcacaaaaaggtttcaaatgctaaaaatgtttcaaatgctgcttggcagtgatgtcactgtccttctctttccagtgagtgttgcagagagctgctggacacagtggataactatg

SEQ ID NO: 330866 - DNA, 3370 bp, Homo sapiens
ccggaatgaaaacaaacggcggccgctgccgcatccgggcactctgctggtcgcggcgggagtggcgtggcgcagggatggcacaaaagaaatatcttcaagcaaaattgacccagtttttaagggaagacaggattcaactttggaaacctccatatacagatgaaaataaaaaagttggtttggcattaaaggaccttgctaagcagtactctgacagactagaatgctgtgaaaatgaagtagaaaaggtaatagaagaaatacgttgcaaggcaattgagcgtggaacaggaaatgacaattatagaacaacgggaattgctacaatcgaggtgtttttaccaccaagactaaaaaaagataggaaaaacttgttggagacccgattgcacatcactggcagagaactgaggtccaaaatagctgaaacctttggacttcaagaaaattatatcaaaattgtcataaataagaagcaactacaactagggaaaacccttgaagaacaaggcgtggctcacaatgtgaaagcgatggtgcttgaactaaaacaatctgaagaggacgcgaggaaaaacttccagttagaggaagaggagcaaaatgaggccaaactcaaagaaaaacaaattcagaggaccaagagaggactagaaatactggcaaagagagcagcagagacagtggtggatccagaaatgacaccgtacttagacatagctaaccagacaggcagatcaatcagaattcccccatcagaaagaaaagcccttatgttagctatgggatatcatgagaagggcagagctttcctgaaaagaaaagaatatggaatagccttgccatgtctgttggacgctgacaaatatttctgtgagtgttgcagagagctgctggacacagtggataactatgccgtcctccagctggatatagtgtggtgttacttccgcctggaacagctggaatgccttgatgatgcagaaaaaaaattaaacttggcccagaaatgctttaaaaattgttacggagaaaatcatcagagactggtccacataaaaggaaattgtgggaaagagaaggtactgtttctaagactctacttacttcaagggatccgaaactatcacagtggaaatgatgtagaggcttatgagtatcttaacaaggcacgtcagctctttaaagagctatatattgatccatcaaaagtggacaatttgttgcagttggggtttactgcccaggaagcccggcttggcctgagggcgtgtgatgggaacgtggatcatgcggccactcatattaccaaccgcagagaggaactggcccaaataaggaaggaggaaaaagagaagaaaagacgccgcctcgagaacatcaggtttctgaaagggatgggctactccacgcacgcggcccagcagattctgctcagcaatcctcagatgtggtggttaaatgattccaatcctgaaaccgacaaccgtcaagaaagtccttcccaggaaaacattgaccgattggtgtacatgggttttgatgcactcgtggccgaagctgcgctgagagtgttcagaggcaacgtccagctggccgcccagacccttgctcacaacggaggaagcctgcctcccgagctgccgctgtcgccagaagactctttgtccccgccagccacgtccccttctgactccgcaggaacctctagtgcctcaacagacgaagacatggagacagaggccgtcaatgagatactggaagacattccagagcatgaggaagactatcttgactcaactctggaagatgaagaaattattattgcagagtacctatcctatgtagaaaataggaagtcagcaacaaagaaaaactaaataatgaacagaaatagcgctaattttctgcttataaatgctatcattatgaaaaggctaatgcagctctttctgttcttactttttatctgaattacaagtcctctttgggtgtaggagggggtgggcaggggacaagtccaggaggggtcccagggccttcatgcatggtctcggggaagaagcttcctctggcctggcgcaggccgttccatctgcctcccaggtctgcgtccctaaccccttccccagcttggtgttttaccccgaaacaggaaggaacaggggtcctgtagaacaggggtcctggggaaggtgtccagggcagggtcctgggaagggtgtcccgactgcttcctctccagctgtggctccatctgcccagcttgcctgcctcctgcacccactgccctgaccttcctgcttcccacgctgccatctctgccagggtgccacatgggttcctgtgccaccctttccccgcccctcaaatcgtcctttaagtcttccttccaagtgctgtggggcataacgatgaggcgctggccttgggggccacaccaggtcgcagcaaatggcttcagcctgggacgccagtgttttatgctcttagttcagtaaaatacgcccccgaaattcaagattgagtgtcaggctttatatatattcagcattcctcattacagaaatcttctattgaatgggaaaggtttaaatgctaaccaaagcaatttatttttaattaatatttttagactctgtgctgtcatactgaactcactgctagctaagagacctatcagagatttagatatattttctccaggttttttgtgggttttctttgttgttgttgttgttctagccatgtgacagaggctctttctaaaagtatgtagttcgctgtgtgtcggctccagcagtaaccgtcctcactgcgccacgcactcctctgtagatgtgtgcccagtgggagttccttccagccccaggaccgcagcagcagccaggtgccgagtggattgagtgccaggtgcatccaagactttccctcccttccagaaggcactgactgaagacaggatggatcatgcggagccggctgaaatgctccaactttttcaaagtgtgggtggtccagtttggactgatgggaatcttcttgtcattctttttaaacggatgataccgatggaaataaaaggtgggaaatatattcaaaaattgtcaccctaattttgcattaatttactcagcctccccagctgtaggtgttgaaagtgtctgggtgactagctcttcattttgattgcaggatgtctgtttccactgagttttgtgaggagatgatggaaggatgatctcagaagcagagggcatctgctgtgaaagatgccgcacgccaagcggggctggggtgcatcctgggcaggggactgaaatgtacctgtcagggtttgcctcagaagtgcctggtgagctgaggt

SEQ ID NO: 330867 - DNA, 3140 bp, Homo sapiens
ccggaatgaaaacaaacggcggccgctgccgcatccgggcactctgctggtcgcggcgggagtggcgtggcgcagggatggcacaaaagaaatatcttcaagcaaaattgacccagtttttaagggaagacaggattcaactttggaaacctccatatacagatgaaaataaaaaagttggtttggcattaaaggaccttgctaagcagtactctgacagactagaatgctgtgaaaatgaagtagaaaaggtaatagaagaaatacgttgcaaggcaattgagcgtggaacaggaaatgacaattatagaacaacgggaattgctacaatcgaggtgtttttaccaccaagactaaaaaaagataggaaaaacttgttggagacccgattgcacatcactggcagagaactgaggtccaaaatagctgaaacctttggacttcaagaaaattatatcaaaattgtcataaataagaagcaactacaactagggaaaacccttgaagaacaaggcgtggctcacaatgtgaaagcgatggtgcttgaactaaaacaatctgaagaggacgcgaggaaaaacttccagttagaggaagaggagcaaaatgaggccaaactcaaagaaaaacaaattcagaggaccaagagaggactagaaatactggcaaagagagcagcagagacagtggtggatccagaaatgacaccgtacttagacatagctaaccagacaggcagatcaatcagaattcccccatcagaaagaaaagcccttatgttagctatgggatatcatgagaagggcagagctttcctgaaaagaaaagaatatggaatagccttgccatgtctgttggacgctgacaaatatttctgtgagtgttgcagagagctgctggacacagtggataactatgccgtcctccagctggatatagtgtggtgttacttccgcctggaacagctggaatgccttgatgatgcagaaaaaaaattaaacttggcccagaaatgctttaaaaattgttacggagaaaatcatcagagactggtccacataaaaggaaattgtgggaaagagaaggtactgtttctaagactctacttacttcaagggatccgaaactatcacagtggaaatgatgtagaggcttatgagtatcttaacaaggcacgtcagctctttaaagagctatatattgatccatcaaaagtggacaatttgttgcagttggggtttactgcccaggaagcccggcttggcctgagggcgtgtgatgggaacgtggatcatgcggccactcatattaccaaccgcagagaggaactggcccaaataaggaaggaggaaaaagagaagaaaagacgccgcctcgagaacatcaggtttctgaaagggatgggctactccacgcacgcggcccagcagattctgctcagcaatcctcagatgtggtggttaaatgattccaatcctgaaaccgacaaccgtcaagaaagtccttcccaggaaaacattgaccgattggtgtacatgggttttgatgcactcgtggccgaagctgcgctgagagtgttcagaggcaacgtccagctggccgcccagacccttgctcacaacggaggaagcctgcctcccgagctgccgctgtcgccagaagactctttgtccccgccagccacgtccccttctgactccgcaggaacctctagtgcctcaacagacgaagacatggagacagaggccgtcaatgagatactggaagacattccagagcatgaggaagactatcttgactcaactctggaagatgaagaaattattattgcagagtacctatcctatgtagaaaataggaagtcagcaacaaagaaaaactaaataatgaacagaaatagcgctaattttctgcttataaatgctatcattatgaaaaggctaatgcagctctttctgttcttactttttatctgaattacaagtcctctttgggtgtaggagggggtgggcaggggacaagtccaggaggggtcccagggccttcatgcatggtctcggggaagaagcttcctctggcctggcgcaggccgttccatctgcctcccaggtctgcgtccctaaccccttccccagcttggtgttttaccccgaaacaggaaggaacaggggtcctgtagaacaggggtcctggggaaggtgtccagggcagggtcctgggaagggtgtcccgactgcttcctctccagctgtggctccatctgcccagcttgcctgcctcctgcacccactgccctgaccttcctgcttcccacgctgccatctctgccagggtgccacatgggttcctgtgccaccctttccccgcccctcaaatcgtcctttaagtcttccttccaagtgctgtggggcataacgatgaggcgctggccttgggggccacaccaggtcgcagcaaatggcttcagcctgggacgccagtgttttatgctcttagttcagtaaaatacgcccccgaaattcaagattgagtgtcaggctttatatatattcagcattcctcattacagaaatcttctattgaatgggaaaggtttaaatgctaaccaaagcaatttatttttaattaatatttttagactctgtgctgtcatactgaactcactgctagctaagagacctatcagagatttagatatattttctccaggttttttgtgggttttctttgttgttgttgttgttctagccatgtgacagaggctctttctaaaagtatgtagttcgctgtgtgtcggctccagcagtaaccgtcctcactgcgccacgcactcctctgtagatgtgtgcccagtgggagttccttccagccccaggaccgcagcagcagccaggtgccgagtggattgagtgccaggtgcatccaagactttccctcccttccagaaggcactgactgaagacaggatggatcatgcggagccggctgaaatgctccaactttttcaaagtgtgggtggtccagtttggactgatgggaatcttcttgtcattctttttaaacggatgataccgatggaaataaaaggtggtataagtggtataggtggtataggtgactatagggatcctctaggtcgc

SEQ ID NO: 330868 - DNA, 3408 bp, Homo sapiens
acacggcggccgagtgtcctcgaccccagcctcagcagcactgcttggcgccccggttcccggtccgactgggcacctctcctggccaggggtggagcggccgcggggcggggggatggcacaaaagaaatatcttcaagcaaaattgacccagtttttaagggaagacaggattcaactttggaaacctccatatacagatgaaaataaaaaagttggtttggcattaaaggaccttgctaagcagtactctgacagactagaatgctgtgaaaatgaagtagaaaaggtaatagaagaaatacgttgcaaggcaattgagcgtggaacaggaaatgacaattatagaacaacgggaattgctacaatcgaggtgtttttaccaccaagactaaaaaaagataggaaaaacttgttggagacccgattgcacatcactggcagagaactgaggtccaaaatagctgaaacctttggacttcaagaaaattatatcaaaattgtcataaataagaagcaactacaactagggaaaacccttgaagaacaaggcgtggctcacaatgtgaaagcgatggtgcttgaactaaaacaatctgaagaggacgcgaggaaaaacttccagttagaggaagaggagcaaaatgaggccaaactcaaagaaaaacaaattcagaggaccaagagaggactagaaatactggcaaagagagcagcagagacagtggtggatccagaaatgacaccgtacttagacatagctaaccagacaggcagatcaatcagaattcccccatcagaaagaaaagcccttatgttagctatgggatatcatgagaagggcagagctttcctgaaaagaaaagaatatggaatagccttgccatgtctgttggacgctgacaaatatttctgtgagtgttgcagagagctgctggacacagtggataactatgccgtcctccagctggatatagtgtggtgttacttccgcctggaacagctggaatgccttgatgatgcagaaaaaaaattaaacttggcccagaaatgctttaaaaattgttacggagaaaatcatcagagactggtccacataaaaggaaattgtgggaaagagaaggtactgtttctaagactctacttacttcaagggatccgaaactatcacagtggaaatgatgtagaggcttatgagtatcttaacaaggcacgtcagctctttaaagagctatatattgatccatcaaaagtggacaatttgttgcagttggggtttactgcccaggaagcccggcttggcctgagggcgtgtgatgggaacgtggatcatgcggccactcatattaccaaccgcagagaggaactggcccaaataaggaaggaggaaaaagagaagaaaagacgccgcctcgagaacatcaggtttctgaaagggatgggctactccacgcacgcggcccagcagattctgctcagcaatcctcagatgtggtggttaaatgattccaatcctgaaaccgacaaccgtcaagaaagtccttcccaggaaaacattgaccgattggtgtacatgggttttgatgcactcgtggccgaagctgcgctgagagtgttcagaggcaacgtccagctggccgcccagacccttgctcacaacggaggaagcctgcctcccgagctgccgctgtcgccagaagactctttgtccccgccagccacgtccccttctgactccgcaggaacctctagtgcctcaacagacgaagacatggagacagaggccgtcaatgagatactggaagacattccagagcatgaggaagactatcttgactcaactctggaagatgaagaaattattattgcagagtacctatcctatgtagaaaataggaagtcagcaacaaagaaaaactaaataatgaacagaaatagcgctaattttctgcttataaatgctatcattatgaaaaggctaatgcagctctttctgttcttactttttatctgaattacaagtcctctttgggtgtaggagggggtgggcaggggacaagtccaggaggggtcccagggccttcatgcatggtctcggggaagaagcttcctctggcctggcgcaggccgttccatctgcctcccaggtctgcgtccctaaccccttccccagcttggtgttttaccccgaaacaggaaggaacaggggtcctgtagaacaggggtcctggggaaggtgtccagggcagggtcctgggaagggtgtcccgactgcttcctctccagctgtggctccatctgcccagcttgcctgcctcctgcacccactgccctgaccttcctgcttcccacgctgccatctctgccagggtgccacatgggttcctgtgccaccctttccccgcccctcaaatcgtcctttaagtcttccttccaagtgctgtggggcataacgatgaggcgctggccttgggggccacaccaggtcgcagcaaatggcttcagcctgggacgccagtgttttatgctcttagttcagtaaaatacgcccccgaaattcaagattgagtgtcaggctttatatatattcagcattcctcattacagaaatcttctattgaatgggaaaggtttaaatgctaaccaaagcaatttatttttaattaatatttttagactctgtgctgtcatactgaactcactgctagctaagagacctatcagagatttagatatattttctccaggttttttgtgggttttctttgttgttgttgttgttctagccatgtgacagaggctctttctaaaagtatgtagttcgctgtgtgtcggctccagcagtaaccgtcctcactgcgccacgcactcctctgtagatgtgtgcccagtgggagttccttccagccccaggaccgcagcagcagccaggtgccgagtggattgagtgccaggtgcatccaagactttccctcccttccagaaggcactgactgaagacaggatggatcatgcggagccggctgaaatgctccaactttttcaaagtgtgggtggtccagtttggactgatgggaatcttcttgtcattctttttaaacggatgataccgatggaaataaaaggtgggaaatatattcaaaaattgtcaccctaattttgcattaatttactcagcctccccagctgtaggtgttgaaagtgtctgggtgactagctcttcattttgattgcaggatgtctgtttccactgagttttgtgaggagatgatggaaggatgatctcagaagcagagggcatctgctgtgaaagatgccgcacgccaagcggggctggggtgcatcctgggcaggggactgaaatgtacctgtcagggtttgcctcagaagtgcctggtgagctgaggt

SEQ ID NO: 330869 - DNA, 2954 bp, Homo sapiens
atatgcggacagctcggcgcttcacgacgatgatatctgggcattgacctagagactgcgaagcaaatacaactagggaaaacccttgaagaacaaggcgtggctcacaatgtgaaagcgatggtgcttgaactaaaacaatctgaagaggacgcgaggaaaaacttccagttagaggaagaggagcaaaatgaggccaaactcaaagaaaaacaaattcagaggaccaagagaggactagaaatactggcaaagagagcagcagagacagtggtggatccagaaatgacaccgtacttagacatagctaaccagacaggcagatcaatcagaattcccccatcagaaagaaaagcccttatgttagctatgggatatcatgagaagggcagagctttcctgaaaagaaaagaatatggaatagccttgccatgtctgttggacgctgacaaatatttctgtgagtgttgcagagagctgctggacacagtggataactatgccgtcctccagctggatatagtgtggtgttacttccgcctggaacagctggaatgccttgatgatgcagaaaaaaaattaaacttggcccagaaatgctttaaaaattgttacggagaaaatcatcagagactggtccacataaaaggaaattgtgggaaagagaaggtactgtttctaagactctacttacttcaagggatccgaaactatcacagtggaaatgatgtagaggcttatgagtatcttaacaaggcacgtcagctctttaaagagctatatattgatccatcaaaagtggacaatttgttgcagttggggtttactgcccaggaagcccggcttggcctgagggcgtgtgatgggaacgtggatcatgcggccactcatattaccaaccgcagagaggaactggcccaaataaggaaggaggaaaaagagaagaaaagacgccgcctcgagaacatcaggtttctgaaagggatgggctactccacgcacgcggcccagcagattctgctcagcaatcctcagatgtggtggttaaatgattccaatcctgaaaccgacaaccgtcaagaaagtccttcccaggaaaacattgaccgattggtgtacatgggttttgatgcactcgtggccgaagctgcgctgagagtgttcagaggcaacgtccagctggccgcccagacccttgctcacaacggaggaagcctgcctcccgagctgccgctgtcgccagaagactctttgtccccgccagccacgtccccttctgactccgcaggaacctctagtgcctcaacagacgaagacatggagacagaggccgtcaatgagatactggaagacattccagagcatgaggaagactatcttgactcaactctggaagatgaagaaattattattgcagagtacctatcctatgtagaaaataggaagtcagcaacaaagaaaaactaaataatgaacagaaatagcgctaattttctgcttataaatgctatcattatgaaaaggctaatgcagctctttctgttcttactttttatctgaattacaagtcctctttgggtgtaggagggggtgggcaggggacaagtccaggaggggtcccagggccttcatgcatggtctcggggaagaagcttcctctggcctggcgcaggccgttccatctgcctcccaggtctgcgtccctaaccccttccccagcttggtgttttaccccgaaacaggaaggaacaggggtcctgtagaacaggggtcctggggaaggtgtccagggcagggtcctgggaagggtgtcccgactgcttcctctccagctgtggctccatctgcccagcttgcctgcctcctgcacccactgccctgaccttcctgcttcccacgctgccatctctgccagggtgccacatgggttcctgtgccaccctttccccgcccctcaaatcgtcctttaagtcttccttccaagtgctgtggggcataacgatgaggcgctggccttgggggccacaccaggtcgcagcaaatggcttcagcctgggacgccagtgttttatgctcttagttcagtaaaatacgcccccgaaattcaagattgagtgtcaggctttatatatattcagcattcctcattacagaaatcttctattgaatgggaaaggtttaaatgctaaccaaagcaatttatttttaattaatatttttagactctgtgctgtcatactgaactcactgctagctaagagacctatcagagatttagatatattttctccaggttttttgtgggttttctttgttgttgttgttgttctagccatgtgacagaggctctttctaaaagtatgtagttcgctgtgtgtcggctccagcagtaaccgtcctcactgcgccacgcactcctctgtagatgtgtgcccagtgggagttccttccagccccaggaccgcagcagcagccaggtgccgagtggattgagtgccaggtgcatccaagactttccctcccttccagaaggcactgactgaagacaggatggatcatgcggagccggctgaaatgctccaactttttcaaagtgtgggtggtccagtttggactgatgggaatcttcttgtcattctttttaaacggatgataccgatggaaataaaaggtgggaaatatattcaaaaattgtcaccctaattttgcattaatttactcagcctccccagctgtaggtgttgaaagtgtctgggtgactagctcttcattttgattgcaggatgtctgtttccactgagttttgtgaggagatgatggaaggatgatctcagaagcagagggcatctgctgtgaaagatgccgcacgccaagcggggctggggtgcatcctgggcaggggactgaaatgtacctgtcagggtttgcctcagaagtgcctggtgagctgaggt

SEQ ID NO: 330870 - DNA, 3334 bp, Homo sapiens
ggcctggtgcagctgaaggggaagcaaagggagctggcgctgtgggcactccagggccacaccaggaggttctcctgtgatagagacaggccatgagtctacagatgtcttcatccctggagatgtttccagcagccactctgttctgcctgctcctactgtggggcctgtggagtctggttccacaatgatgatgcttttgttttcctaagagatgaggccgctttcctgctgtggggaaaatgcagggaggcgcctgttgcctgggctgggcaggaggcaggatcaggtctctggaaggaaggagtctgttttctcccccgtcctcgctgctgctgatggtggggctggtctccctgggagaatgtagcaagtcacttaactttgttgaaagctttctgtctccttgttgggaaaataatgaggttggattaaattcctggttttcaaacttgctttgttgttgttgtttttaagcagcaaaatcccctttttaaatgacatttttatggggatactagtttacaaaataaattgggaactctcctgattggccctgggtgggagaggtgaagagactagaaccctctgcagccgtcctgcgctcctgcagcaatagcaggcaactctgagaaacagggttgagaaccaagaggttagatgacctttgtctctgggcactctgtgggttccgaatggaatgacaggcctcagaaggccctggagtccttgctccccaggctgtggggggcgggtcaccagctttggcattgcccaggagcccctgattccacatcacattttaacttgaatccctgggcgattcatcgaaggctggaaggccttcccaccgcgtgcagaagctctcctacccggttcctacctggttcctagaagagaatccatgcacctcacacccgcgacctctgcagtgggagtgctgggttggcgagcagcccatcctgatgccggatggtggatggcggggctggcgaggcacctccttcctgccccacgggcatctcacttccactgcctgcctcagaagcagcacttccaccacccctctgcctctgtggcacctctgccatttggctgggtgaggagaggtagaaagagggccccctgtgctttgctttggttttttggctttgcctggaaatgcggagaatcctgcagagcgcagactgagaggctgtgaaatctcagtccctaacttgggatgggactttgctgttttcctaaaggaactggcccaaataaggaaggaggaaaaagagaagaaaagacgccgcctcgagaacatcaggtttctgaaagggatgggctactccacgcacgcggcccagcaggtactccacgcagccagcgggaacttggatgaggccctgaagattctgctcagcaatcctcagatgtggtggttaaatgattccaatcctgaaaccgacaaccgtcaagaaagtccttcccaggaaaacattgaccgattggtgtacatgggttttgatgcactcgtggccgaagctgcgctgagagtgttcagaggcaacgtccagctggccgcccagacccttgctcacaacggaggaagcctgcctcccgagctgccgctgtcgccagaagactctttgtccccgccagccacgtccccttctgactccgcaggaacctctagtgcctcaacagacgaagacatggagacagaggccgtcaatgagatactggaagacattccagagcatgaggaagactatcttgactcaactctggaagatgaagaaattattattgcagagtacctatcctatgtagaaaataggaagtcagcaacaaagaaaaactaaataatgaacagaaatagcgctaattttctgcttataaatgctatcattatgaaaaggctaatgcagctctttctgttcttactttttatctgaattacaagtcctctttgggtgtaggagggggtgggcaggggacaagtccaggaggggtcccagggccttcatgcatggtctcggggaagaagcttcctctggcctggcgcaggccgttccatctgcctcccaggtctgcgtccctaaccccttccccagcttggtgttttaccccgaaacaggaaggaacaggggtcctgtagaacaggggtcctggggaaggtgtccagggcagggtcctgggaagggtgtcccgactgcttcctctccagctgtggctccatctgcccagcttgcctgcctcctgcacccactgccctgaccttcctgcttcccacgctgccatctctgccagggtgccacatgggttcctgtgccaccctttccccgcccctcaaatcgtcctttaagtcttccttccaagtgctgtggggcataacgatgaggcgctggccttgggggccacaccaggtcgcagcaaatggcttcagcctgggacgccagtgttttatgctcttagttcagtaaaatacgcccccgaaattcaagattgagtgtcaggctttatatatattcagcattcctcattacagaaatcttctattgaatgggaaaggtttaaatgctaaccaaagcaatttatttttaattaatatttttagactctgtgctgtcatactgaactcactgctagctaagagacctatcagagatttagatatattttctccaggttttttgtgggttttctttgttgttgttgttgttctagccatgtgacagaggctctttctaaaagtatgtagttcgctgtgtgtcggctccagcagtaaccgtcctcactgcgccacgcactcctctgtagatgtgtgcccagtgggagttccttccagccccaggaccgcagcagcagccaggtgccgagtggattgagtgccaggtgcatccaagactttccctcccttccagaaggcactgactgaagacaggatggatcatgcggagccggctgaaatgctccaactttttcaaagtgtgggtggtccagtttggactgatgggaatcttcttgtcattctttttaaacggatgataccgatggaaataaaaggtgggaaatatattcaaaaattgtcaccctaattttgcattaatttactcagcctccccagctgtaggtgttgaaagtgtctgggtgactagctcttcattttgattgcaggatgtctgtttccactgagttttgtgaggagatgatggaaggatgatctcagaagcagagggcatctgctgtgaaagatgccgcacgccaagcggggctggggtgcatcctgggcaggggactgaaatgtacctgtcagggtttgcctcagaagtgcctggtgagctgaggt

SEQ ID NO: 330871 - DNA, 1379 bp, Homo sapiens
cagagtccaaacagtgctcagagtccaaacagtgctcagagtccaaacagtgcccatgcatggtctcggggaagaagcttcctctggcctggcgcaggccgttccatctgcctcccaggtctgcgtccctaaccccttccccagcttggtgttttaccccgaaacaggaaggaacaggggtcctgtagaacaggggtcctggggaaggtgtccagggcagggtcctgggaagggtgtcccgactgcttcctctccagctgtggctccatctgcccagcttgcctgcctcctgcacccactgccctgaccttcctgcttcccacgctgccatctctgccagggtgccacatgggttcctgtgccaccctttccccgcccctcaaatcgtcctttaagtcttccttccaagtgctgtggggcataacgatgaggcgctggccttgggggccacaccaggtcgcagcaaatggcttcagcctgggacgccagtgttttatgctcttagttcagtaaaatacgcccccgaaattcaagattgagtgtcaggctttatatatattcagcattcctcattacagaaatcttctattgaatgggaaaggtttaaatgctaaccaaagcaatttatttttaattaatatttttagactctgtgctgtcatactgaactcactgctagctaagagacctatcagagatttagatatattttctccaggttttttgtgggttttctttgttgttgttgttgttctagccatgtgacagaggctctttctaaaagtatgtagttcgctgtgtgtcggctccagcagtaaccgtcctcactgcgccacgcactcctctgtagatgtgtgcccagtgggagttccttccagccccaggaccgcagcagcagccaggtgccgagtggattgagtgccaggtgcatccaagactttccctcccttccagaaggcactgactgaagacaggatggatcatgcggagccggctgaaatgctccaactttttcaaagtgtgggtggtccagtttggactgatgggaatcttcttgtcattctttttaaacggatgataccgatggaaataaaaggtgggaaatatattcaaaaattgtcaccctaattttgcattaatttactcagcctccccagctgtaggtgttgaaagtgtctgggtgactagctcttcattttgattgcaggatgtctgtttccactgagttttgtgaggagatgatggaaggatgatctcagaagcagagggcatctgctgtgaaagatgccgcacgccaagcggggctggggtgcatcctgggcaggggactgaaatgtacctgtcagggtttgcctcagaagtgcctggtgagctgaggt

SEQ ID NO: 330872 - DNA, 3959 bp, Homo sapiens
  misc_feature (2023)..(2023): n is a, c, g, or t
  misc_feature (2456)..(2456): n is a, c, g, or t
  misc_feature (2617)..(2617): n is a, c, g, or t
ccggaatgaaaacaaacggcggccgctgccgcatccgggcactctgctggtcgcggcgggagtggcgtggcgcagggatggcacaaaagaaatatcttcaagcaaaattgacccagtttttaagggaagacaggattcaactttggaaacctccatatacagatgaaaataaaaaagttggtttggcattaaaggaccttgctaagcagtactctgacagactagaatgctgtgaaaatgaagtagaaaaggtaatagaagaaatacgttgcaaggcaattgagcgtggaacaggaaatgacaattatagaacaacgggaattgctacaatcgaggtgtttttaccaccaagactaaaaaaagataggaaaaacttgttggagacccgattgcacatcactggcagagaactgaggtccaaaatagctgaaacctttggacttcaagaaaattatatcaaaattgtcataaataagaagcaactacaactagggaaaacccttgaagaacaaggcgtggctcacaatgtgaaagcgatggtgcttgaactaaaacaatctgaagaggacgcgaggaaaaacttccagttagaggaagaggagcaaaatgaggccaaactcaaagaaaaacaaattcagaggaccaagagaggactagaaatactggcaaagagagcagcagagacagtggtggatccagaaatgacaccgtacttagacatagctaaccagacaggcagatcaatcagaattcccccatcagaaagaaaagcccttatgttagctatgggatatcatgagaagggcagagctttcctgaaaagaaaagaatatggaatagccttgccatgtctgttggacgctgacaaatatttctggtaggcgcttttgtacttggtgaacaccagctttaaggaagatggcccagactatacagaacaccctgccatgcccttgagactgcagactttcatctacaacagtggttaatgtaaaagagtagttatggtgtaaactggtgaatttcttcttccctttgtatttctaattgacctttcctccctgtaaagaaaagaattttcaagcaggtaggatatcctctcttcttctgtacatgtgctatgttgctagtcggaactttccattataaagtttcctgtcagcttttcacctaatggttttggggtagtattgatgattattcctcaaatccgttgtttaagagctgtataatggtgatattattccttctgtacttattttttttgagacagagtctcactctgtcacccaggctggaatgcagtggcatgatctcagctcactgcaacttccatctcctgggctcaagtgatcctcccacctcagcctcctaagtagctgggatcacaggtgcacatcaccacaggtgcacatcaccatgcccagataatttttttgtatttgttgtagagatgaggtttcactatgttgcccatgctagtctcaaactcctgggctcaagtgatccacccaccacagcctctcaaagtgctgggattacaggtgtgagccaccgcacccagcctcccttctgcatttattgctggaattctgaaaaatttgtttttgctcatcagttattttatatgtggaggtacaatttgtataggaaagttagaataaaatactttgtttctttctccttattttcttgttttcagaataaatgagttgcttcactatcaccctccaaaggtgaccaaagaggtttctttttcttttcattttcttaagtgtcattattaactcatggatttaaaacatttgatgtgtttcaaacttcagtgcttaaattggtcatgctggctggcaggcagcccatgtttttttgacctgaccctgctagtctttgcagtctctgatttctggaatccaaagatactccaggctcatcttgggcatttaatgcccagaccaggaatcagcaatttcccaaggagtcctggttcctcttcatgggaaacggtactaagagactatgntgcagacatattcaacatttgaaaagtagacttgattttttgaaaatggtcaaaagttaacaaatttagtgttaacttcttttctgttttggtgcattcccaagataatactgtatactcccagaagatgaatgcaaatatttatagttttccattggtcagtgcctttgggttctaagtgaacaagtcccaactttaacgtacacaaaaaaggaattgggaggggaggggccgggctgggaatagtgagaatgagggctggtttgtgcttctggggtctctgtctctgcctctttctggatgtcagtttcattctcttctgcaaacagtgtagggtaaacaggctttaaattaggtcctaaaagtttaggtaaatttttcattcccttccatagttgtttctaattttttattatggaaaatttcaaatagncataaaaataaaaattagtataatgagcttccatatacactcataactaagcttctgcagttataaagacatggttgatcttcatacatctgtgtgagcctccctcaatctttttatcctggacaaatccttgaaataatttttaggtctcagggaaccantgaatacaaatttggctacatcttcagttcatgatacattaacatgtccggtaagtggtaggtataataatgaaataataattaacaatgtctttctaagtagagaaagtttttttttcctgggcatctatttatcctgggcatctatttatcctggccaacttgtagcatatttttgtgtgtgtgtgatttctctcttttcataaaggaaatcagcagtaatgtaagccaaatagaatgcagatggaggaaacttcagtttttccatttccttttccatttgacttttcccccttacttctccaagtaagctagaagttttgtcacaacttcctaccatatgtcttggagtatggtatgtagtatgaccaagaatagtttctttccccaaattgtatgaaacagtgacttcctggcagtgcagaacggtgaccctgaggtagggaaacatgaggggagctcagtgtctggagaagtttcaggttacggggcagggagggcaaacccaggcagagccttgtgctccctggagttaaagagatggagctgggcttgcaggaggccaaggaggtgagaggagcaagctgccagagagagggtgtcagagagcttcagaggagcccttttgagtcttctgctcagtaatgatcagcacatgtgtgtgaggaaaccgcccagggctgggcaaggtaccacatgaaagaagcagggaataatcctccgagttcatagaaggccaggaatagtttatgttcccaccagccagagtggaggatttggtagtcacagggcgtcaaatagagtcttcagaagggtgttgcctcagcactagggcataatttggtttcacttaataaagcttaaaagctactcctgaacagtacccttaacttaccgttttcaaataagtgcatccctaacaaaactcaataatttagcaattcaaaaatatccagcatccactgaaaaattagcaggcatgcaaagaaacaagcaaatgtaacctataacaagcaaaaaaatcagtcagtagcaacagatccagaagtgacacagaagatagaattagtagacaaggacattaaaacagtgactgtaatccatctgctgaagaaggcagaggaacaactgaacatgtcagataaagacatgggagacattcaaaagacccacattagaatgtaagagatgaaaagtacaacatccaagatgaaaagtacattaggtgggatgaactgcagaatagacactatagaagagaagattagttaaatgttacataaggcaatagaaactatctgaaaaaacagagaaaaggctaaaaaaaaaaaaaaatgaacag

SEQ ID NO: 330873 - DNA, 1288 bp, Homo sapiens
  misc_feature (1266)..(1266): n is a, c, g, or t
ccggaatgaaaacaaacggcggccgctgccgcatccgggcactctgctggtcgcggcgggagtggcgtggcgcagggatggcacaaaagaaatatcttcaagcaaaattgacccagtttttaagggaagacaggattcaactttggaaacctccatatacagatgaaaataaaaaagttggtttggcattaaaggaccttgctaagcagtactctgacagactagaatgctgtgaaaatgaagtagaaaaggtaatagaagaaatacgttgcaaggcaattgagcgtggaacaggaaatgacaattatagaacaacgggaattgctacaatcgaggtgtttttaccaccaagactaaaaaaagataggaaaaacttgttggagacccgattgcacatcactggcagagaactgaggtccaaaatagctgaaacctttggacttcaagaaaattatatcaaaattgtcataaataagaagcaactacaactagggaaaacccttgaagaacaaggcgtggctcacaatgtgaaagcgatggtgcttgaactaaaacaatctgaagaggacgcgaggaaaaacttccagttagaggaagaggagcaaaatgaggccaaactcaaagaaaaacaaattcagaggaccaagagaggactagaaatactggcaaagagagcagcagagacagtggtggatccagaaatgacaccgtacttagacatagctaaccagacaggcagatcaatcagaattcccccatcagaaagaaaagcccttatgttagctatgggatatcatgagaagggcagagctttcctgaaaagaaaagaatatggaatagccttgccatgtctgttggacgctgacaaatatttctgtgagtgttgcagagagctgctggacacagtggataactatgccgtcctccagctggatatagtgtggtgttacttccgcctggaacagctggaatgccttgatgatgcagaaaaaaaattaaacttggcccagaaatgctttaaaaattgttacggagaaaatcatcagagactggtccacataaaaggaaattgtgggaaagagaaggtactgtttctaagactctacttacttcaagggatccgaaactatcacagtggaaatgatgtagaggcttatgagtatcttaacaaggcacgtcagctctttaaagagctatatattgatccatcaaaagtggacaatttgttgcagttggggtttactgcccaggaagcctcgacatgtncggggtcctctagagcgccgca

SEQ ID NO: 330874 - DNA, 723 bp, Homo sapiens
  misc_feature (679)..(680): n is a, c, g, or t
ccggaatgaaaacaaacggcggccgctgccgcatccgggcactctgctggtcgcggcgggagtggcgtggcgcagggatggcacaaaagaaatatcttcaagcaaaattgacccagtttttaagggaagacaggattcaactttggaaacctccatatacagatgaaaataaaaaagttggtttggcattaaaggaccttgctaagcagtactctgacagactagaatgctgtgaaaatgaagtagaaaaggtaatagaagaaatacgttgcaaggcaattgagcgtggaacaggaaatgacaattatagaacaacgggaattgctacaatcgaggtgtttttaccaccaagactaaaaaaagataggaaaaacttgttggagacccgattgcacatcactggcagagaactgaggtccaaaatagctgaaacctttggacttcaagaaaattatatcaaaattgtcataaataagaagcaactacaactagggaaaacccttgaagaacaaggcgtggctcacaatgtgaaagcgatggtgcttgaactaaaacaatctgaagaggacgcgaggaaaaacttccagttagaggaagaggagcaaaatgaggccaaactcaaagaaaaacaaattcagaggaccaagagaggactagaaatactggcaaagagagcagnngagacagtgggtgagttgtccagtggtgcagatgtcggacgcc

SEQ ID NO: 330875 - DNA, 4015 bp, Homo sapiens
  misc_feature (1)..(2): n is a, c, g, or t
  misc_feature (5)..(5): n is a, c, g, or t
  misc_feature (7)..(8): n is a, c, g, or t
nncangnngcaaggtcacgtcctgtccccacctttcgcccctcaccccagctcccccaacgccaaagacaaggttaagaaagtgatatcgcgaaatagttttttaaagcattttattgcattttatgacttggagtttatgtgaaacctcaacggtattagccgaacagcctgccgcaccttccgggagttccagagtgggcctacaactcccacagggctccgcgagcgccggacggacagactacaattcccgacaggcagcgcggctggcggggcggttcgcggcggtgcccacaggacctcagggcgagtgcgggctgccccgcgcggcgcccgcaggaccccggcggctacccatgccgaggtgagtccgcgggagccgccgccgccgccgtcccgtcccagctgccgccccgcgcggccccgccgccggccaggatgctggaggaagcgggcgaggtgctggagaacatgctgaaggcgtcttgtctgcctctcggcttcatcgtcttcctgcccgctgtgctgctgctggtggcgccgccgctgcctgccgccgacgccgcgcacgagttcaccgtgtaccgcatgcagcagtacgacctgcagggccagccctacggcacacggaatgcagtgctgaacacggaggcgcgcacgatggcggcggaggtgctgagccgccgctgcgtgctcatgcggctactggacttctcctacgagcagtaccagaaggccctgcggcagtcggcgggcgccgtggtcatcatcctgcccagggccatggccgccgtgccccaggacgtcgtccggcaattcatggagatcgagccggagatgctggccatggagaccgccgtccccgtgtactttgccgtggaggacgaggccctgctgtctatctacaagcagacccaggctgcctccgcctcccagggctccgcctctgctgctgaagtactgctgcgcacggccactgccaacggcttccagatggtcaccagcggggtacagagcaaggccgtgagtgactggctgattgccagcgtggaggggcggctgacggggctgggcggagaggaccttcccaccatcgtcatcgtggcccactacgacgcctttggagtggccccctggctgtcgctgggcgcggactccaacgggagcggcgtctctgtgctgctggagctggcacgcctcttctcccggctctacacctacaagcgcacgcacgccgcctacaacctcctgttctttgcgtctggaggaggcaagtttaactaccagggaaccaagcgctggctggaagacaacctggaccacacagactccagcctgcttcaggacaatgtggccttcgtgctgtgcctggacaccgtgggccggggcagcagcctgcacctgcacgtgtccaagccgcctcgggagggcaccctgcagcacgccttcctgcgggagctggagacggtggccgcgcaccagttccctgaggtacggttctccatggtgcacaagcggatcaacctggcggaggacgtgctggcctgggagcacgagcgcttcgccatccgccgactgcccgccttcacgctgtcccacctggagagccaccgtgacggccagcgcagcagcatcatggacgtgcggtcccgggtggattctaagaccctgacccgtaacacgaggatcattgcagaggccctgactcgagtcatctacaacctgacagagaaggggacacccccagacatgccggtgttcacagagcagatgcagatccagcaggagcagctggactcggtgatggactggctcaccaaccagccgcgggccgcgcagctggtggacaaggacagcaccttcctcagcacgctggagcaccacctgagccgctacctgaaggacgtgaagcagcaccacgtcaaggctgacaagcgggacccagagtttgtcttctacgaccagctgaagcaagtgatgaatgcgtacagagtcaagccggccgtctttgacctgctcctggctgttggcattgctgcctacctcggcatggcctacgtggctgtccagcacttcagcctcctctacaagaccgtccagaggctgctcgtgaaggccaagacacagtgacacagccacccccacagccggagcccccgccgctccacagtccctggggccgagcacgagtgagtggacactgccccgccgcgggcggccctgcagggacaggggccctctccctccccggcggtggttggaacactgaattacagagcttttttctgttgctctccgagactggggggggattgtttcttcttttccttgtctttgaacttccttggaggagagcttgggagacgtcccggggccaggctacggacttgcggacgagccccccagtcctgggagccggccgccctcggtctggtgtaagcacacatgcacgattaaagaggagacgccgggaccccctgcccgatcgcgcgcggcctccgcccaccgcctcctgccgcaaggggcctggactgcaggcctgacctgctccctgctccgtgtctgtcctaggacgtcccctcccgctccccgatggtggcgtggacatggttatttatctctgctccttcttgcctggaggagggcagtgccagccctggggttctgggattccagccctcctggagccttttgttccccatgtggtctcagtgacccgtccccctgacagtgggctcggggagctgcatcacccagccttccccttctccgactgcagggtctgatgtcatcgttgacagcctttgcttcgtgggggcctggcagggcccctgcctccccgacccccgacccactgcaaatccccgttcccctgcactcctcttctcccagcccatccctccggcccctgtgcctctgcggccccagcccagctcccagggccgtcacctgcttggccctggcccagctccctgccctgagtcctgagccagtgcctggtgtttcctgggctcggtactgggcccccaggccatccaggctttgccacggccagttggtcctccctggggaactgggtgcgggtggagtactgggaggcaggaggtggcccggggaggccttgtggctcctcccctcgctcctcgccctgggcctcagcttcctcatcaatagaaaggatgtgttcggggtgggggcgtcaggtgagaacgtttgctgggaaggagaggacttggggcatggcctctggggccacccttcctggaactcagagaggaaggtccgggccctcgggaagccttggacagaaccctccaccccgcagaccaggcgtcgtgtgtgtgtgggagagaaggaggcccgtgttgagctcagggagaccccggtgtgtccgttctttagcaatataacctacccagtgcgtgccgagcaggcttggtggggaagggacttgagctgggcaagtcctggcctggcacccgcagccgtctcccttccgtggcccagggaggtgtttgctgtccgaaggacctgggccggcccatgggagcctggggttctgtccagataggaccagggggtctcactttggccaccagttcttcggccagcacctctgccctccagaacctgcagcctggaggggtgaggggacaaccacccctctttcctccaggttggcaggggaccctcttctcccgtctgccctgcgggttgcccgcctcctccagagacttgcccaagggcccatcaccactggcctctgggcacttgtgctgagactctgggacccaggcagctgccaccttgtcaccatgagagaatttggggagtgcttgcatgctagccagcaggctcctgtctgggtgccacggggccagcattttggagggagcttccttccttccttcctggacaggtcgtcatgatggatgcactgactgaccgtctggggctcaggctggtgtgggatgcagccggccgatgagaaaataaagccatattgaatgatc

SEQ ID NO: 330876 - DNA, 836 bp, Homo sapiens
gccctctccctctccctagtactgctgcgcacggccactgccaacggcttccagatggtcaccagcggggtacagagcaaggccgtgagtgactggctgattgccagcgtggaggggcggtgacggggctgggcggagaggcaaatatgaagtgtcctcaaattgtaattgctttttatgaagagagactaacttggcattcttgtccagaagatgaagctcaataattgttcacattgttcttttatatatatttatatatatatataaaaattgggtcttagatttgatttactagtgtgacaaaataactacatcctaatgaaaatcaagttgatatgttgtttgaaagtagcgtggaagagtgtgggggtttttgatccatagcactggttactttgaacaaataaataaaagctttctgtagttgttcctttatcagaaaagaacatttgataccatggtatatcatttcctcttcattaaagaacagttttctaaatgtgggggaaatgtccatagtcattactcagtcaaaaactgtgtgttctcatgagcctaaggaacattctagattattacgggttcgtgtgtgtgtgcgtgtggtgtgtgtggtatccatacaatggatattggtaactttttttggttttaagcattcaccaaaaagaaaattcacggtaaacccatgtttctgagttgcttttcaaggaaatagaagataatccttagttaatggaaatttctgaacctcattcggaaaagtttgaaaggcacaggggaaacggcgtaggggggtttggcagccaaagaaaattgggcgcaggggtccagga

SEQ ID NO: 330877 - DNA, 3732 bp, Homo sapiens
  misc_feature (1)..(2): n is a, c, g, or t
  misc_feature (5)..(5): n is a, c, g, or t
  misc_feature (7)..(8): n is a, c, g, or t
nncangnngcaaggtcacgtcctgtccccacctttcgcccctcaccccagctcccccaacgccaaagacaaggttaagaaagtgatatcgcgaaatagttttttaaagcattttattgcattttatgacttggagtttatgtgaaacctcaacggtattagccgaacagcctgccgcaccttccgggagttccagagtgggcctacaactcccacagggctccgcgagcgccggacggacagactacaattcccgacaggcagcgcggctggcggggcggttcgcggcggtgcccacaggacctcagggcgagtgcgggctgccccgcgcggcgcccgcaggaccccggcggctacccatgccgaggtgagtccgcgggagccgccgccgccgccgtcccgtcccagctgccgccccgcgcggccccgccgccggccaggatgctggaggaagcgggcgaggtgctggagaacatgctgaaggcgtcttgtctgcctctcggcttcatcgtcttcctgcccgctgtgctgctgctggtggcgccgccgctgcctgccgccgacgccgcgcacgagttcaccgtgtaccgcatgcagcagtacgacctgcagggccagccctacggcacacggaatgcagtgctgaacacggaggcgcgcacgatggcggcggaggtgctgagccgccgctgcgtgctcatgcggctactggacttctcctacgagcagtaccagaaggccctgcggcagtcggcgggcgccgtggtcatcatcctgcccagggccatggccgccgtgccccaggacgtcgtccggcaattcatggagatcgagccggagatgctggccatggagaccgccgtccccgtgtactttgccgtggaggacgaggccctgctgtctatctacaagcagacccaggctgcctccgcctcccagggctccgcctctgctgctgaagtactgctgcgcacggccactgccaacggcttccagatggtcaccagcggggtacagagcaaggccgtgagtgactggctgattgccagcgtggaggggcggctgacggggctgggcggagaggaccttcccaccatcgtcatcgtggcccactacgacgcctttggagtggccccctggctgtcgctgggcgcggactccaacgggagcggcgtctctgtgctgctggagctggcacgcctcttctcccggctctacacctacaagcgcacgcacgccgcctacaacctcctgttctttgcgtctggaggaggcaagtttaactaccagggaaccaagcgctggctggaagacaacctggaccacacagactccagcctgcttcaggacaatgtggccttcgtgctgtgcctggacaccgtgggccggggcagcagcctgcacctgcacgtgtccaagccgcctcgggagggcaccctgcagcacgccttcctgcgggagctggagacggtggccgcgcaccagttccctgaggtacggttctccatggtgcacaagcggatcaacctggcggaggacgtgctggcctgggagcacgagcgcttcgccatccgccgactgcccgccttcacgctgtcccacctggagagccaccgtgacggccagcgcagcagcatcatggacgtgcggtcccgggtggattctaagaccctgacccgtaacacgaggatcattgcagaggccctgactcgagtcatctacaacctgacagagaaggggacacccccagacatgccggtgttcacagagcagatgcagatccagcaggagcagctggactcggtgatggactggctcaccaaccagccgcgggccgcgcagctggtggacaaggacagcaccttcctcagcacgctggagcaccacctgagccgctacctgaaggacgtgaagcagcaccacgtcaaggctgacaagcgggacccagagtttgtcttctacgaccagctgaagcaagtgatgaatgcgtacagagtcaagccggccgtctttgacctgctcctggctgttggcattgctgcctacctcggcatggcctacgtggctgtccagcacttcagcctcctctacaagaccgtccagaggctgctcgtgaaggccaagacacagtgacacagccacccccacagccggagcccccgccgctccacagtccctggggccgagcacgagtgagtggacactgccccgccgcgggcggccctgcagggacaggggccctctccctccccggcggtggttggaacactgaattacagagcttttttctgttgctctccgagactggggggggattgtttcttcttttccttgtctttgaacttccttggaggagagcttgggagacgtcccggggccaggctacggacttgcggacgagccccccagtcctgggagccggccgccctcggtctggtgtaagcacacatgcacgattaaagaggagacgccgggaccccctgcccgatcgcgcgcggcctccgcccaccgcctcctgccgcaaggggcctggactgcaggcctgacctgctccctgctccgtgtctgtcctaggacgtcccctcccgctccccgatggtggcgtggacatggttatttatctctgctccttcttgcctggaggagggcagtgccagccctggggttctgggattccagccctcctggagccttttgttccccatgtggtctcagtgacccgtccccctgacagtgggctcggggagctgcatcacccagccttccccttctccgactgcagggtctgatgtcatcgttgacagcctttgcttcgtgggggcctggcagggcccctgcctccccgacccccgacccactgcaaatccccgttcccctgcactcctcttctcccagcccatccctccggcccctgtgcctctgcggccccagcccagctcccagggccgtcacctgcttggccctggcccagctccctgccctgagtcctgagccagtgcctggtgtttcctgggctcggtactgggcccccaggccatccaggctttgccacggccagttggtcctccctggggaactgggtgcgggtggagtactgggaggcaggaggtggcccggggaggccttgtggctcctcccctcgctcctcgccctgggcctcagcttcctcatcaatagaaaggatgtgttcggggtgggggcgtcaggtgagaacgtttgctgggaaggagaggacttggggcatggcctctggggccacccttcctggaactcagagaggaaggtccgggccctcgggaagccttggacagaaccctccaccccgcagaccaggcgtcgtgtgtgtgtgggagagaaggaggcccgtgttgagctcagggagaccccggtgtgtccgttctttagcaatataacctacccagtgcgtgccgagcaggcttggtggggaagggaacttgcccaagggcccatcaccactggcctctgggcacttgtgctgagactctgggacccaggcagctgccaccttgtcaccatgagagaatttggggagtgcttgcatgctagccagcaggctcctgtctgggtgccacggggccagcattttggagggagcttccttccttccttcctggacaggtcgtcatgatggatgcactgactgaccgtctggggctcaggctggtgtgggatgcagccggccgatgagaaaataaagccatattgaatgatc

SEQ ID NO: 330878 - DNA, 4036 bp, Homo sapiens
  misc_feature (1)..(2): n is a, c, g, or t
  misc_feature (5)..(5): n is a, c, g, or t
  misc_feature (7)..(8): n is a, c, g, or t
nncangnngcaaggtcacgtcctgtccccacctttcgcccctcaccccagctcccccaacgccaaagacaaggttaagaaagtgatatcgcgaaatagttttttaaagcattttattgcattttatgacttggagtttatgtgaaacctcaacggtattagccgaacagcctgccgcaccttccgggagttccagagtgggcctacaactcccacagggctccgcgagcgccggacggacagactacaattcccgacaggcagcgcggctggcggggcggttcgcggcggtgcccacaggacctcagggcgagtgcgggctgccccgcgcggcgcccgcaggaccccggcggctacccatgccgaggtgagtccgcgggagccgccgccgccgccgtcccgtcccagctgccgccccgcgcggccccgccgccggccaggatgctggaggaagcgggcgaggtgctggagaacatgctgaaggcgtcttgtctgcctctcggcttcatcgtcttcctgcccgctgtgctgctgctggtggcgccgccgctgcctgccgccgacgccgcgcacgagttcaccgtgtaccgcatgcagcagtacgacctgcagggccagccctacggcacacggaatgcagtgctgaacacggaggcgcgcacgatggcggcggaggtgctgagccgccgctgcgtgctcatgcggctactggacttctcctacgagcagtaccagaaggccctgcggcagtcggcgggcgccgtggtcatcatcctgcccagggccatggccgccgtgccccaggacgtcgtccggcaattcatggagatcgagccggagatgctggccatggagaccgccgtccccgtgtactttgccgtggaggacgaggccctgctgtctatctacaagcagacccaggctgcctccgcctcccagggctccgcctctgctgctgaagtactgctgcgcacggccactgccaacggcttccagatggtcaccagcggggtacagagcaaggccgtgagtgactggctgattgccagcgtggaggggcggctgacggggctgggcggagaggaccttcccaccatcgtcatcgtggcccactacgacgcctttggagtggccccctggctgtcgctgggcgcggactccaacgggagcggcgtctctgtgctgctggagctggcacgcctcttctcccggctctacacctacaagcgcacgcacgccgcctacaacctcctgttctttgcgtctggaggaggcaagtttaactaccagggaaccaagcgctggctggaagacaacctggaccacacagactccagcctgcttcaggacaatgtggccttcgtgctgtgcctggacaccgtgggccggggcagcagcctgcacctgcacgtgtccaagccgcctcgggagggcaccctgcagcacgccttcctgcgggagctggagacggtggccgcgcaccagttccctgaggtacggttctccatggtgcacaagcggatcaacctggcggaggacgtgctggcctgggagcacgagcgcttcgccatccgccgactgcccgccttcacgctgtcccacctggagagccaccgtgacggccagcgcagcagcatcatggacgtgcggtcccgggtggattctaagaccctgacccgtaacacgaggatcattgcagaggccctgactcgagtcatctacaacctgacagagaaggggacacccccagacatgccggtgttcacagagcagatgcagatccagcaggagcagctggactcggtgatggactggctcaccaaccagccgcgggccgcgcagctggtggacaaggacagcaccttcctcagcacgctggagcaccacctgagccgctacctgaaggacgtgaagcagcaccacgtcaaggctgacaagcgggacccagagtttgtcttctacgaccagctgaagcaagtgatgaatgcgtacagagtcaagccggccgtctttgacctgctcctggctgttggcattgctgcctacctcggcatggcctacgtggctgtccaggtgagcagtgcccaggctcagcacttcagcctcctctacaagaccgtccagaggctgctcgtgaaggccaagacacagtgacacagccacccccacagccggagcccccgccgctccacagtccctggggccgagcacgagtgagtggacactgccccgccgcgggcggccctgcagggacaggggccctctccctccccggcggtggttggaacactgaattacagagcttttttctgttgctctccgagactggggggggattgtttcttcttttccttgtctttgaacttccttggaggagagcttgggagacgtcccggggccaggctacggacttgcggacgagccccccagtcctgggagccggccgccctcggtctggtgtaagcacacatgcacgattaaagaggagacgccgggaccccctgcccgatcgcgcgcggcctccgcccaccgcctcctgccgcaaggggcctggactgcaggcctgacctgctccctgctccgtgtctgtcctaggacgtcccctcccgctccccgatggtggcgtggacatggttatttatctctgctccttcttgcctggaggagggcagtgccagccctggggttctgggattccagccctcctggagccttttgttccccatgtggtctcagtgacccgtccccctgacagtgggctcggggagctgcatcacccagccttccccttctccgactgcagggtctgatgtcatcgttgacagcctttgcttcgtgggggcctggcagggcccctgcctccccgacccccgacccactgcaaatccccgttcccctgcactcctcttctcccagcccatccctccggcccctgtgcctctgcggccccagcccagctcccagggccgtcacctgcttggccctggcccagctccctgccctgagtcctgagccagtgcctggtgtttcctgggctcggtactgggcccccaggccatccaggctttgccacggccagttggtcctccctggggaactgggtgcgggtggagtactgggaggcaggaggtggcccggggaggccttgtggctcctcccctcgctcctcgccctgggcctcagcttcctcatcaatagaaaggatgtgttcggggtgggggcgtcaggtgagaacgtttgctgggaaggagaggacttggggcatggcctctggggccacccttcctggaactcagagaggaaggtccgggccctcgggaagccttggacagaaccctccaccccgcagaccaggcgtcgtgtgtgtgtgggagagaaggaggcccgtgttgagctcagggagaccccggtgtgtccgttctttagcaatataacctacccagtgcgtgccgagcaggcttggtggggaagggacttgagctgggcaagtcctggcctggcacccgcagccgtctcccttccgtggcccagggaggtgtttgctgtccgaaggacctgggccggcccatgggagcctggggttctgtccagataggaccagggggtctcactttggccaccagttcttcggccagcacctctgccctccagaacctgcagcctggaggggtgaggggacaaccacccctctttcctccaggttggcaggggaccctcttctcccgtctgccctgcgggttgcccgcctcctccagagacttgcccaagggcccatcaccactggcctctgggcacttgtgctgagactctgggacccaggcagctgccaccttgtcaccatgagagaatttggggagtgcttgcatgctagccagcaggctcctgtctgggtgccacggggccagcattttggagggagcttccttccttccttcctggacaggtcgtcatgatggatgcactgactgaccgtctggggctcaggctggtgtgggatgcagccggccgatgagaaaataaagccatattgaatgatc

SEQ ID NO: 330879 - DNA, 2532 bp, Homo sapiens
  misc_feature (1)..(2): n is a, c, g, or t
  misc_feature (5)..(5): n is a, c, g, or t
  misc_feature (7)..(8): n is a, c, g, or t
nncangnngcaaggtcacgtcctgtccccacctttcgcccctcaccccagctcccccaacgccaaagacaaggttaagaaagtgatatcgcgaaatagttttttaaagcattttattgcattttatgacttggagtttatgtgaaacctcaacggtattagccgaacagcctgccgcaccttccgggagttccagagtgggcctacaactcccacagggctccgcgagcgccggacggacagactacaattcccgacaggcagcgcggctggcggggcggttcgcggcggtgcccacaggacctcagggcgagtgcgggctgccccgcgcggcgcccgcaggaccccggcggctacccatgccgaggtgagtccgcgggagccgccgccgccgccgtcccgtcccagctgccgccccgcgcggccccgccgccggccaggatgctggaggaagcgggcgaggtgctggagaacatgctgaaggcgtcttgtctgcctctcggcttcatcgtcttcctgcccgctgtgctgctgctggtggcgccgccgctgcctgccgccgacgccgcgcacgagttcaccgtgtaccgcatgcagcagtacgacctgcagggccagccctacggcacacggaatgcagtgctgaacacggaggcgcgcacgatggcggcggaggtgctgagccgccgctgcgtgctcatgcggctactggacttctcctacgagcagtaccagaaggccctgcggcagtcggcgggcgccgtggtcatcatcctgcccagggccatggccgccgtgccccaggacgtcgtccggcaattcatggagatcgagccggagatgctggccatggagaccgccgtccccgtgtactttgccgtggaggacgaggccctgctgtctatctacaagcagacccaggctgcctccgcctcccagggctccgcctctgctgctgaagtactgctgcgcacggccactgccaacggcttccagatggtcaccagcggggtacagagcaaggccgtgagtgactggctgattgccagcgtggaggggcggctgacggggctgggcggagaggaccttcccaccatcgtcatcgtggcccactacgacgcctttggagtggccccctggctgtcgctgggcgcggactccaacgggagcggcgtctctgtgctgctggagctggcacgcctcttctcccggctctacacctacaagcgcacgcacgccgcctacaacctcctgttctttgcgtctggaggaggcaagtttaactaccagggaaccaagcgctggctggaagacaacctggaccacacagactccagcctgcttcaggacaatgtggccttcgtgctgtgcctggacaccgtgggccggggcagcagcctgcacctgcacgtgtccaagccgcctcgggagggcaccctgcagcacgccttcctgcgggagctggagacggtggccgcgcaccagttccctgaggtacggttctccatggtgcacaagcggatcaacctggcggaggacgtgctggcctgggagcacgagcgcttcgccatccgccgactgcccgccttcacgctgtcccacctggagagccaccgtgacggccagcgcagcagcatcatggacgtgcggtcccgggtggattctaagaccctgacccgtaacacgaggatcattgcagaggccctgactcgagtcatctacaacctgacagagaaggggacacccccagacatgccggtgttcacagagcagatgcagatccagcaggagcagctggactcggtgatggactggctcaccaaccagccgcgggccgcgcagctggtggacaaggacagcaccttcctcagcacgctggagcaccacctgagccgctacctgaaggacgtgaagcagcaccacgtcaaggctgacaagcgggacccagagtttgtcttctacgaccagctgaagcaagtgatgaatgcgtacagagtcaagccggccgtctttgacctgctcctggctgttggcattgctgcctacctcggcatggcctacgtggctgtccagcacttcagcctcctctacaagaccgtccagaggctgctcgtgaaggccaagacacagtgacacagccacccccacagccggagcccccgccgctccacagtccctggggccgagcacgaccaggttggcaggggaccctcttctcccgtctgccctgcgggttgcccgcctcctccagagacttgcccaagggcccatcaccactggcctctgggcacttgtgctgagactctgggacccaggcagctgccaccttgtcaccatgagagaatttggggagtgcttgcatgctagccagcaggctcctgtctgggtgccacggggccagcattttggagggagcttccttccttccttcctggacaggtcgtcatgatggatgcactgactgaccgtctggggctcaggctggtgtgggatgcagccggccgatgagaaaataaagccatattgaatgatc

SEQ ID NO: 330880 - DNA, 2285 bp, Homo sapiens
  misc_feature (1)..(2): n is a, c, g, or t
  misc_feature (5)..(5): n is a, c, g, or t
  misc_feature (7)..(8): n is a, c, g, or t
nncangnngcaaggtcacgtcctgtccccacctttcgcccctcaccccagctcccccaacgccaaagacaaggttaagaaagtgatatcgcgaaatagttttttaaagcattttattgcattttatgacttggagtttatgtgaaacctcaacggtattagccgaacagcctgccgcaccttccgggagttccagagtgggcctacaactcccacagggctccgcgagcgccggacggacagactacaattcccgacaggcagcgcggctggcggggcggttcgcggcggtgcccacaggacctcagggcgagtgcgggctgccccgcgcggcgcccgcaggaccccggcggctacccatgccgaggtgagtccgcgggagccgccgccgccgccgtcccgtcccagctgccgccccgcgcggccccgccgccggccaggatgctggaggaagcgggcgaggtgctggagaacatgctgaaggcgtcttgtctgcctctcggcttcatcgtcttcctgcccgctgtgctgctgctggtggcgccgccgctgcctgccgccgacgccgcgcacgagttcaccgtgtaccgcatgcagcagtacgacctgcagggccagccctacggcacacggaatgcagtgctgaacacggaggcgcgcacgatggcggcggaggtgctgagccgccgctgcgtgctcatgcggctactggacttctcctacgagcagtaccagaaggccctgcggcagtcggcgggcgccgtggtcatcatcctgcccagggccatggccgccgtgccccaggacgtcgtccggcaattcatggagatcgagccggagatgctggccatggagaccgccgtccccgtgtactttgccgtggaggacgaggccctgctgtctatctacaagcagacccaggctgcctccgcctcccagggctccgcctctgctgctgaagtactgctgcgcacggccactgccaacggcttccagatggtcaccagcggggtacagagcaaggccgtgagtgactggctgattgccagcgtggaggggcggctgacggggctgggcggagaggaccttcccaccatcgtcatcgtggcccactacgacgcctttggagtggccccctggctgtcgctgggcgcggactccaacgggagcggcgtctctgtgctgctggagctggcacgcctcttctcccggctctacacctacaagcgcacgcacgccgcctacaacctcctgttctttgcgtctggaggaggcaagtttaactaccagggaaccaagcgctggctggaagacaacctggaccacacagactccagcctgcttcaggacaatgtggccttcgtgctgtgcctggacaccgtgggccggggcagcagcctgcacctgcacgtgtccaagccgcctcgggagggcaccctgcagcacgccttcctgcgggagctggagacggtggccgcgcaccagttccctgaggtacggttctccatggtgcacaagcggatcaacctggcggaggacgtgctggcctgggagcacgagcgcttcgccatccgccgactgcccgccttcacgctgtcccacctggagagccaccgtgacggccagcgcagcagcatcatggacgtgcggtcccgggtggattctaagaccctgacccgtaacacgaggatcattgcagaggccctgactcgagtcatctacaacctgacagagaaggggacacccccagacatgccggtgttcacagagcagatgcagatccagcaggagcagctggactcggtgatggactggctcaccaaccagccgcgggccgcgcagctggtggacaaggacagcaccttcctcagcacgctggagcaccacctgagccgctacctgaaggacgtgaagcagcaccacgtcaaggctgacaagcgggacccagagtttgtcttctacgaccagctgaagcaagtgatgaatgcgtacagagtcaagccggccgtctttgacctgctcctggctgttggcattgctgcctacctcggcatggcctacgtggctgtccagcacttcagcctcctctacaagaccgtccagaggctgctcgtgaaggccaagacacagtgacacagccacccccacagccggagcccccgccgctccacagtccctggggccgagcacgagtcgtcatgatggatgcactgactgaccgtctggggctcaggctggtgtgggatgcagccggccgatgagaaaataaagccatattgaatgatc

SEQ ID NO: 330881 - DNA, 2384 bp, Homo sapiens
  misc_feature (1)..(2): n is a, c, g, or t
  misc_feature (5)..(5): n is a, c, g, or t
  misc_feature (7)..(8): n is a, c, g, or t
nncangnngcaaggtcacgtcctgtccccacctttcgcccctcaccccagctcccccaacgccaaagacaaggttaagaaagtgatatcgcgaaatagttttttaaagcattttattgcattttatgacttggagtttatgtgaaacctcaacggtattagccgaacagcctgccgcaccttccgggagttccagagtgggcctacaactcccacagggctccgcgagcgccggacggacagactacaattcccgacaggcagcgcggctggcggggcggttcgcggcggtgcccacaggacctcagggcgagtgcgggctgccccgcgcggcgcccgcaggaccccggcggctacccatgccgaggtgagtccgcgggagccgccgccgccgccgtcccgtcccagctgccgccccgcgcggccccgccgccggccaggatgctggaggaagcgggcgaggtgctggagaacatgctgaaggcgtcttgtctgcctctcggcttcatcgtcttcctgcccgctgtgctgctgctggtggcgccgccgctgcctgccgccgacgccgcgcacgagttcaccgtgtaccgcatgcagcagtacgacctgcagggccagccctacggcacacggaatgcagtgctgaacacggaggcgcgcacgatggcggcggaggtgctgagccgccgctgcgtgctcatgcggctactggacttctcctacgagcagtaccagaaggccctgcggcagtcggcgggcgccgtggtcatcatcctgcccagggccatggccgccgtgccccaggacgtcgtccggcaattcatggagatcgagccggagatgctggccatggagaccgccgtccccgtgtactttgccgtggaggacgaggccctgctgtctatctacaagcagacccaggctgcctccgcctcccagggctccgcctctgctgctgaagtactgctgcgcacggccactgccaacggcttccagatggtcaccagcggggtacagagcaaggccgtgagtgactggctgattgccagcgtggaggggcggctgacggggctgggcggagaggaccttcccaccatcgtcatcgtggcccactacgacgcctttggagtggccccctggctgtcgctgggcgcggactccaacgggagcggcgtctctgtgctgctggagctggcacgcctcttctcccggctctacacctacaagcgcacgcacgccgcctacaacctcctgttctttgcgtctggaggaggcaagtttaactaccagggaaccaagcgctggctggaagacaacctggaccacacagactccagcctgcttcaggacaatgtggccttcgtgctgtgcctggacaccgtgggccggggcagcagcctgcacctgcacgtgtccaagccgcctcgggagggcaccctgcagcacgccttcctgcgggagctggagacggtggccgcgcaccagttccctgaggtacggttctccatggtgcacaagcggatcaacctggcggaggacgtgctggcctgggagcacgagcgcttcgccatccgccgactgcccgccttcacgctgtcccacctggagagccaccgtgacggccagcgcagcagcatcatggacgtgcggtcccgggtggattctaagaccctgacccgtaacacgaggatcattgcagaggccctgactcgagtcatctacaacctgacagagaaggggacacccccagacatgccggtgttcacagagcagatgcagatccagcaggagcagctggactcggtgatggactggctcaccaaccagccgcgggccgcgcagctggtggacaaggacagcaccttcctcagcacgctggagcaccacctgagccgctacctgaaggacgtgaagcagcaccacgtcaaggctgacaagcgggacccagagtttgtcttctacgaccagctgaagcaagtgatgaatgcgtacagagtcaagccggccgtctttgacctgctcctggctgttggcattgctgcctacctcggcatggcctacgtggctgtccagcacttcagcctcctctacaagaccgtccagagacttgcccaagggcccatcaccactggcctctgggcacttgtgctgagactctgggacccaggcagctgccaccttgtcaccatgagagaatttggggagtgcttgcatgctagccagcaggctcctgtctgggtgccacggggccagcattttggagggagcttccttccttccttcctggacaggtcgtcatgatggatgcactgactgaccgtctggggctcaggctggtgtgggatgcagccggccgatgagaaaataaagccatattgaatgatc

SEQ ID NO: 330882 - DNA, 4061 bp, Homo sapiens
  misc_feature (1)..(2): n is a, c, g, or t
  misc_feature (5)..(5): n is a, c, g, or t
  misc_feature (7)..(8): n is a, c, g, or t
nncangnngcaaggtcacgtcctgtccccacctttcgcccctcaccccagctcccccaacgccaaagacaaggttaagaaagtgatatcgcgaaatagttttttaaagcattttattgcattttatgacttggagtttatgtgaaacctcaacggtattagccgaacagcctgccgcaccttccgggagttccagagtgggcctacaactcccacagggctccgcgagcgccggacggacagactacaattcccgacaggcagcgcggctggcggggcggttcgcggcggtgcccacaggacctcagggcgagtgcgggctgccccgcgcggcgcccgcaggaccccggcggctacccatgccgaggtgagtccgcgggagccgccgccgccgccgtcccgtcccagctgccgccccgcgcggccccgccgccggccaggatgctggaggaagcgggcgaggtgctggagaacatgctgaaggcgtcttgtctgcctctcggcttcatcgtcttcctgcccgctgtgctgctgctggtggcgccgccgctgcctgccgccgacgccgcgcacgagttcaccgtgtaccgcatgcagcagtacgacctgcagggccagccctacggcacacggaatgcagtgctgaacacggaggcgcgcacgatggcggcggaggtgctgagccgccgctgcgtgctcatgcggctactggacttctcctacgagcagtaccagaaggccctgcggcagtcggcgggcgccgtggtcatcatcctgcccagggccatggccgccgtgccccaggacgtcgtccggcaattcatggagatcgagccggagatgctggccatggagaccgccgtccccgtgtactttgccgtggaggacgaggccctgctgtctatctacaagcagacccaggctgcctccgcctcccagggctccgcctctgctgctgaagtactgctgcgcacggccactgccaacggcttccagatggtcaccagcggggtacagagcaaggccgtgagtgactggctgattgccagcgtggaggggcggctgacggggctgggcggagaggaccttcccaccatcgtcatcgtggcccactacgacgcctttggagtggccccctggctgtcgctgggcgcggactccaacgggagcggcgtctctgtgctgctggagctggcacgcctcttctcccggctctacacctacaagcgcacgcacgccgcctacaacctcctgttctttgcgtctggaggaggcaagtttaactaccagggaaccaagcgctggctggaagacaacctggaccacacagactccagcctgcttcaggacaatgtggccttcgtgctgtgcctggacaccgtgggccggggcagcagcctgcacctgcacgtgtccaagccgcctcgggagggcaccctgcagcacgccttcctgcgggagctggagacggtggccgcgcaccagttccctgaggtacggttctccatggtgcacaagcggatcaacctggcggaggacgtgctggcctgggagcacgagcgcttcgccatccgccgactgcccgccttcacgctgtcccacctggagagccaccgtgacggccagcgcagcagcatcatggacgtgcggtcccgggtggattctaagaccctgacccgtaacacgaggatcattgcagaggccctgactcgagtcatctacaacctgacagagaaggggacacccccagacatgccggtgttcacagagcagatgcagatccagcaggagcagctggactcggtgatggactggctcaccaaccagccgcgggccgcgcagctggtggacaaggacagcaccttcctcagcacgctggagcaccacctgagccgctacctgaaggacgtgaagcagcaccacgtcaaggctgacaagcgggacccagagtttgtcttctacgaccagctgaagcaagtgatgaatgcgtacagagtcaagccggccgtctttgacctgctcctggctgttggcattgctgcctacctcggcatggcctacgtggctgtccagcacttcagcctcctctacaagaccgtccagaggctgctcgtgaaggccaagacacagtgacacagccacccccacagccggagcccccgccgctccacagtccctggggccgagcacgagtgagtggacactgccccgccgcgggcggccctgcagggacaggggccctctccctccccggcggtggttggaacactgaattacagagcttttttctgttgctctccgagactggggggggattgtttcttcttttccttgtctttgaacttccttggaggagagcttgggagacgtcccggggccaggctacggacttgcggacgagccccccagtcctgggagccggccgccctcggtctggtgtaagcacacatgcacgattaaagaggagacgccgggaccccctgcccgatcgcgcgcggcctccgcccaccgcctcctgccgcaaggggcctggactgcaggcctgacctgctccctgctccgtgtctgtcctaggacgtcccctcccgctccccgatggtggcgtggacatggttatttatctctgctccttcttgcctggaggagggcagtgccagccctggggttctgggattccagccctcctggagccttttgttccccatgtggtctcagtgacccgtccccctgacagtgggctcggggagctgcatcacccagccttccccttctccgactgcagggtctgatgtcatcgttgacagcctttgcttcgtgggggcctggcagggcccctgcctccccgacccccgacccactgcaaatccccgttcccctgcactcctcttctcccagcccatccctccggcccctgtgcctctgcggccccagcccagctcccagggccgtcacctgcttggccctggcccagctccctgccctgagtcctgagccagtgcctggtgtttcctgggctcggtactgggcccccaggccatccaggctttgccacggccagttggtcctccctggggaactgggtgcgggtggagtactgggaggcaggaggtggcccggggaggccttgtggctcctcccctcgctcctcgccctgggcctcagcttcctcatcaatagaaaggatgtgttcggggtgggggcgtcaggtgagaacgtttgctgggaaggagaggacttggggcatggcctctggggccacccttcctggaactcagagaggaaggtccgggccctcgggaagccttggacagaaccctccaccccgcagaccaggcgtcgtgtgtgtgtgggagagaaggaggcccgtgttgagctcagggagaccccggtgtgtccgttctttagcaatataacctacccagtgcgtgccgagcaggcttggtggggaagggacttgagctgggcaagtcctggcctggcacccgcagccgtctcccttccgtggcccagggaggtgtttgctgtccgaaggacctgggccggcccatgggagcctggggttctgtccagataggaccagggggtctcactttggccaccagttcttcggccagcacctctgccctccagaacctgcagcctggaggggtgaggggacaaccacccctctttcctccaggttggcaggggaccctcttctcccgtctgccctgcgggttgcccgcctcctccagagacttgcccaagggcccatcaccactggcctctgggcacttgtgctgagactctgggacccaggcagctgccaccttgtcaccatgagagaatttggggagtgcttgcatgctagccagcaggctcctgtctgggtgccacggggccagcattttggagggagcttccttccttccttcctggacaggtcgtcatgatggatgcactgactgaccgtctggggctcaggctggtgtgggatgcagccggccgatgagaaaataaagccatattgaatgatcgccaccagtgtttggtctgggggctgtgagaattggattgtgaaaa

SEQ ID NO: 330883 - DNA, 3738 bp, Homo sapiens
  misc_feature (1)..(2): n is a, c, g, or t
  misc_feature (5)..(5): n is a, c, g, or t
  misc_feature (7)..(8): n is a, c, g, or t
nncangnngcaaggtcacgtcctgtccccacctttcgcccctcaccccagctcccccaacgccaaagacaaggttaagaaagtgatatcgcgaaatagttttttaaagcattttattgcattttatgacttggagtttatgtgaaacctcaacggtattagccgaacagcctgccgcaccttccgggagttccagagtgggcctacaactcccacagggctccgcgagcgccggacggacagactacaattcccgacaggcagcgcggctggcggggcggttcgcggcggtgcccacaggacctcagggcgagtgcgggctgccccgcgcggcgcccgcaggaccccggcggctacccatgccgaggtgagtccgcgggagccgccgccgccgccgtcccgtcccagctgccgccccgcgcggccccgccgccggccaggatgctggaggaagcgggcgaggtgctggagaacatgctgaaggcgtcttgtctgcctctcggcttcatcgtcttcctgcccgctgtgctgctgctggtggcgccgccgctgcctgccgccgacgccgcgcacgagttcaccgtgtaccgcatgcagcagtacgacctgcagggccagccctacggcacacggaatgcagtgctgaacacggaggcgcgcacgatggcggcggaggtgctgagccgccgctgcgtgctcatgcggctactggacttctcctacgagcagtaccagaaggccctgcggcagtcggcgggcgccgtggtcatcatcctgcccagggccatggccgccgtgccccaggacgtcgtccggcaattcatggagatcgagccggagatgctggccatggagaccgccgtccccgtgtactttgccgtggaggacgaggccctgctgtctatctacaagcagacccaggctgcctccgcctcccagggctccgcctctgctgctgaagtactgctgcgcacggccactgccaacggcttccagatggtcaccagcggggtacagagcaaggccgtgagtgactggctgattgccagcgtggaggggcggctgacggggctgggcggagaggaccttcccaccatcgtcatcgtggcccactacgacgcctttggagtggccccctggctgtcgctgggcgcggactccaacgggagcggcgtctctgtgctgctggagctggcacgcctcttctcccggctctacacctacaagcgcacgcacgccgcctacaacctcctgttctttgcgtctggaggaggcaagtttaactaccagggaaccaagcgctggctggaagacaacctggaccacacagactccagcctgcttcaggacaatgtggccttcgtgctgtgcctggacaccgtgggccggggcagcagcctgcacctgcacgtgtccaagccgcctcgggagggcaccctgcagcacgccttcctgcgggagctggagacggtggccgcgcaccagttccctgaggtacggttctccatggtgcacaagcggatcaacctggcggaggacgtgctggcctgggagcacgagcgcttcgccatccgccgactgcccgccttcacgctgtcccacctggagagccaccgtgacggccagcgcagcagcatcatggacgtgcggtcccgggtggattctaagaccctgacccgtaacacgaggatcattgcagaggccctgactcgagtcatctacaacctgacagagaaggggacacccccagacatgccggtgttcacagagcagatgcagatccagcaggagcagctggactcggtgatggactggctcaccaaccagccgcgggccgcgcagctggtggacaaggacagcaccttcctcagcacgctggagcaccacctgagccgctacctgaaggacgtgaagcagcaccacgtcaaggctgacaagcgggacccagagtttgtcttctacgaccagctgaagcaagtgatgaatgcgtacagagtcaagccggccgtctttgacctgctcctggctgttggcattgctgcctacctcggcatggcctacgtggctgtccagcacttcagcctcctctacaagaccgtccagaggctgctcgtgaaggccaagacacagtgacacagccacccccacagccggagcccccgccgctccacagtccctggggccgagcacgagtgagtggacactgccccgccgcgggcggccctgcagggacaggggccctctccctccccggcggtggttggaacactgaattacagagcttttttctgttgctctccgagactggggggggattgtttcttcttttccttgtctttgaacttccttggaggagagcttgggagacgtcccggggccaggctacggacttgcggacgagccccccagtcctgggagccggccgccctcggtctggtgtaagcacacatgcacgattaaagaggagacgccgggaccccctgcccgatcgcgcgcggcctccgcccaccgcctcctgccgcaaggggcctggactgcaggcctgacctgctccctgctccgtgtctgtcctaggacgtcccctcccgctccccgatggtggcgtggacatggttatttatctctgctccttcttgcctggaggagggcagtgccagccctggggttctgggattccagccctcctggagccttttgttccccatgtggtctcagtgacccgtccccctgacagtgggctcggggagctgcatcacccagccttccccttctccgactgcagggtctgatgtcatcgttgacagcctttgcttcgtgggggcctggcagggcccctgcctccccgacccccgacccactgcaaatccccgttcccctgcactcctcttctcccagcccatccctccggcccctgtgcctctgcggccccagcccagctcccagggccgtcacctgcttggccctggcccagctccctgccctgagtcctgagccagtgcctggtgtttcctgggctcggtactgggcccccaggccatccaggctttgccacggccagttggtcctccctggggaactgggtgcgggtggagtactgggaggcaggaggtggcccggggaggccttgtggctcctcccctcgctcctcgccctgggcctcagcttcctcatcaatagaaaggatgtgttcggggtgggggcgtcaggtgagaacgtttgctgggaaggagaggacttggggcatggcctctggggccacccttcctggaactcagagaggaaggtccgggccctcgggaagccttggacagaaccctccaccccgcagaccaggcgtcgtgtgtgtgtgggagagaaggaggcccgtgttgagctcagggagaccccggtgtgtccgttctttagcaatataacctacccagtgcgtgccgagcaggcttggtggggaagggacttgagctgggcaagtcctggcctggcacccgcagccgtctcccttccgtggcccagggaggtgtttgctgtccgaaggacctgggccggcccatgggagcctggggttctgtccagataggaccagggggtctcactttggccaccagttcttcggccagcacctctgccctccagaacctgcagcctggaggggtgaggggacaaccacccctctttccttctgaatttattctaagagcatctttctttttgcttttttgttgatgctgcttgactttctatc

SEQ ID NO: 330884 - DNA, 2475 bp, Homo sapiens
  misc_feature (1)..(2): n is a, c, g, or t
  misc_feature (5)..(5): n is a, c, g, or t
  misc_feature (7)..(8): n is a, c, g, or t
nncangnngcaaggtcacgtcctgtccccacctttcgcccctcaccccagctcccccaacgccaaagacaaggttaagaaagtgatatcgcgaaatagttttttaaagcattttattgcattttatgacttggagtttatgtgaaacctcaacggtattagccgaacagcctgccgcaccttccgggagttccagagtgggcctacaactcccacagggctccgcgagcgccggacggacagactacaattcccgacaggcagcgcggctggcggggcggttcgcggcggtgcccacaggacctcagggcgagtgcgggctgccccgcgcggcgcccgcaggaccccggcggctacccatgccgaggtgagtccgcgggagccgccgccgccgccgtcccgtcccagctgccgccccgcgcggccccgccgccggccaggatgctggaggaagcgggcgaggtgctggagaacatgctgaaggcgtcttgtctgcctctcggcttcatcgtcttcctgcccgctgtgctgctgctggtggcgccgccgctgcctgccgccgacgccgcgcacgagttcaccgtgtaccgcatgcagcagtacgacctgcagggccagccctacggcacacggaatgcagtgctgaacacggaggcgcgcacgatggcggcggaggtgctgagccgccgctgcgtgctcatgcggctactggacttctcctacgagcagtaccagaaggccctgcggcagtcggcgggcgccgtggtcatcatcctgcccagggccatggccgccgtgccccaggacgtcgtccggcaattcatggagatcgagccggagatgctggccatggagaccgccgtccccgtgtactttgccgtggaggacgaggccctgctgtctatctacaagcagacccaggctgcctccgcctcccagggctccgcctctgctgctgaagtactgctgcgcacggccactgccaacggcttccagatggtcaccagcggggtacagagcaaggccgtgagtgactggctgattgccagcgtggaggggcggctgacggggctgggcggagaggaccttcccaccatcgtcatcgtggcccactacgacgcctttggagtggccccctggctgtcgctgggcgcggactccaacgggagcggcgtctctgtgctgctggagctggcacgcctcttctcccggctctacacctacaagcgcacgcacgccgcctacaacctcctgttctttgcgtctggaggaggcaagtttaactaccagggaaccaagcgctggctggaagacaacctggaccacacagactccagcctgcttcaggacaatgtggccttcgtgctgtgcctggacaccgtgggccggggcagcagcctgcacctgcacgtgtccaagccgcctcgggagggcaccctgcagcacgccttcctgcgggagctggagacggtggccgcgcaccagttccctgaggtacggttctccatggtgcacaagcggatcaacctggcggaggacgtgctggcctgggagcacgagcgcttcgccatccgccgactgcccgccttcacgctgtcccacctggagagccaccgtgacggccagcgcagcagcatcatggacgtgcggtcccgggtggattctaagaccctgacccgtaacacgaggatcattgcagaggccctgactcgagtcatctacaacctgacagagaaggggacacccccagacatgccggtgttcacagagcagatgcagatccagcaggagcagctggactcggtgatggactggctcaccaaccagccgcgggccgcgcagctggtggacaaggacagcaccttcctcagcacgctggagcaccacctgagccgctacctgaaggacgtgaagcagcaccacgtcaaggctgacaagcgggacccagagtttgtcttctacgaccagctgaagcaagtgatgaatgcgtacagagtcaagccggccgtctttgacctgctcctggctgttggcattgctgcctacctcggcatggcctacgtggctgtccagcacttcagcctcctctacaagaccgtccagaggctgctcgtgaaggccaagacacagtgacacagccacccccacagccggagcccccgccgctccacagtccctggggccgagcacgagtgagtggacactgccccgccgcgggcggccctgcagggacaggggccctctccctccccggcggtggttggaacactgaattacagagcttttttctgttgctctccgagactggggggggattgtttcttcttttccttgtctttgaacttccttggaggagagcttgggagacgtcccggggccaggctacggacttgcggacgagccccccagtcctgggagccggccgccctcggtctggtgtaagcacacatgcacgattaaagaggagacgccggga

SEQ ID NO: 330885 - DNA, 2399 bp, Homo sapiens
  misc_feature (1)..(2): n is a, c, g, or t
  misc_feature (5)..(5): n is a, c, g, or t
  misc_feature (7)..(8): n is a, c, g, or t
nncangnngcaaggtcacgtcctgtccccacctttcgcccctcaccccagctcccccaacgccaaagacaaggttaagaaagtgatatcgcgaaatagttttttaaagcattttattgcattttatgacttggagtttatgtgaaacctcaacggtattagccgaacagcctgccgcaccttccgggagttccagagtgggcctacaactcccacagggctccgcgagcgccggacggacagactacaattcccgacaggcagcgcggctggcggggcggttcgcggcggtgcccacaggacctcagggcgagtgcgggctgccccgcgcggcgcccgcaggaccccggcggctacccatgccgaggtgagtccgcgggagccgccgccgccgccgtcccgtcccagctgccgccccgcgcggccccgccgccggccaggatgctggaggaagcgggcgaggtgctggagaacatgctgaaggcgtcttgtctgcctctcggcttcatcgtcttcctgcccgctgtgctgctgctggtggcgccgccgctgcctgccgccgacgccgcgcacgagttcaccgtgtaccgcatgcagcagtacgacctgcagggccagccctacggcacacggaatgcagtgctgaacacggaggcgcgcacgatggcggcggaggtgctgagccgccgctgcgtgctcatgcggctactggacttctcctacgagcagtaccagaaggccctgcggcagtcggcgggcgccgtggtcatcatcctgcccagggccatggccgccgtgccccaggacgtcgtccggcaattcatggagatcgagccggagatgctggccatggagaccgccgtccccgtgtactttgccgtggaggacgaggccctgctgtctatctacaagcagacccaggctgcctccgcctcccagggctccgcctctgctgctgaagtactgctgcgcacggccactgccaacggcttccagatggtcaccagcggggtacagagcaaggccgtgagtgactggctgattgccagcgtggaggggcggctgacggggctgggcggagaggaccttcccaccatcgtcatcgtggcccactacgacgcctttggagtggccccctggctgtcgctgggcgcggactccaacgggagcggcgtctctgtgctgctggagctggcacgcctcttctcccggctctacacctacaagcgcacgcacgccgcctacaacctcctgttctttgcgtctggaggaggcaagtttaactaccagggaaccaagcgctggctggaagacaacctggaccacacagactccagcctgcttcaggacaatgtggccttcgtgctgtgcctggacaccgtgggccggggcagcagcctgcacctgcacgtgtccaagccgcctcgggagggcaccctgcagcacgccttcctgcgggagctggagacggtggccgcgcaccagttccctgaggtacggttctccatggtgcacaagcggatcaacctggcggaggacgtgctggcctgggagcacgagcgcttcgccatccgccgactgcccgccttcacgctgtcccacctggagagccaccgtgacggccagcgcagcagcatcatggacgtgcggtcccgggtggattctaagaccctgacccgtaacacgaggatcattgcagaggccctgactcgagtcatctacaacctgacagagaaggggacacccccagacatgccggtgttcacagagcagatgcagatccagcaggagcagctggactcggtgatggactggctcaccaaccagccgcgggccgcgcagctggtggacaaggacagcaccttcctcagcacgctggagcaccacctgagccgctacctgaaggacgtgaagcagcaccacgtcaaggctgacaagcgggacccagagtttgtcttctacgaccagctgaagcaagtgatgaatgcgtacagagtcaagccggccgtctttgacctgctcctggctgttggcattgctgcctacctcggcatggcctacgtggctgtccagcacttcagcctcctctacaagaccgtccagaggctgctcgtgaaggccaagacacagtgacacagccacccccacagccggagcccccgccgctccacagtccctggggccgagcacgagtgagtggacactgccccgccgcgggcggccctgcagggacaggggccctctccctccccggcggtggttggaacactgaattacagaagcttgggagacgtcccggggccaggctacggacttgcggacgagccccccagtcctgggagccggccgccctcggtctggtgtaagcacacatgcacgattaaagaggagacgccggga

SEQ ID NO: 330886 - DNA, 487 bp, Homo sapiens
agggggaggcaacataaaccttcaaattaataagtaaataattttgtgtagtgataaatattgtgaggaaaaaaagacgaatgatatagagagagtctgtttcgggggtgagggtagggatagcactgcttttcccaggatggtcctggaagacattcctgaggagatggcatttgatctgggacgtgaatgatggcaaagaagcagttgtgtaaagatctagaagaaaagatatcttaagtagaagcaacagcaagtgcagaggccatgaggcgcggctaaactgatgggtttgagaggctgaatgaaagtaggccgtgtatggctggatccagatcataaaggaccttgtggaccttggcacaggagtatatttttgttctgatagaatgagaagcatttggggggctttaacaaaggcatgacaggatttcaggcacgcttttgaaaactgaagacttgttaacgtggagaatggagtgtgggg

SEQ ID NO: 330887 - DNA, 936 bp, Homo sapiens
agtagaaaagagagagaacgcaacaacaaaagagaaaaaaaaaaaactccttgaggggaacatggacagtgtgtgaattataagagctctgtttctaaagtgattcaactatacttgcacagaattccaaaagctctactgtttattactcttcattactaatacagcctttgattgtaagcaggctgtcctttgtgaataacaatcacagatacagacatcttcagacagttcaagtcgtgtgcttcaatcaaactctagtcggaaaagaactttcagagcaaggctgcttccacagtactgacaaaatctgctatatatcacataacattgcatggtgcactcactcaaactttatgtttccctgttttataaattcttaagagcactgcatggctcacaaaaatctaatactggcactctctatgttggcgattactgaatggaaatatgcatatttagcttgaaagaaagaagggtaatattttccttgcaatttattcaccatttcctttatataacctgaaatcatgagctttgtgacacattggaaaagaaatactttattatagaaaatataactagatagtaatgagttttaaagcagagtattgaccatgtataatggttctcacagatatgaaatgaaaaaatccgaaaaataaaagtaaatctcttaaaaatactaaatgttattgaacctgtttttactgcatggatatttttgtgattctagaaattacctaattaaattttatatttatagaatgaaaaatcatgtaagaaattatgtaaaggtgattcaatacaatatgacatttaatcaaggcagtttagtaaatagtaagaggactaagagtgctaaatgactatgcatatatgtgtgttgcataaaataaaaggaaaatgagaataataatccacacaagttatcaa

SEQ ID NO: 330888 - DNA, 518 bp, Homo sapiens
  misc_feature (16)..(16): n is a, c, g, or t
  misc_feature (38)..(38): n is a, c, g, or t
  misc_feature (518)..(518): n is a, c, g, or t
atctttaaaaatagtnaccacagctagttatttaaaantttgccaggaaaagaggaaccagaagcagcagctgactgtctttgttgactgtgtgatccagagcagacccagtggatttgggagctccctttccctccccaccactgcctccagtggttttattctctttttacctacccccagtactagatcccttcagtcgctctttcacccctgaacttccaccaccaccatgtcccccaaagccattccctggaccagcaataatttatttagtctctgcccctctctcgggcttttagcaagaaatgcccaagaaaacttcagttttagcattttctttacagtcttctatattcttgatcacttgtcgttgcttttgtctttatgtctaggtgcaaagtaagaaaagaaaagcagatacaggccaggcgtggtggctcttgcctataatcccaggactttaagaagccaaggcaggaagattgcttgaacccaagatcccgcctctaaaaaan

SEQ ID NO: 330889 - DNA, 280 bp, Homo sapiens
gctggtctcgatcttctgacctcatgatccacccgcctcggcctcccaaagtgctgggattacaggtgtgagccaccgcacccagccctctgggagactttttagagcttggctgtgagtggagggagagaattagcaactaggaactggaaattagcactgggttgaggggcagctactgcctgtttgtggggttactttgcctctgggaagactcgagcacatccacctgctgagaagaggggccgagaggggaaagacccaggagaagggcaggagg

SEQ ID NO: 330890 - DNA, 579 bp, Homo sapiens
ccaggccttgtgctgctgctatggtggtcagttgattgctaacttcaccatcctcagccaacagtgaccgagcagctgctgtcctcagccctgtgctggggatgagacagggattctgagttaaatcggacatgcttcttgttcccagcacagtctagtcccgtgcaacaggcaactgcactgtgcactgtggcagcaggtgcttcctgagcactgactctgtgcctgacatggcacctagcacccccgctgtgttagccctcagatcctcaccatagcctaggctcaggacagtgaagtagcttccccaaagccacccttctgatgccagagccaggactggagcccaagttcgaaggcctcagacatctgagcccttaactgaagagttacctgcataggactgtggaagcatggcagaagtccctacccagagagggactctgggaagtcttcctaggagtggggatatctggggccttgagggatgcatggaggtttgggaatcagaagaaggaggggaatgtagctggcctctgcacagcctgcttctgggcctgttctgaggtcacagtgttt

SEQ ID NO: 330891 - DNA, 595 bp, Homo sapiens
ctcagcttcccaaaatgctgggattacaggcataagtcaccgcgcctggcaaattcaaccaatttagtgttactacacatttaggctctttccaatacagatatctttttgaagctaagagtttaaaaatttataattttatgaaatgtttaatatggccatgtttagaggtttttttgaagtgttattttaaaatagtagattaataagacatttatatgttctatttgccctttttattttgagagattatacctttgtcataaaattactttcaccaattatagttaaactgtatggtagattattaattacaaacttacctatgaaagatttttggaactgtacactattaatgaaacgtaactatggtttcagttggtaacatactcatgcataattgattatatattttatctcataaggttttgagtcagaactatttttattatacatgaaatgaaataatgacacccaccctcatctttgtacaagattaaaaggaacaacagtgaactgtcttatttggaaaatgacatggcattattttagaaaacatttagaaatttattatactaataagccctaatatgga

SEQ ID NO: 330892 - DNA, 179 bp, Homo sapiens
catttctagcagcagaattctttaatttgaaaaagttgttgaattgtaatggacccagttctaacctaagtttcaggtcagtgactttgtataattcattggctctctgtgtctcagttttccttatctgaaaagggggataattattgctgctccccagtgcacagatacattatttt

SEQ ID NO: 330893 - DNA, 944 bp, Homo sapiens
gtttctgtttttcttctttttaaaatagtaacaacttaggattttgtgtgccaccagcttccattccatttcataaaagcttaatctagcaagaattggtgagccctagtagaagttagaaagaaatgttgaagtgtgtatgtgtgtgtgtgtgtgtgtgtgtgtgtgttggcatcagaatcaccttggacactttttaaaacaatgcccttggctgggcgcggtggctcacgcctgtaatcccagcactttgggaggccgaggcgggcggatcacgaggtcaggagatcgagaccatcctggctaatgcgatgaaaccccgtctctactaaaaatacaaaaaaattagccaggcttggtagtgggctcctgtagtcccagctactggggaggctgaggtagaattgcatgaacccgggatgcggagcttgcagtgagctgagatcgtgccactgcactgcagcctgggcgacagagcaagattccatctcaaaaaaaaaaaaaaaaaagaaaaaaaaacaccatgccctcaccctaaggttctcctctgtctgctcttaaagaacagaaaatagaaaacattcctgacattgagaattactggtccatagtattaatattttgttttaaaatttgtgaacatatttaacttttaaaatgttttatatccaacagtctgtttggggggaagaaatcctctggtaacagttcacatgtatactcacgatatttgtcagtgagacatgtagatctcattgtaggaaatcattccactcattgagaaggggcttactgttctcattttctatagtaacttgtttttgttctgtttatatgttttacagacatttaatgttattaaatgactttctcatttaagtctcaaaacacaaaaagtgttttttagattttttttttcacagttgttatgatcatcatcattg

SEQ ID NO: 330894 - DNA, 542 bp, Homo sapiens
cccctctgtttattgcttcctaacatccccaaagtctgaagtaaggtgttctccatgtatttggacttcttccatggacccaattatcacacgaaaattgtagtctccaagccaggactggctatgtaatttgtggggccacaagaaaaatcaaaatgcgaggctccttatgaaaaaattagtaagtatttcaagatggcaatggcagagcattcaaccaagcacgaactcttctgagagcgggtccctgtgcaactgcatgggttgcacatccgtgaagtgagccctgcctggccctctaggaacaaactctcattctgctcctgtactgttacctgcaagacagaccctttagttccactttccaccacctgagaatggatactgagttaaccatctgccaaacgggcaggcattcccaacatctccactaagactgcattcttctctttcttcccatttctgttactaccactctgcatcaacccttacgatctaatcccttcaacagtctttggtctggcttgtttccaacagctcat

SEQ ID NO: 330895 - DNA, 308 bp, Homo sapiens
ccaagggagaaggcagaaagacaaaaaagagacaaaggggagccaaactcattattttataaggaacctactaccaggataacaaaactcactgcattaatccattaattaagggcagggccctcacagcctaatcacttcttaaagttcccactatttttttttttttaaccattttcttcaatagccctgacagtcccacctcttaatactattacaatggcaattaagtttcaaagtgagacattcccaccatagcagggagttaatatccagaatatatgtataaagaattttacaactcaaca

SEQ ID NO: 330896 - DNA, 345 bp, Homo sapiens
ggcccagtaaaagtcatgcccttcatccccagtcccttatgtagcattagttcatggcaaagctggggccagggcccctgatcttttcactccactgtctagagtgccttcaagtcttgtcaaggagatcaggagatccccaaactctccacatggaaattagaatgaattccatgtcaggtaaaccacaagcagcaagggcacacaggaaggtggcacctttgaggttttctggcttgaatgcaagttgtttttgagatagggtcttgctctgtcacccaggctggagtgcggtgatgcaatcatggctcactgcagcttctacctcctgggctcaagtgatcc

SEQ ID NO: 330897 - DNA, 3036 bp, Homo sapiens
cgtcctcccagcggctgggttcccagagtgctccgcggccgtgtggagcgaggccttgttcccgcgttgagccgccgccgccgccgccgcctcctcagcttcagcctccgcgccaggcccggccccgccgcgccatgtcggactacagcacgggaggacccccgcccgggccgccgccgcccgccggcgggggcgggggagccggaggcgccgggggaggccctccgccgggcccgccaggcgcgggggaccggggcggcggcggtccctgcggcggcggcccgggcggggggtcggccgggggcccctctcagccacccggcggaggcggcccgggaatccgcaaggacgctttcgccgacgccgtgcagcgggcccgccagattgcagccaaaattggaggcgatgctgccacgacagtgaataacagcactcctgattttggttttgggggccaaaagagacagttggaagatggagatcaaccggagagcaagaagctggcttcccagggagactcaatcagttctcaacttggacccatccatcctcccccaaggacttcaatgacagaagagtacagggtcccagacggcatggtgggcctgatcattggcagaggaggtgaacaaattaacaaaatccaacaggattcaggctgcaaagtacagatttctccagacagcggtggcctacccgagcgcagtgtgtccttgacaggagccccagaatctgtccagaaagccaagatgatgctggatgacattgtgtctcggggtcgtgggggccccccaggacagttccacgacaacgccaacgggggccagaacggcaccgtgcaggagatcatgatccccgcgggcaaggccggcctggtcattggcaagggcggggagaccattaagcagctgcaggaacgcgctggagtgaagatgatcttaattcaggacggatctcagaatacgaatgtggacaaacctctccgcatcattggggatccttacaaagtgcagcaagcctgtgagatggtgatggacatcctccgggaacgtgaccaaggcggctttggggaccggaatgagtacggatctcggattggcggaggcatcgatgtgccagtgcccaggcattctgttggcgtggtcattggccggagtggagagatgatcaagaagatccagaatgatgctggcgtgcggatacagttcaagcaagatgacgggacagggcccgagaagattgctcatataatggggcccccagacaggtgcgagcacgcagcccggatcatcaacgacctcctccagagcctcaggagtggtcccccaggtcctccagggggtccaggcatgcccccggggggccgaggccgaggaagaggccaaggcaattggggtccccctggcggggagatgaccttctccatccccactcacaagtgtgggctggtcatcggccgaggtggcgagaatgtgaaagccataaaccagcagacgggagccttcgtagagatctcccggcagctgccacccaacggggaccccaacttcaagttgttcatcatccggggttcaccccagcagattgaccacgccaagcagcttatcgaggaaaagatcgagggtcctctctgcccagttggaccaggcccaggtggcccaggccctgctggcccaatggggcccttcaatcctgggcccttcaaccaggggccacccggggctcccccacatgccggggggccccctcctcaccagtacccaccccagggctggggcaatacctacccccagtggcagccgcctgctcctcatgacccaagcaaagcagctgcagcggccgcggaccccaacgccgcgtgggccgcctactactcacactactaccagcagcccccgggccccgtccccggccccgcaccggcccctgcggccccaccggctcagggtgagccccctcagcccccacccaccggccagtcggactacactaaggcctgggaagagtattacaaaaagatcggccagcagccccagcagcccggagcgcccccacagcaggactacacgaaggcttgggaggagtactacaagaagcaagcgcaagtggccaccggagggggtccaggagctcccccaggctcccagccagactacagtgccgcctgggcggaatattacagacagcaggccgcttactacggacagaccccaggtcctggcggcccccagccgccgcccacgcagcagggacagcagcagcgcaggctcaatgaatcgaatgaatgtgaacttcttcatctgtgaaaaatcttttttttttccattttgttctgtttgggggcttctgttttgtttggcgagagagcgatggctgccgtggggagtactggggagccctcgcggcaagcagggtgggggggacttgggggcatgccgggccctcactctctcgcctgttctgtgtctcacatgctttttctttcaaaattgggatccttccatgttgagccagccagagaagatagcgagatctaaatctctgccaaaaaaaaaaaaaaacttaaaaattaaaaacacaaagagcaaagcagaacttataaaattatatatatatatattaaaaagtctctattcttcaccccccagccttcctgaacctgcctctctgaggataaagcaattcattttctcccaccctcggccctcttgtttttaaaataaacttttaaaaaggaaaaaaaaaagtcactcttgctatttcttttttttagttagaggtggaacattccttggaccaggtgttgtattgcaggaccccttcccccagcagccaagccccctcttctctccctcccgccctggctcagctcccgcggccccgcccgtcccccctcccaggactggtctgttgtcttttcatctgttcaagaggagattgaaactgaaaacaaaatgagaacaacaaaaaaaattgtatggcagtttttactttttatcgctcgtttttaacttcacaaataaatgataacaaaac

SEQ ID NO: 330898 - DNA, 624 bp, Homo sapiens
cgtcctcccagcggctgggttcccagagtgctccgcggccgtgtggagcgaggccttgttcccgcgttgagccgccgccgccgccgccgcctcctcagcttcagcctccgcgccaggcccggccccgccgcgccatgtcggactacagcacgggaggacccccgcccgggccgccgccgcccgccggcgggggcgggggagccggaggcgccgggggtaaaaaaaaaaaaaaaaaaaaaaaaaaaaaacgtggttgggccgcctgtgggcccctggaaaaagtttttaaaaccatttccgttgggggcggcggcgggcccccagttgaggtctagtggtgcacaccggttggtccccaagacgcgtggtgcccctaagagggaaaaatcccggggcggccaaggacatcacgggggcgccggagatttcctctcccccccaattaaaaagacgcgccgcggggggggaccaccccgacgaggcgtttctcgacaaccaaatccccccagataggggagactcccgggaggcacccatacgcgggggatgtctccatataccacagcggggattcccgaggcggaagcgcccgaaaattcctaatttaaccccgcctctgaagta

SEQ ID NO: 330899 - DNA, 3694 bp, Homo sapiens
aaaatacggctaggtacgaggcctgggtgaaagccaagatgatgctggatgacattgtgtctcggggtcgtgggggccccccaggacagttccacgacaacgccaacgggggccagaacggcaccgtgcaggagatcatgatccccgcgggcaaggccggcctggtcattggcaagggcggggagaccattaagcagctgcaggaacgcgctggagtgaagatgatcttaattcaggacggatctcagaatacgaatgtggacaaacctctccgcatcattggggatccttacaaagtgcagcaagcctgtgagatggtgatggacatcctccgggaacgtgaccaaggcggctttggggaccggaatgagtacggatctcggattggcggaggcatcgatgtgccagtgcccaggcattctgttggcgtggtcattggccggagtggagagatgatcaagaagatccagaatgatgctggcgtgcggatacagttcaagcaagatgacgggacagggcccgagaagattgctcatataatggggcccccagacaggtgcgagcacgcagcccggatcatcaacgacctcctccagagcctcagggtaggtggccccgggtgctgaaggggctggcagggcctccaggggagtgcaagaccagaccggcttccagggttcatcatcctcctcctcctcttgtcttgcagagtggtcccccaggtcctccagggggtccaggcatgcccccggggggccgaggccgaggaagaggccaaggcaattggggtccccctggcggggagatgaccttctccatccccactcacaagtgtgggctggtcatcggccgaggtggcgagaatgtgaaagccataaaccagcagacgggagccttcgtagagatctcccggcagctgccacccaacggggaccccaacttcaagttgttcatcatccggggttcaccccagcagattgaccacgccaagcagcttatcgaggaaaagatcgagggtcctctctgcccagttggaccaggcccaggtggcccaggccctgctggcccaatggggcccttcaatcctgggcccttcaaccaggggccacccggggctcccccacatgccggggggccccctcctcaccagtacccaccccagggctggggcaatacctacccccagtggcagccgcctgctcctcatgacccaagcaaagcagctgcagcggccgcggaccccaacgccgcgtgggccgcctactactcacactactaccagcagcccccgggccccgtccccggccccgcaccggcccctgcggccccaccggctcagggtgagccccctcagcccccacccaccggccagtcggactacactaaggcctgggaagagtattacaaaaagatcggccagcagccccagcagcccggagcgcccccacagcaggactacacgaaggcttgggaggagtactacaagaagcaagcgcaagtggccaccggagggggtccaggagctcccccaggctcccagccagactacagtgccgcctgggcggaatattacagacagcaggccgcttactacggacagaccccaggtcctggcggcccccagccgccgcccacgcagcagggacagcagcaggcaagtgggaattgccaccctcctcctcctcctttctccttccaacccccggccaccgtccatcctgccttagtgggtagcgccggaaaccccttcccctgcggggtgtgcccttgatgcctgcagcgggggccgtgtggccggaggtctccgggagtccccacgcaccgccagggaagcattcgctgggtccagaggttaaacgaagaggcctccctgcgccggctgcttgttcctgtgtgccgctgtcgtgatgctggggagcgctgagactcgcaggcgggacttctgaactgctggggagtcggggggcaggcagacagcgcggacggtgggcaccggcccggccgccaccacctcgctcacaatctggccacttgggaagaaaacgtctattttttccccttctctgcatcacttttttggtttttgttctttttattcttttattttttaaacccatgatcttttttcctgtgtccaagtgactgtgttgcaggcggcccggctctggcagggactggtggggacgcggggagcggcccaggcccctgccccgccgggctcagcctcccatgcgctcgcgcttgcctgtgtcccgggcttgtctgtgaagtgggcgtgaagatcgttgccaccttccaacctacctcacaggggtgttgtggggacaccatgatctctggattgttcatgtcgtcgtgctgcgccgggagccaccgccctccggagacagggcagctcccctacgaccctagcgcctccgccctccgcggcccctctcctctcttcctgctctgtccctccttctccatcagggagcagcgtgacttcagcgagtcccgcgagcacctggctagacagttaacaagcacgtccttccagcctgagccagcgcaggtttgggagggggcttcctggccccccccacggtgttccagcccctcctctcttccgccccctagtctcccacccttccctccccgtagtgaccaattcctatctcttccctctccgcaggctcaatgaatcgaatgaatgtgaacttcttcatctgtgaaaaatcttttttttttccattttgttctgtttgggggcttctgttttgtttggcgagagagcgatggctgccgtggggagtactggggagccctcgcggcaagcagggtgggggggacttgggggcatgccgggccctcactctctcgcctgttctgtgtctcacatgctttttctttcaaaattgggatccttccatgttgagccagccagagaagatagcgagatctaaatctctgccaaaaaaaaaaaaaaacttaaaaattaaaaacacaaagagcaaagcagaacttataaaattatatatatatatattaaaaagtctctattcttcaccccccagccttcctgaacctgcctctctgaggataaagcaattcattttctcccaccctcggccctcttgtttttaaaataaacttttaaaaaggaaaaaaaaaagtcactcttgctatttcttttttttagttagaggtggaacattccttggaccaggtgttgtattgcaggaccccttcccccagcagccaagccccctcttctctccctcccgccctggctcagctcccgcggccccgcccgtcccccctcccaggactggtctgttgtcttttcatctgttcaagaggagattgaaactgaaaacaaaatgagaacaacaaaaaaaattgtatggcagtttttactttttatcgctcgtttttaacttcacaaataaatgataacaaaacctccccgtctgcgggtgctgtctgtctccccccctttccttccctccctgtagttttgaagcggatgtttgttctttatagatgttgtttaaaaagcctgataatggtgattgaaatttacaaactttgtgtttttttttttttaagaaaaatataaaatagttttcttcaggctcaatgtgctttcctaaccgtgccccccccccctttttttttttgttaaataaagtgctttttgtttaaaaaagac

SEQ ID NO: 330900 - DNA, 3444 bp, Homo sapiens
aaaatacggctaggtacgaggcctgggtgaaagccaagatgatgctggatgacattgtgtctcggggtcgtgggggccccccaggacagttccacgacaacgccaacgggggccagaacggcaccgtgcaggagatcatgatccccgcgggcaaggccggcctggtcattggcaagggcggggagaccattaagcagctgcaggaacgcgctggagtgaagatgatcttaattcaggacggatctcagaatacgaatgtggacaaacctctccgcatcattggggatccttacaaagtgcagcaagcctgtgagatggtgatggacatcctccgggaacgtgaccaaggcggctttggggaccggaatgagtacggatctcggattggcggaggcatcgatgtgccagtgcccaggcattctgttggcgtggtcattggccggagtggagagatgatcaagaagatccagaatgatgctggcgtgcggatacagttcaagcaagatgacgggacagggcccgagaagattgctcatataatggggcccccagacaggtgcgagcacgcagcccggatcatcaacgacctcctccagagcctcagggtaggtggccccgggtgctgaaggggctggcagggcctccaggggagtgcaagaccagaccggcttccagggttcatcatcctcctcctcctcttgtcttgcagagtggtcccccaggtcctccagggggtccaggcatgcccccggggggccgaggccgaggaagaggccaaggcaattggggtccccctggcggggagatgaccttctccatccccactcacaagtgtgggctggtcatcggccgaggtggcgagaatgtgaaagccataaaccagcagacgggagccttcgtagagatctcccggcagctgccacccaacggggaccccaacttcaagttgttcatcatccggggttcaccccagcagattgaccacgccaagcagcttatcgaggaaaagatcgagggtcctctctgcccagttggaccaggcccaggtggcccaggccctgctggcccaatggggcccttcaatcctgggcccttcaaccaggggccacccggggctcccccacatgccggggggccccctcctcaccagtacccaccccagggctggggcaatacctacccccagtggcagccgcctgctcctcatgacccaagcaaagcagctgcagcggccgcggaccccaacgccgcgtgggccgcctactactcacactactaccagcagcccccgggccccgtccccggccccgcaccggcccctgcggccccaccggctcagggtgagccccctcagcccccacccaccggccagtcggactacactaaggcctgggaagagtattacaaaaagatcggccagcagccccagcagcccggagcgcccccacagcaggactacacgaaggcttgggaggagtactacaagaagcaagcgcaagtggccaccggagggggtccaggagctcccccaggctcccagccagactacagtgccgcctgggcggaatattacagacagcaggccgcttactacggacagaccccaggtcctggcggcccccagccgccgcccacgcagcagggacagcagcaggcaagtgggaattgccaccctcctcctcctcctttctccttccaacccccggccaccgtccatcctgccttagtgggtagcgccggaaaccccttcccctgcggggtgtgcccttgatgcctgcagcgggggccgtgtggccggaggtctccgggagtccccacgcaccgccagggaagcattcgctgggtccagaggttaaacgaagaggcctccctgcgccggctgcttgttcctgtgtgccgctgtcgtgatgctggggagcgctgagactcgcaggcgggacttctgaactgctggggagtcggggggcaggcagacagcgcggacggtgggcaccggcccggccgccaccacctcgctcacaatctggccacttgggaagaaaacgtctattttttccccttctctgcatcacttttttggtttttgttctttttattcttttattttttaaacccatgatcttttttcctgtgtccaagtgactgtgttgcaggcggcccggctctggcagggactggtggggacgcggggagcggcccaggcccctgccccgccgggctcagcctcccatgcgctcgcgcttgcctgtgtcccgggcttgtctgtgaagtgggcgtgaagatcgttgccaccttccaacctacctcacaggggtgttgtggggacaccatgatctctggattgttcatgtcgtcgtgctgcgccgggagccaccgccctccggagacagggcagctcccctacgaccctagcgcctccgccctccgcggcccctctcctctcttcctgctctgtccctccttctccatcagggagcagcgtgacttcagcgagtcccgcgagcacctggctagacagttaacaagcacgtccttccagcctgagccagcgcaggtttgggagggggcttcctggccccccccacggtgttccagcccctcctctcttccgccccctagtctcccacccttccctccccgtagtgaccaattcctatctcttccctctccgcaggctcaatgaatcgaatgaatgtgaacttcttcatctgtgaaaaatcttttttttttccattttgttctgtttgggggcttctgttttgtttggcgagagagcgatggctgccgtggggagtactggggagccctcgcggcaagcagggtgggggggacttgggggcatgccgggccctcactctctcgcctgttctgtgtctcacatgctttttctttcaaaattgggatccttccatgttgagccagccagagaagatagcgagatctaaatctctgccaaaaaaaaaaaaaaacttaaaaattaaaaacacaaagagcaaagcagaacttataaaattatatatatatatattaaaaagtctctattcttcaccccccagccttcctgaacctgcctctctgaggataaagcaattcattttctcccaccctcggccctcttgtttttaaaataaacttttaaaaaggaaaaaaaaaagtcactcttgctatttcttttttttagttagaggtggaacattccttggaccaggtgttgtattgcaggaccccttcccccagcagccaagccccctcttctctccctcccgccctggctcagctcccgcggccccgcccgtcccccctcccaggactggtctgttgtcttttcatctgttcaagaggagattgaaactgaaaacaaaatgagaacaacaaaaaaaattgtatggcagtttttactttttatcgctcgtttttaacttcacaaataaatgataacaaaac

SEQ ID NO: 330901 - DNA, 3876 bp, Homo sapiens
  misc_feature (3777)..(3777): n is a, c, g, or t
  misc_feature (3840)..(3840): n is a, c, g, or t
  misc_feature (3872)..(3872): n is a, c, g, or t
aaaatacggctaggtacgaggcctgggtgaaagccaagatgatgctggatgacattgtgtctcggggtcgtgggggccccccaggacagttccacgacaacgccaacgggggccagaacggcaccgtgcaggagatcatgatccccgcgggcaaggccggcctggtcattggcaagggcggggagaccattaagcagctgcaggaacgcgctggagtgaagatgatcttaattcaggacggatctcagaatacgaatgtggacaaacctctccgcatcattggggatccttacaaagtgcagcaagcctgtgagatggtgatggacatcctccgggaacgtgaccaaggcggctttggggaccggaatgagtacggatctcggattggcggaggcatcgatgtgccagtgcccaggcattctgttggcgtggtcattggccggagtggagagatgatcaagaagatccagaatgatgctggcgtgcggatacagttcaagcaagatgacgggacagggcccgagaagattgctcatataatggggcccccagacaggtgcgagcacgcagcccggatcatcaacgacctcctccagagcctcagggtaggtggccccgggtgctgaaggggctggcagggcctccaggggagtgcaagaccagaccggcttccagggttcatcatcctcctcctcctcttgtcttgcagagtggtcccccaggtcctccagggggtccaggcatgcccccggggggccgaggccgaggaagaggccaaggcaattggggtccccctggcggggagatgaccttctccatccccactcacaagtgtgggctggtcatcggccgaggtggcgagaatgtgaaagccataaaccagcagacgggagccttcgtagagatctcccggcagctgccacccaacggggaccccaacttcaagttgttcatcatccggggttcaccccagcagattgaccacgccaagcagcttatcgaggaaaagatcgagggtcctctctgcccagttggaccaggcccaggtggcccaggccctgctggcccaatggggcccttcaatcctgggcccttcaaccaggggccacccggggctcccccacatgccggggggccccctcctcaccagtacccaccccagggctggggcaatacctacccccagtggcagccgcctgctcctcatgacccaagcaaagcagctgcagcggccgcggaccccaacgccgcgtgggccgcctactactcacactactaccagcagcccccgggccccgtccccggccccgcaccggcccctgcggccccaccggctcagggtgagccccctcagcccccacccaccggccagtcggactacactaaggcctgggaagagtattacaaaaagatcggccagcagccccagcagcccggagcgcccccacagcaggactacacgaaggcttgggaggagtactacaagaagcaagcgcaagtggccaccggagggggtccaggagctcccccaggctcccagccagactacagtgccgcctgggcggaatattacagacagcaggccgcttactacggacagaccccaggtcctggcggcccccagccgccgcccacgcagcagggacagcagcaggcaagtgggaattgccaccctcctcctcctcctttctccttccaacccccggccaccgtccatcctgccttagtgggtagcgccggaaaccccttcccctgcggggtgtgcccttgatgcctgcagcgggggccgtgtggccggaggtctccgggagtccccacgcaccgccagggaagcattcgctgggtccagaggttaaacgaagaggcctccctgcgccggctgcttgttcctgtgtgccgctgtcgtgatgctggggagcgctgagactcgcaggcgggacttctgaactgctggggagtcggggggcaggcagacagcgcggacggtgggcaccggcccggccgccaccacctcgctcacaatctggccacttgggaagaaaacgtctattttttccccttctctgcatcacttttttggtttttgttctttttattcttttattttttaaacccatgatcttttttcctgtgtccaagtgactgtgttgcaggcggcccggctctggcagggactggtggggacgcggggagcggcccaggcccctgccccgccgggctcagcctcccatgcgctcgcgcttgcctgtgtcccgggcttgtctgtgaagtgggcgtgaagatcgttgccaccttccaacctacctcacaggggtgttgtggggacaccatgatctctggattgttcatgtcgtcgtgctgcgccgggagccaccgccctccggagacagggcagctcccctacgaccctagcgcctccgccctccgcggcccctctcctctcttcctgctctgtccctccttctccatcagggagcagcgtgacttcagcgagtcccgcgagcacctggctagacagttaacaagcacgtccttccagcctgagccagcgcaggtttgggagggggcttcctggccccccccacggtgttccagcccctcctctcttccgccccctagtctcccacccttccctccccgtagtgaccaattcctatctcttccctctccgcaggctcaatgaatcgaatgaatgtgaacttcttcatctgtgaaaaatcttttttttttccattttgttctgtttgggggcttctgttttgtttggcgagagagcgatggctgccgtggggagtactggggagccctcgcggcaagcagggtgggggggacttgggggcatgccgggccctcactctctcgcctgttctgtgtctcacatgctttttctttcaaaattgggatccttccatgttgagccagccagagaagatagcgagatctaaatctctgccaaaaaaaaaaaaaaacttaaaaattaaaaacacaaagagcaaagcagaacttataaaattatatatatatatattaaaaagtctctattcttcaccccccagccttcctgaacctgcctctctgaggataaagcaattcattttctcccaccctcggccctcttgtttttaaaataaacttttaaaaaggaaaaaaaaaagtcactcttgctatttcttttttttagttagaggtggaacattccttggaccaggtgttgtattgcaggaccccttcccccagcagccaagccccctcttctctccctcccgccctggctcagctcccgcggccccgcccgtcccccctcccaggactggtctgttgtcttttcatctgttcaagaggagattgaaactgaaaacaaaatgagaacaacaaaaaaaattgtatggcagtttttactttttatcgctcgtttttaacttcacaaataaatgataacaaaactcgtgccgaattcggcacgagctcacattagctgattactcagtgatatcgttgtagcacagataataaacaaattcactctgtttcacagtattaataaagaaaaactttaggaaggcataattgttcttgacctcagtcttaaaaccatagggaataaatactccagaatacagcagtttcccttaggatgcatgttttagagtctgtcattcttttatttattttttaagttagtcttcatgtgtcagctgttcctctagccttctctgggtcctaagtaaatgtgccttcagagttttctgctcatacctaataaaagtcaagaatgtncccacatgctacgtatgcatgtcaatacagactgatttctgagttccttctggaagtgctcangagggaaagtcaggcagtgtgaactgagattnaggc

SEQ ID NO: 330902 - DNA, 4250 bp, Homo sapiens
aaaatacggctaggtacgaggcctgggtgaaagccaagatgatgctggatgacattgtgtctcggggtcgtgggggccccccaggacagttccacgacaacgccaacgggggccagaacggcaccgtgcaggagatcatgatccccgcgggcaaggccggcctggtcattggcaagggcggggagaccattaagcagctgcaggaacgcgctggagtgaagatgatcttaattcaggacggatctcagaatacgaatgtggacaaacctctccgcatcattggggatccttacaaagtgcagcaagcctgtgagatggtgatggacatcctccgggaacgtgaccaaggcggctttggggaccggaatgagtacggatctcggattggcggaggcatcgatgtgccagtgcccaggcattctgttggcgtggtcattggccggagtggagagatgatcaagaagatccagaatgatgctggcgtgcggatacagttcaagcaagatgacgggacagggcccgagaagattgctcatataatggggcccccagacaggtgcgagcacgcagcccggatcatcaacgacctcctccagagcctcagggtaggtggccccgggtgctgaaggggctggcagggcctccaggggagtgcaagaccagaccggcttccagggttcatcatcctcctcctcctcttgtcttgcagagtggtcccccaggtcctccagggggtccaggcatgcccccggggggccgaggccgaggaagaggccaaggcaattggggtccccctggcggggagatgaccttctccatccccactcacaagtgtgggctggtcatcggccgaggtggcgagaatgtgaaagccataaaccagcagacgggagccttcgtagagatctcccggcagctgccacccaacggggaccccaacttcaagttgttcatcatccggggttcaccccagcagattgaccacgccaagcagcttatcgaggaaaagatcgaggtgggttggggcgggctctggggatttggtctcacagcccggatcccagcccacttaccttggttactctccttccttctagggtcctctctgcccagttggaccaggcccaggtggcccaggccctgctggcccaatggggcccttcaatcctgggcccttcaaccaggggccacccggggctcccccacagtgagtatcctctgcctcctgggttttgaggccgggggcttactgagctggcaagaagaatagcagaccccatttccctttccctagaagtgcaggcggggggcctcatccagcccatttttgtggataccatcaacaggccctctcctgtctactggtagagcatgtgcctttcagcatccctctgtgcacgtgcaagtttcgcggcttctttcatgtcctcaagctgacgctgcgcgtccttcgagttgcttcttgtctaggcctttcccaggcgccccgttgagcctggtggtctgggtctctggcgcctccccactgaaaaacatccccaccccaggtggtccggctgcggccacccccgcaccactgctcaagcatccctttcttctctcctgcagtgccggggggccccctcctcaccagtacccaccccagggctggggcaatacctacccccagtggcagccgcctgctcctcatgacccaagtaagtgatgggccacctggcggagggcaggccctgttctgtccccccgtctcacccgaggtatctcctgcaggcaaagcagctgcagcggccgcggaccccaacgccgcgtgggccgcctactactcacactactaccagcagcccccgggccccgtccccggccccgcaccggcccctgcggccccaccggctcagggtgagccccctcagcccccacccaccggccagtcggactacactaaggcctgggaagagtattacaaaaagatcggccagcagccccagcagcccggagcgcccccacagcaggactacacgaaggcttgggaggagtactacaagaagcaagcgcaagtggccaccggagggggtccaggagctcccccaggctcccagccagactacagtgccgcctgggcggaatattacagacagcaggccgcttactacggacagaccccaggtcctggcggcccccagccgccgcccacgcagcagggacagcagcaggcaagtgggaattgccaccctcctcctcctcctttctccttccaacccccggccaccgtccatcctgccttagtgggtagcgccggaaaccccttcccctgcggggtgtgcccttgatgcctgcagcgggggccgtgtggccggaggtctccgggagtccccacgcaccgccagggaagcattcgctgggtccagaggttaaacgaagaggcctccctgcgccggctgcttgttcctgtgtgccgctgtcgtgatgctggggagcgctgagactcgcaggcgggacttctgaactgctggggagtcggggggcaggcagacagcgcggacggtgggcaccggcccggccgccaccacctcgctcacaatctggccacttgggaagaaaacgtctattttttccccttctctgcatcacttttttggtttttgttctttttattcttttattttttaaacccatgatcttttttcctgtgtccaagtgactgtgttgcaggcggcccggctctggcagggactggtggggacgcggggagcggcccaggcccctgccccgccgggctcagcctcccatgcgctcgcgcttgcctgtgtcccgggcttgtctgtgaagtgggcgtgaagatcgttgccaccttccaacctacctcacaggggtgttgtggggacaccatgatctctggattgttcatgtcgtcgtgctgcgccgggagccaccgccctccggagacagggcagctcccctacgaccctagcgcctccgccctccgcggcccctctcctctcttcctgctctgtccctccttctccatcagggagcagcgtgacttcagcgagtcccgcgagcacctggctagacagttaacaagcacgtccttccagcctgagccagcgcaggtttgggagggggcttcctggccccccccacggtgttccagcccctcctctcttccgccccctagtctcccacccttccctccccgtagtgaccaattcctatctcttccctctccgcaggctcaatgaatcgaatgaatgtgaacttcttcatctgtgaaaaatcttttttttttccattttgttctgtttgggggcttctgttttgtttggcgagagagcgatggctgccgtggggagtactggggagccctcgcggcaagcagggtgggggggacttgggggcatgccgggccctcactctctcgcctgttctgtgtctcacatgctttttctttcaaaattgggatccttccatgttgagccagccagagaagatagcgagatctaaatctctgccaaaaaaaaaaaaaaacttaaaaattaaaaacacaaagagcaaagcagaacttataaaattatatatatatatattaaaaagtctctattcttcaccccccagccttcctgaacctgcctctctgaggataaagcaattcattttctcccaccctcggccctcttgtttttaaaataaacttttaaaaaggaaaaaaaaaagtcactcttgctatttcttttttttagttagaggtggaacattccttggaccaggtgttgtattgcaggaccccttcccccagcagccaagccccctcttctctccctcccgccctggctcagctcccgcggccccgcccgtcccccctcccaggactggtctgttgtcttttcatctgttcaagaggagattgaaactgaaaacaaaatgagaacaacaaaaaaaattgtatggcagtttttactttttatcgctcgtttttaacttcacaaataaatgataacaaaacctccccgtctgcgggtgctgtctgtctccccccctttccttccctccctgtagttttgaagcggatgtttgttctttatagatgttgtttaaaaagcctgataatggtgattgaaatttacaaactttgtgtttttttttttttaagaaaaatataaaatagttttcttcaggctcaatgtgctttcctaaccgtgccccccccccctttttttttttgttaaataaagtgctttttgtttaaaaaagac

SEQ ID NO: 330903 - DNA, 3145 bp, Homo sapiens
aaaatacggctaggtacgaggcctgggtgaaagccaagatgatgctggatgacattgtgtctcggggtcgtgggggccccccaggacagttccacgacaacgccaacgggggccagaacggcaccgtgcaggagatcatgatccccgcgggcaaggccggcctggtcattggcaagggcggggagaccattaagcagctgcaggaacgcgctggagtgaagatgatcttaattcaggacggatctcagaatacgaatgtggacaaacctctccgcatcattggggatccttacaaagtgcagcaagcctgtgagatggtgatggacatcctccgggaacgtgaccaaggcggctttggggaccggaatgagtacggatctcggattggcggaggcatcgatgtgccagtgcccaggcattctgttggcgtggtcattggccggagtggagagatgatcaagaagatccagaatgatgctggcgtgcggatacagttcaagcaagatgacgggacagggcccgagaagattgctcatataatggggcccccagacaggtgcgagcacgcagcccggatcatcaacgacctcctccagagcctcagggtaggtggccccgggtgctgaaggggctggcagggcctccaggggagtgcaagaccagaccggcttccagggttcatcatcctcctcctcctcttgtcttgcagagtggtcccccaggtcctccagggggtccaggcatgcccccggggggccgaggccgaggaagaggccaaggcaattggggtccccctggcggggagatgaccttctccatccccactcacaagtgtgggctggtcatcggccgaggtggcgagaatgtgaaagccataaaccagcagacgggagccttcgtagagatctcccggcagctgccacccaacggggaccccaacttcaagttgttcatcatccggggttcaccccagcagattgaccacgccaagcagcttatcgaggaaaagatcgagggtcctctctgcccagttggaccaggcccaggtggcccaggccctgctggcccaatggggcccttcaatcctgggcccttcaaccaggggccacccggggctcccccacatgccggggggccccctcctcaccagtacccaccccagggctggggcaatacctacccccagtggcagccgcctgctcctcatgacccaagcaaagcagctgcagcggccgcggaccccaacgccgcgtgggccgcctactactcacactactaccagcagcccccgggccccgtccccggccccgcaccggcccctgcggccccaccggctcagggtgagccccctcagcccccacccaccggccagtcggactacactaaggcctgggaagagtattacaaaaagatcggccagcagccccagcagcccggagcgcccccacagcaggactacacgaaggcttgggaggagtactacaagaagcaagcgcaagtggccaccggagggggtccaggagctcccccaggctcccagccagactacagtgccgcctgggcggaatattacagacagcaggccgcttactacggacagaccccaggtcctggcggcccccagccgccgcccacgcagcagggacagcagcaggcaagtgggaattgccaccctcctcctcctcctttctccttccaacccccggccaccgtccatcctgccttagtgggtagcgccggaaaccccttcccctgcggggtgtgcccttgatgcctgcagcgggggccgtgtggccggaggtctccgggagtccccacgcaccgccagggaagcattcgctgggtccagaggttaaacgaagaggcctccctgcgccggctgcttgttcctgtgtgccgctgtcgtgatgctggggagcgctgagactcgcaggcgggacttctgaactgctggggagtcggggggcaggcagacagcgcggacggtgggcaccggcccggccgccaccacctcgctcacaatctggccacttgggaagaaaacgtctattttttccccttctctgcatcacttttttggtttttgttctttttattcttttattttttaaacccatgatcttttttcctgtgtccaagtgactgtgttgcaggcggcccggctctggcagggactggtggggacgcggggagcggcccaggcccctgccccgccgggctcagcctcccatgcgctcgcgcttgcctgtgtcccgggcttgtctgtgaagtgggcgtgaagatcgttgccaccttccaacctacctcacaggggtgttgtggggacaccatgatctctggattgttcatgtcgtcgtgctgcgccgggagccaccgccctccggagacagggcagctcccctacgaccctagcgcctccgccctccgcggcccctctcctctcttcctgctctgtccctccttctccatcagggagcagcgtgacttcagcgagtcccgcgagcacctggctagacagttaacaagcacgtccttccagcctgagccagcgcaggtttgggagggggcttcctggccccccccacggtgttccagcccctcctctcttccgccccctagtctcccacccttccctccccgtagtgaccaattcctatctcttccctctccgcaggctcaatgaatcgaatgaatgtgaacttcttcatctgtgaaaaatcttttttttttccattttgttctgtttgggggcttctgttttgtttggcgagagagcgatggctgccgtggggagtactggggagccctcgcggcaagcagggtgggggggacttgggggcatgccgggccctcactctctcgcctgttctgtgtctcacatgctttttctttcaaaattgggatccttccatgttgagccagccagagaagatagcgagatctaaatctctgccaaaaaaaaaaaaaaacttaaaaattaaaaacacaaagagcaaagcagaacttataaaattatatatatatatattaaaaagtctctattcttcaccccccagccttcctgaacctgcctctctgaggataaagcaattcattttctcccaccctcggccctcttgtttttaaaataaacttttaaaaagga

SEQ ID NO: 330904 - DNA, 3115 bp, Homo sapiens
aaaatacggctaggtacgaggcctgggtgaaagccaagatgatgctggatgacattgtgtctcggggtcgtgggggccccccaggacagttccacgacaacgccaacgggggccagaacggcaccgtgcaggagatcatgatccccgcgggcaaggccggcctggtcattggcaagggcggggagaccattaagcagctgcaggaacgcgctggagtgaagatgatcttaattcaggacggatctcagaatacgaatgtggacaaacctctccgcatcattggggatccttacaaagtgcagcaagcctgtgagatggtgatggacatcctccgggaacgtgaccaaggcggctttggggaccggaatgagtacggatctcggattggcggaggcatcgatgtgccagtgcccaggcattctgttggcgtggtcattggccggagtggagagatgatcaagaagatccagaatgatgctggcgtgcggatacagttcaagcaagatgacgggacagggcccgagaagattgctcatataatggggcccccagacaggtgcgagcacgcagcccggatcatcaacgacctcctccagagcctcagggtaggtggccccgggtgctgaaggggctggcagggcctccaggggagtgcaagaccagaccggcttccagggttcatcatcctcctcctcctcttgtcttgcagagtggtcccccaggtcctccagggggtccaggcatgcccccggggggccgaggccgaggaagaggccaaggcaattggggtccccctggcggggagatgaccttctccatccccactcacaagtgtgggctggtcatcggccgaggtggcgagaatgtgaaagccataaaccagcagacgggagccttcgtagagatctcccggcagctgccacccaacggggaccccaacttcaagttgttcatcatccggggttcaccccagcagattgaccacgccaagcagcttatcgaggaaaagatcgagggtcctctctgcccagttggaccaggcccaggtggcccaggccctgctggcccaatggggcccttcaatcctgggcccttcaaccaggggccacccggggctcccccacatgccggggggccccctcctcaccagtacccaccccagggctggggcaatacctacccccagtggcagccgcctgctcctcatgacccaagcaaagcagctgcagcggccgcggaccccaacgccgcgtgggccgcctactactcacactactaccagcagcccccgggccccgtccccggccccgcaccggcccctgcggccccaccggctcagggtgagccccctcagcccccacccaccggccagtcggactacactaaggcctgggaagagtattacaaaaagatcggccagcagccccagcagcccggagcgcccccacagcaggactacacgaaggcttgggaggagtactacaagaagcaagcgcaagtggccaccggagggggtccaggagctcccccaggctcccagccagactacagtgccgcctgggcggaatattacagacagcaggccgcttactacggacagaccccaggtcctggcggcccccagccgccgcccacgcagcagggacagcagcaggcaagtgggaattgccaccctcctcctcctcctttctccttccaacccccggccaccgtccatcctgccttagtgggtagcgccggaaaccccttcccctgcggggtgtgcccttgatgcctgcagcgggggccgtgtggccggaggtctccgggagtccccacgcaccgccagggaagcattcgctgggtccagaggttaaacgaagaggcctccctgcgccggctgcttgttcctgtgtgccgctgtcgtgatgctggggagcgctgagactcgcaggcgggacttctgaactgctggggagtcggggggcaggcagacagcgcggacggtgggcaccggcccggccgccaccacctcgctcacaatctggccacttgggaagaaaacgtctattttttccccttctctgcatcacttttttggtttttgttctttttattcttttattttttaaacccatgatcttttttcctgtgtccaagtgactgtgttgcaggcggcccggctctggcagggactggtggggacgcggggagcggcccaggcccctgccccgccgggctcagcctcccatgcgctcgcgcttgcctgtgtcccgggcttgtctgtgaagtgggcgtgaagatcgttgccaccttccaacctacctcacaggggtgttgtggggacaccatgatctctggattgttcatgtcgtcgtgctgcgccgggagccaccgccctccggagacagggcagctcccctacgaccctagcgcctccgccctccgcggcccctctcctctcttcctgctctgtccctccttctccatcagggagcagcgtgacttcagcgagtcccgcgagcacctggctagacagttaacaagcacgtccttccagcctgagccagcgcaggtttgggagggggcttcctggccccccccacggtgttccagcccctcctctcttccgccccctagtctcccacccttccctccccgtagtgaccaattcctatctcttccctctccgcaggctcaatgaatcgaatgaatgtgaacttcttcatctgtgaaaaatcttttttttttccattttgttctgtttgggggcttctgttttgtttggcgagagagcgatggctgccgtggggagtactggggagccctcgcggcaagcagggtgggggggacttgggggcatgccgggccctcactctctcgcctgttctgtgtctcacatgctttttctttcaaaattgggatccttccatgttgagccagccagagaagatagcgagatctaaatctctgccaaaaaaaaaaaaaaacttaaaaattaaaaacacaaagagcaaagcagaacttataaaattatatatatatatattaaaaagtctagacccctcctcccccaccctgcatttagtttctcctttggataaaaccagtaaaaaatagaatgtttgggatctta

SEQ ID NO: 330905 - DNA, 3656 bp, Homo sapiens
aaaatacggctaggtacgaggcctgggtgaaagccaagatgatgctggatgacattgtgtctcggggtcgtgggggccccccaggacagttccacgacaacgccaacgggggccagaacggcaccgtgcaggagatcatgatccccgcgggcaaggccggcctggtcattggcaagggcggggagaccattaagcagctgcaggaacgcgctggagtgaagatgatcttaattcaggacggatctcagaatacgaatgtggacaaacctctccgcatcattggggatccttacaaagtgcagcaagcctgtgagatggtgatggacatcctccgggaacgtgaccaaggcggctttggggaccggaatgagtacggatctcggattggcggaggcatcgatgtgccagtgcccaggcattctgttggcgtggtcattggccggagtggagagatgatcaagaagatccagaatgatgctggcgtgcggatacagttcaagcaagatgacgggacagggcccgagaagattgctcatataatggggcccccagacaggtgcgagcacgcagcccggatcatcaacgacctcctccagagcctcagggtaggtggccccgggtgctgaaggggctggcagggcctccaggggagtgcaagaccagaccggcttccagggttcatcatcctcctcctcctcttgtcttgcagagtggtcccccaggtcctccagggggtccaggcatgcccccggggggccgaggccgaggaagaggccaaggcaattggggtccccctggcggggagatgaccttctccatccccactcacaagtgtgggctggtcatcggccgaggtggcgagaatgtgaaagccataaaccagcagacgggagccttcgtagagatctcccggcagctgccacccaacggggaccccaacttcaagttgttcatcatccggggttcaccccagcagattgaccacgccaagcagcttatcgaggaaaagatcgagggtcctctctgcccagttggaccaggcccaggtggcccaggccctgctggcccaatggggcccttcaatcctgggcccttcaaccaggggccacccggggctcccccacatgccggggggccccctcctcaccagtacccaccccagggctggggcaatacctacccccagtggcagccgcctgctcctcatgacccaagcaaagcagctgcagcggccgcggaccccaacgccgcgtgggccgcctactactcacactactaccagcagcccccgggccccgtccccggccccgcaccggcccctgcggccccaccggctcagggtgagccccctcagcccccacccaccggccagtcggactacactaaggcctgggaagagtattacaaaaagatcggccagcagccccagcagcccggagcgcccccacagcaggactacacgaaggcttgggaggagtactacaagaagcaagcgcaagtggccaccggagggggtccaggagctcccccaggctcccagccagactacagtgccgcctgggcggaatattacagacagcaggccgcttactacggacagaccccaggtcctggcggcccccagccgccgcccacgcagcagggacagcagcaggcaagtgggaattgccaccctcctcctcctcctttctccttccaacccccggccaccgtccatcctgccttagtgggtagcgccggaaaccccttcccctgcggggtgtgcccttgatgcctgcagcgggggccgtgtggccggaggtctccgggagtccccacgcaccgccagggaagcattcgctgggtccagaggttaaacgaagaggcctccctgcgccggctgcttgttcctgtgtgccgctgtcgtgatgctggggagcgctgagactcgcaggcgggacttctgaactgctggggagtcggggggcaggcagacagcgcggacggtgggcaccggcccggccgccaccacctcgctcacaatctggccacttgggaagaaaacgtctattttttccccttctctgcatcacttttttggtttttgttctttttattcttttattttttaaacccatgatcttttttcctgtgtccaagtgactgtgttgcaggcggcccggctctggcagggactggtggggacgcggggagcggcccaggcccctgccccgccgggctcagcctcccatgcgctcgcgcttgcctgtgtcccgggcttgtctgtgaagtgggcgtgaagatcgttgccaccttccaacctacctcacaggggtgttgtggggacaccatgatctctggattgttcatgtcgtcgtgctgcgccgggagccaccgccctccggagacagggcagctcccctacgaccctagcgcctccgccctccgcggcccctctcctctcttcctgctctgtccctccttctccatcagggagcagcgtgacttcagcgagtcccgcgagcacctggctagacagttaacaagcacgtccttccagcctgagccagcgcaggtttgggagggggcttcctggccccccccacggtgttccagcccctcctctcttccgccccctagtctcccacccttccctccccgtagtgaccaattcctatctcttccctctccgcaggctcaatgaatcgaatgaatgtgaacttcttcatctgtgaaaaatcttttttttttccattttgttctgtttgggggcttctgttttgtttggcgagagagcgatggctgccgtggggacttgggggcatgccgggccctcactctctcgcctgttctgtgtctcacatgctttttctttcaaaattgggatccttccatgttgagccagccagagaagatagcgagatctaaatctctgccaaaaaaaaaaaaaaacttaaaaattaaaaacacaaagagcaaagcagaacttataaaattatatatatatatattaaaaagtctctattcttcaccccccagccttcctgaacctgcctctctgaggataaagcaattcattttctcccaccctcggccctcttgtttttaaaataaacttttaaaaaggaaaaaaaaaagtcactcttgctatttcttttttttagttagaggtggaacattccttggaccaggtgttgtattgcaggaccccttcccccagcagccaagccccctcttctctccctcccgccctggctcagctcccgcggccccgcccgtcccccctcccaggactggtctgttgtcttttcatctgttcaagaggagattgaaactgaaaacaaaatgagaacaacaaaaaaaattgtatggcagtttttactttttatcgctcgtttttaacttcacaaataaatgataacaaaacctccccgtctgcgggtgctgtctgtctccccccctttccttccctccctgtagttttgaagcggatgtttgttctttatagatgttgtttaaaaagcctgataatggtgattgaaatttacaaactttgtgtttttttttttttaagaaaaatataaaatagttttcttcaggctcaatgtgctttcctaaccgtgccccccccccctttttttttttgttaaataaagtgctttttgtttaaaaaagac

SEQ ID NO: 330906 - DNA, 3447 bp, Homo sapiens
aaaatacggctaggtacgaggcctgggtgaaagccaagatgatgctggatgacattgtgtctcggggtcgtgggggccccccaggacagttccacgacaacgccaacgggggccagaacggcaccgtgcaggagatcatgatccccgcgggcaaggccggcctggtcattggcaagggcggggagaccattaagcagctgcaggaacgcgctggagtgaagatgatcttaattcaggacggatctcagaatacgaatgtggacaaacctctccgcatcattggggatccttacaaagtgcagcaagcctgtgagatggtgatggacatcctccgggaacgtgaccaaggcggctttggggaccggaatgagtacggatctcggattggcggaggcatcgatgtgccagtgcccaggcattctgttggcgtggtcattggccggagtggagagatgatcaagaagatccagaatgatgctggcgtgcggatacagttcaagcaagatgacgggacagggcccgagaagattgctcatataatggggcccccagacaggtgcgagcacgcagcccggatcatcaacgacctcctccagagcctcagggtaggtggccccgggtgctgaaggggctggcagggcctccaggggagtgcaagaccagaccggcttccagggttcatcatcctcctcctcctcttgtcttgcagagtggtcccccaggtcctccagggggtccaggcatgcccccggggggccgaggccgaggaagaggccaaggcaattggggtccccctggcggggagatgaccttctccatccccactcacaagtgtgggctggtcatcggccgaggtggcgagaatgtgaaagccataaaccagcagacgggagccttcgtagagatctcccggcagctgccacccaacggggaccccaacttcaagttgttcatcatccggggttcaccccagcagattgaccacgccaagcagcttatcgaggaaaagatcgagggtcctctctgcccagttggaccaggcccaggtggcccaggccctgctggcccaatggggcccttcaatcctgggcccttcaaccaggggccacccggggctcccccacatgccggggggccccctcctcaccagtacccaccccagggctggggcaatacctacccccagtggcagccgcctgctcctcatgacccaagcaaagcagctgcagcggccgcggaccccaacgccgcgtgggccgcctactactcacactactaccagcagcccccgggccccgtccccggccccgcaccggcccctgcggccccaccggctcagggtgagccccctcagcccccacccaccggccagtcggactacactaaggcctgggaagagtattacaaaaagatcggccagcagccccagcagcccggagcgcccccacagcaggactacacgaaggcttgggaggagtactacaagaagcaagcgcaagtggccaccggagggggtccaggagctcccccaggctcccagccagactacagtgccgcctgggcggaatattacagacagcaggccgcttactacggacagaccccaggtcctggcggcccccagccgccgcccacgcagcagggacagcagcaggcaagtgggaattgccaccctcctcctcctcctttctccttccaacccccggccaccgtccatcctgccttagtgggtagcgccggaaaccccttcccctgcggggtgtgcccttgatgcctgcagcgggggccgtgtggccggaggtctccgggagtccccacgcaccgccagggaagcattcgctgggtccagaggttaaacgaagaggcctccctgcgccggctgcttgttcctgtgtgccgctgtcgtgatgctggggagcgctgagactcgcaggcgggacttctgaactgctggggagtcggggggcaggcagacagcgcggacggtgggcaccggcccggccgccaccacctcgctcacaatctggccacttgggaagaaaacgtctattttttccccttctctgcatcacttttttggtttttgttctttttattcttttattttttaaacccatgatcttttttcctgtgtccaagtgactgtgttgcaggcggcccggctctggcagggactggtggggacgcggggagcggcccaggcccctgccccgccgggctcagcctcccatgcgctcgcgcttgcctgtgtcccgggcttgtctgtgaagtgggcgtgaagatcgttgccaccttccaacctacctcacaggggtgttgtggggacaccatgatctctggatttccagcccctcctctcttccgccccctagtctcccacccttccctccccgtagtgaccaattcctatctcttccctctccgcaggctcaatgaatcgaatgaatgtgaacttcttcatctgtgaaaaatcttttttttttccattttgttctgtttgggggcttctgttttgtttggcgagagagcgatggctgccgtggggagtactggggagccctcgcggcaagcagggtgggggggacttgggggcatgccgggccctcactctctcgcctgttctgtgtctcacatgctttttctttcaaaattgggatccttccatgttgagccagccagagaagatagcgagatctaaatctctgccaaaaaaaaaaaaaaacttaaaaattaaaaacacaaagagcaaagcagaacttataaaattatatatatatatattaaaaagtctctattcttcaccccccagccttcctgaacctgcctctctgaggataaagcaattcattttctcccaccctcggccctcttgtttttaaaataaacttttaaaaaggaaaaaaaaaagtcactcttgctatttcttttttttagttagaggtggaacattccttggaccaggtgttgtattgcaggaccccttcccccagcagccaagccccctcttctctccctcccgccctggctcagctcccgcggccccgcccgtcccccctcccaggactggtctgttgtcttttcatctgttcaagaggagattgaaactgaaaacaaaatgagaacaacaaaaaaaattgtatggcagtttttactttttatcgctcgtttttaacttcacaaataaatgataacaaaacctccccgtctgcgggtgctgtctgtctccccccctttccttccctccctgtagttttgaagcggatgtttgttctttatagatgttgtttaaaaagcctgataatggtgattgaaatttacaaactttgtgtttttttttttttaagaaaaatataaaatagttttcttcaggctcaatgtgctttcctaaccgtgccccccccccctttttttttttgttaaataaagtgctttttgtttaaaaaagac

SEQ ID NO: 330907 - DNA, 3205 bp, Homo sapiens
aaaatacggctaggtacgaggcctgggtgaaagccaagatgatgctggatgacattgtgtctcggggtcgtgggggccccccaggacagttccacgacaacgccaacgggggccagaacggcaccgtgcaggagatcatgatccccgcgggcaaggccggcctggtcattggcaagggcggggagaccattaagcagctgcaggaacgcgctggagtgaagatgatcttaattcaggacggatctcagaatacgaatgtggacaaacctctccgcatcattggggatccttacaaagtgcagcaagcctgtgagatggtgatggacatcctccgggaacgtgaccaaggcggctttggggaccggaatgagtacggatctcggattggcggaggcatcgatgtgccagtgcccaggcattctgttggcgtggtcattggccggagtggagagatgatcaagaagatccagaatgatgctggcgtgcggatacagttcaagcaagatgacgggacagggcccgagaagattgctcatataatggggcccccagacaggtgcgagcacgcagcccggatcatcaacgacctcctccagagcctcagggtaggtggccccgggtgctgaaggggctggcagggcctccaggggagtgcaagaccagaccggcttccagggttcatcatcctcctcctcctcttgtcttgcagagtggtcccccaggtcctccagggggtccaggcatgcccccggggggccgaggccgaggaagaggccaaggcaattggggtccccctggcggggagatgaccttctccatccccactcacaagtgtgggctggtcatcggccgaggtggcgagaatgtgaaagccataaaccagcagacgggagccttcgtagagatctcccggcagctgccacccaacggggaccccaacttcaagttgttcatcatccggggttcaccccagcagattgaccacgccaagcagcttatcgaggaaaagatcgagggtcctctctgcccagttggaccaggcccaggtggcccaggccctgctggcccaatggggcccttcaatcctgggcccttcaaccaggggccacccggggctcccccacatgccggggggccccctcctcaccagtacccaccccagggctggggcaatacctacccccagtggcagccgcctgctcctcatgacccaagcaaagcagctgcagcggccgcggaccccaacgccgcgtgggccgcctactactcacactactaccagcagcccccgggccccgtccccggccccgcaccggcccctgcggccccaccggctcagggtgagccccctcagcccccacccaccggccagtcggactacactaaggcctgggaagagtattacaaaaagatcggccagcagccccagcagcccggagcgcccccacagcaggactacacgaaggcttgggaggagtactacaagaagcaagcgcaagtggccaccggagggggtccaggagctcccccaggctcccagccagactacagtgccgcctgggcggaatattacagacagcaggccgcttactacggacagaccccaggtcctggcggcccccagccgccgcccacgcagcagggacagcagcaggcaagtgggaattgccaccctcctcctcctcctttctccttccaacccccggccaccgtccatcctgccttagtgggtagcgccggaaaccccttcccctgcggggtgtgcccttgatgcctgcagcgggggccgtgtggccggaggtctccgggagtccccacgcaccgccagggaagcattcgctgggtccagaggttaaacgaagaggcctccctgcgccggctgcttgttcctgtgtgccgctgtcgtgatgctggggagcgctgagactcgcaggcgggacttctgaactgctggggagtcggggggcaggcagacagcgcggacggtgggcaccggcccggccgccaccacctcgctcacaatctggccacttgggaagaaaacgtctattttttccccttctctgcatcacttttttggtttttgttctttttattcttttattttttaaacccatgatcttttttcctgtgtccaaccttccctccccgtagtgaccaattcctatctcttccctctccgcaggctcaatgaatcgaatgaatgtgaacttcttcatctgtgaaaaatcttttttttttccattttgttctgtttgggggcttctgttttgtttggcgagagagcgatggctgccgtggggagtactggggagccctcgcggcaagcagggtgggggggacttgggggcatgccgggccctcactctctcgcctgttctgtgtctcacatgctttttctttcaaaattgggatccttccatgttgagccagccagagaagatagcgagatctaaatctctgccaaaaaaaaaaaaaaacttaaaaattaaaaacacaaagagcaaagcagaacttataaaattatatatatatatattaaaaagtctctattcttcaccccccagccttcctgaacctgcctctctgaggataaagcaattcattttctcccaccctcggccctcttgtttttaaaataaacttttaaaaaggaaaaaaaaaagtcactcttgctatttcttttttttagttagaggtggaacattccttggaccaggtgttgtattgcaggaccccttcccccagcagccaagccccctcttctctccctcccgccctggctcagctcccgcggccccgcccgtcccccctcccaggactggtctgttgtcttttcatctgttcaagaggagattgaaactgaaaacaaaatgagaacaacaaaaaaaattgtatggcagtttttactttttatcgctcgtttttaacttcacaaataaatgataacaaaacctccccgtctgcgggtgctgtctgtctccccccctttccttccctccctgtagttttgaagcggatgtttgttctttatagatgttgtttaaaaagcctgataatggtgattgaaatttacaaactttgtgtttttttttttttaagaaaaatataaaatagttttcttcaggctcaatgtgctttcctaaccgtgccccccccccctttttttttttgttaaataaagtgctttttgtttaaaaaagac

SEQ ID NO: 330908 - DNA, 3431 bp, Homo sapiens
aaaatacggctaggtacgaggcctgggtgaaagccaagatgatgctggatgacattgtgtctcggggtcgtgggggccccccaggacagttccacgacaacgccaacgggggccagaacggcaccgtgcaggagatcatgatccccgcgggcaaggccggcctggtcattggcaagggcggggagaccattaagcagctgcaggaacgcgctggagtgaagatgatcttaattcaggacggatctcagaatacgaatgtggacaaacctctccgcatcattggggatccttacaaagtgcagcaagcctgtgagatggtgatggacatcctccgggaacgtgaccaaggcggctttggggaccggaatgagtacggatctcggattggcggaggcatcgatgtgccagtgcccaggcattctgttggcgtggtcattggccggagtggagagatgatcaagaagatccagaatgatgctggcgtgcggatacagttcaagcaagatgacgggacagggcccgagaagattgctcatataatggggcccccagacaggtgcgagcacgcagcccggatcatcaacgacctcctccagagcctcagggtaggtggccccgggtgctgaaggggctggcagggcctccaggggagtgcaagaccagaccggcttccagggttcatcatcctcctcctcctcttgtcttgcagagtggtcccccaggtcctccagggggtccaggcatgcccccggggggccgaggccgaggaagaggccaaggcaattggggtccccctggcggggagatgaccttctccatccccactcacaagtgtgggctggtcatcggccgaggtggcgagaatgtgaaagccataaaccagcagacgggagccttcgtagagatctcccggcagctgccacccaacggggaccccaacttcaagttgttcatcatccggggttcaccccagcagattgaccacgccaagcagcttatcgaggaaaagatcgagggtcctctctgcccagttggaccaggcccaggtggcccaggccctgctggcccaatggggcccttcaatcctgggcccttcaaccaggggccacccggggctcccccacatgccggggggccccctcctcaccagtacccaccccagggctggggcaatacctacccccagtggcagccgcctgctcctcatgacccaagcaaagcagctgcagcggccgcggaccccaacgccgcgtgggccgcctactactcacactactaccagcagcccccgggccccgtccccggccccgcaccggcccctgcggccccaccggctcagggtgagccccctcagcccccacccaccggccagtcggactacactaaggcctgggaagagtattacaaaaagatcggccagcagccccagcagcccggagcgcccccacagcaggactacacgaaggcttgggaggagtactacaagaagcaagcgcaagtggccaccggagggggtccaggagctcccccaggctcccagccagactacagtgccgcctgggcggaatattacagacagcaggccgcttactacggacagaccccaggtcctggcggcccccagccgccgcccacgcagcagggacagcagcaggcaagtgggaattgccaccctcctcctcctcctttctccttccaacccccggccaccgtccatcctgccttagtgggtagcgccggaaaccccttcccctgcggggtgtgcccttgatgcctgcagcgggggccgtgtggccggaggtctccgggagtccccacgcaccgccagggaagcattcgctgggtccagaggttaaacgaagaggcctccctgcgccggctgcttgttcctgtgtgccgctgtcgtgatgctggggagcgctgagactcgcaggcgggacttctgaactgctggggagtcggggggcaggcagacagcgcggacggtgggcaccggcccggccgccaccacctcgctcacaatctggccacttgggaagaaaacgtctattttttccccttctctgcatcacttttttggtttttgttctttttattcttttattttttaaacccatgatcttttttcctgtgtccaagtgactgtgttgcaggcggcccggctctggcagggactggtggggacgcggggagcggcccaggcccctgccccgccgggctcagcctcccatgcgctcgcgcttgcctgtgtcccgggcttgtctgtgaagtgggcgtgaagatcgttgccaccttccaacctacctcacaggggtgttgtggggacaccatgatctctggattgttcatgtcgtcgtgctgcgccgggagccaccgccctccggagacagggcagctcccctacgaccctagcgcctccgccctccgcggcccctctcctctcttcctgctctgtccctccttctccatcagggagcagcgtgacttcagcgagtcccgcgagcacctggctagacagttaacaagcacgtccttccagcctgagccagcgcaggtttgggagggggcttcctggccccccccacggtgtactctctcgcctgttctgtgtctcacatgctttttctttcaaaattgggatccttccatgttgagccagccagagaagatagcgagatctaaatctctgccaaaaaaaaaaaaaaacttaaaaattaaaaacacaaagagcaaagcagaacttataaaattatatatatatatattaaaaagtctctattcttcaccccccagccttcctgaacctgcctctctgaggataaagcaattcattttctcccaccctcggccctcttgtttttaaaataaacttttaaaaaggaaaaaaaaaagtcactcttgctatttcttttttttagttagaggtggaacattccttggaccaggtgttgtattgcaggaccccttcccccagcagccaagccccctcttctctccctcccgccctggctcagctcccgcggccccgcccgtcccccctcccaggactggtctgttgtcttttcatctgttcaagaggagattgaaactgaaaacaaaatgagaacaacaaaaaaaattgtatggcagtttttactttttatcgctcgtttttaacttcacaaataaatgataacaaaacctccccgtctgcgggtgctgtctgtctccccccctttccttccctccctgtagttttgaagcggatgtttgttctttatagatgttgtttaaaaagcctgataatggtgattgaaatttacaaactttgtgtttttttttttttaagaaaaatataaaatagttttcttcaggctcaatgtgctttcctaaccgtgccccccccccctttttttttttgttaaataaagtgctttttgtttaaaaaagac

SEQ ID NO: 330909 - DNA, 3321 bp, Homo sapiens
aaaatacggctaggtacgaggcctgggtgaaagccaagatgatgctggatgacattgtgtctcggggtcgtgggggccccccaggacagttccacgacaacgccaacgggggccagaacggcaccgtgcaggagatcatgatccccgcgggcaaggccggcctggtcattggcaagggcggggagaccattaagcagctgcaggaacgcgctggagtgaagatgatcttaattcaggacggatctcagaatacgaatgtggacaaacctctccgcatcattggggatccttacaaagtgcagcaagcctgtgagatggtgatggacatcctccgggaacgtgaccaaggcggctttggggaccggaatgagtacggatctcggattggcggaggcatcgatgtgccagtgcccaggcattctgttggcgtggtcattggccggagtggagagatgatcaagaagatccagaatgatgctggcgtgcggatacagttcaagcaagatgacgggacagggcccgagaagattgctcatataatggggcccccagacaggtgcgagcacgcagcccggatcatcaacgacctcctccagagcctcagggtaggtggccccgggtgctgaaggggctggcagggcctccaggggagtgcaagaccagaccggcttccagggttcatcatcctcctcctcctcttgtcttgcagagtggtcccccaggtcctccagggggtccaggcatgcccccggggggccgaggccgaggaagaggccaaggcaattggggtccccctggcggggagatgaccttctccatccccactcacaagtgtgggctggtcatcggccgaggtggcgagaatgtgaaagccataaaccagcagacgggagccttcgtagagatctcccggcagctgccacccaacggggaccccaacttcaagttgttcatcatccggggttcaccccagcagattgaccacgccaagcagcttatcgaggaaaagatcgagggtcctctctgcccagttggaccaggcccaggtggcccaggccctgctggcccaatggggcccttcaatcctgggcccttcaaccaggggccacccggggctcccccacatgccggggggccccctcctcaccagtacccaccccagggctggggcaatacctacccccagtggcagccgcctgctcctcatgacccaagcaaagcagctgcagcggccgcggaccccaacgccgcgtgggccgcctactactcacactactaccagcagcccccgggccccgtccccggccccgcaccggcccctgcggccccaccggctcagggtgagccccctcagcccccacccaccggccagtcggactacactaaggcctgggaagagtattacaaaaagatcggccagcagccccagcagcccggagcgcccccacagcaggactacacgaaggcttgggaggagtactacaagaagcaagcgcaagtggccaccggagggggtccaggagctcccccaggctcccagccagactacagtgccgcctgggcggaatattacagacagcaggccgcttactacggacagaccccaggtcctggcggcccccagccgccgcccacgcagcagggacagcagcaggcaagtgggaattgccaccctcctcctcctcctttctccttccaacccccggccaccgtccatcctgccttagtgggtagcgccggaaaccccttcccctgcggggtgtgcccttgatgcctgcagcgggggccgtgtggccggaggtctccgggagtccccacgcaccgccagggaagcattcgctgggtccagaggttaaacgaagaggcctccctgcgccggctgcttgttcctgtgtgccgctgtcgtgatgctggggagcgctgagactcgcaggcgggacttctgaactgctggggagtcggggggcaggcagacagcgcggacggtgggcaccggcccggccgccaccacctcgctcacaatctggccacttgggaagaaaacgtctattttttccccttctctgcatcacttttttggtttttgttctttttattcttttattttttaaacccatgatcttttttcctgtgtccaagtgactgtgttgcaggcggcccggctctggcagggactggtggggacgcggggagcggcccaggcccctgccccgccgggctcagcctcccatgcgctcgcgcttgcctgtgtcccgggcttgtctgtgaagtgggcgtgaagatcgttgccaccttccaacctacctcacaggggtgttgtggggacaccatgatctctggattgttcatgtcgtcgtgctgcgccgggagccaccgccctccggagacagggcagctcccctacgaccctagcgcctccgccctccgcggcccctctcctctcttcctgctctgtccctccttctccatcagggagcagcgtgacttcagcgagtcccgcgagcacctggctagacagttaacaagcacatccttccatgttgagccagccagagaagatagcgagatctaaatctctgccaaaaaaaaaaaaaaacttaaaaattaaaaacacaaagagcaaagcagaacttataaaattatatatatatatattaaaaagtctctattcttcaccccccagccttcctgaacctgcctctctgaggataaagcaattcattttctcccaccctcggccctcttgtttttaaaataaacttttaaaaaggaaaaaaaaaagtcactcttgctatttcttttttttagttagaggtggaacattccttggaccaggtgttgtattgcaggaccccttcccccagcagccaagccccctcttctctccctcccgccctggctcagctcccgcggccccgcccgtcccccctcccaggactggtctgttgtcttttcatctgttcaagaggagattgaaactgaaaacaaaatgagaacaacaaaaaaaattgtatggcagtttttactttttatcgctcgtttttaacttcacaaataaatgataacaaaacctccccgtctgcgggtgctgtctgtctccccccctttccttccctccctgtagttttgaagcggatgtttgttctttatagatgttgtttaaaaagcctgataatggtgattgaaatttacaaactttgtgtttttttttttttaagaaaaatataaaatagttttcttcaggctcaatgtgctttcctaaccgtgccccccccccctttttttttttgttaaataaagtgctttttgtttaaaaaagac

SEQ ID NO: 330910 - DNA, 2961 bp, Homo sapiens
aaaatacggctaggtacgaggcctgggtgaaagccaagatgatgctggatgacattgtgtctcggggtcgtgggggccccccaggacagttccacgacaacgccaacgggggccagaacggcaccgtgcaggagatcatgatccccgcgggcaaggccggcctggtcattggcaagggcggggagaccattaagcagctgcaggaacgcgctggagtgaagatgatcttaattcaggacggatctcagaatacgaatgtggacaaacctctccgcatcattggggatccttacaaagtgcagcaagcctgtgagatggtgatggacatcctccgggaacgtgaccaaggcggctttggggaccggaatgagtacggatctcggattggcggaggcatcgatgtgccagtgcccaggcattctgttggcgtggtcattggccggagtggagagatgatcaagaagatccagaatgatgctggcgtgcggatacagttcaagcaagatgacgggacagggcccgagaagattgctcatataatggggcccccagacaggtgcgagcacgcagcccggatcatcaacgacctcctccagagcctcagggtaggtggccccgggtgctgaaggggctggcagggcctccaggggagtgcaagaccagaccggcttccagggttcatcatcctcctcctcctcttgtcttgcagagtggtcccccaggtcctccagggggtccaggcatgcccccggggggccgaggccgaggaagaggccaaggcaattggggtccccctggcggggagatgaccttctccatccccactcacaagtgtgggctggtcatcggccgaggtggcgagaatgtgaaagccataaaccagcagacgggagccttcgtagagatctcccggcagctgccacccaacggggaccccaacttcaagttgttcatcatccggggttcaccccagcagattgaccacgccaagcagcttatcgaggaaaagatcgagggtcctctctgcccagttggaccaggcccaggtggcccaggccctgctggcccaatggggcccttcaatcctgggcccttcaaccaggggccacccggggctcccccacatgccggggggccccctcctcaccagtacccaccccagggctggggcaatacctacccccagtggcagccgcctgctcctcatgacccaagcaaagcagctgcagcggccgcggaccccaacgccgcgtgggccgcctactactcacactactaccagcagcccccgggccccgtccccggccccgcaccggcccctgcggccccaccggctcagggtgagccccctcagcccccacccaccggccagtcggactacactaaggcctgggaagagtattacaaaaagatcggccagcagccccagcagcccggagcgcccccacagcaggactacacgaaggcttgggaggagtactacaagaagcaagcgcaagtggccaccggagggggtccaggagctcccccaggctcccagccagactacagtgccgcctgggcggaatattacagacagcaggccgcttactacggacagaccccaggtcctggcggcccccagccgccgcccacgcagcagggacagcagcaggcaagtgggaattgccaccctcctcctcctcctttctccttccaacccccggccaccgtccatcctgccttagtgggtagcgccggaaaccccttcccctgcggggtgtgcccttgatgcctgcagcgggggccgtgtggccggaggtctccgggagtccccacgcaccgccagggaagcattcgctgggtccagaggttaaacgaagaggcctccctgcgccggctgcttgttcctgtgtgccgctgtcgtgatgctggggagcgctgagactcgcaggcgggacttctgaactgctggggagtcggggggcaggcagacagcgcggacggtgggcaccggcccggccgccaccacctcgctcacaatctggccacttgggaagaaaacgtctattttttccccttctctgcatcacttttttggtttttgttctttttattcttttattttttaaacccatgatcttttttcctgtgtccaagtgactgtgttgcaggcggcccggctctggcagggactggtggggacgcggggagcggcccaggcccctgccccgccgggctcagcctcccatgcgctcgcgcttgcctgtgtcccgggcttgtctgtgaagtgggcgtgaagatcgttgccaccttccaacctacctcacaggggtgttgtggggacaccatgatctctggattgttcatgtcgtcgtgctgcgccgggagccaccgccctccggagacagggcagctcccctacgaccctagcgcctccgccctccgcggcccctctcctctcttcctgctctgtccctccttctccatcagggagcagcgtgacttcagcgagtcccgcgagcacctggctagacagttaacaagcacgtccttccagcctgagccagcgcaggtttgggagggggcttcctggccccccccacggtgttccagcccctcctctcttccgccccctagtctcccacccttccctccccgtagtgaccaattcctatctcttccctctcactctctcgcctgttctgtgtctcacatgctttttctttcaaaattgggatccttccatgttgagccagccagagaagatagcgagatctaaatctctgccaaaaaaaaaaaaaaacttaaaaattaaaaacacaaagagcaaagcagaacttataaaattatatatatatatattaaaaagtctctattcttcaccccccagccttcctgaacctgcctctctgaggataaagcaattcattttctcccaccctcggccctcttgtttttaaaataaacttttaaaaagga

SEQ ID NO: 330911 - DNA, 1612 bp, Homo sapiens
aaaatacggctaggtacgaggcctgggtgaaagccaagatgatgctggatgacattgtgtctcggggtcgtgggggccccccaggacagttccacgacaacgccaacgggggccagaacggcaccgtgcaggagatcatgatccccgcgggcaaggccggcctggtcattggcaagggcggggagaccattaagcagctgcaggaacgcgctggagtgaagatgatcttaattcaggacggatctcagaatacgaatgtggacaaacctctccgcatcattggggatccttacaaagtgcagcaagcctgtgagatggtgatggacatcctccgggaacgtgaccaaggcggctttggggaccggaatgagtacggatctcggattggcggaggcatcgatgtgccagtgcccaggcattctgttggcgtggtcattggccggagtggagagatgatcaagaagatccagaatgatgctggcgtgcggatacagttcaagcaagatgacgggacagggcccgagaagattgctcatataatggggcccccagacaggtgcgagcacgcagcccggatcatcaacgacctcctccagagcctcagggtaggtggccccgggtgctgaaggggctggcagggcctccaggggagtgcaagaccagaccggcttccagggttcatcatcctcctcctcctcttgtcttgcagagtggtcccccaggtcctccagggggtccaggcatgcccccggggggccgaggccgaggaagaggccaaggcaattggggtccccctggcggggagatgaccttctccatccccactcacaagtgtgggctggtcatcggccgaggtggcgagaatgtgaaagccataaaccagcagacgggagccttcgtagagatctcccggcagctgccacccaacggggaccccaacttcaagttgttcatcatccggggttcaccccagcagattgaccacgccaagcagcttatcgaggaaaagatcgagggtcctctctgcccagttggaccaggcccaggtggcccaggccctgctggcccaatggggcccttcaatcctgggcccttcaaccaggggccacccggggctcccccacatgccggggggccccctcctcaccagtacccaccccagggctggggcaatacctacccccagtggcagccgcctgctcctcatgacccaagcaaagcagctgcagcggccgcggaccccaacgccgcgtgggccgcctactactcacactactaccagcagcccccgggccccgtccccggccccgcaccggcccctgcggccccaccggctcagggtgagccccctcagcccccacccaccggccagtcggactacactaaggcctgggaagagtattacaaaaagatcgtctgccaaaaaaaaaaaaaaacttaaaaattaaaaacacaaagagcaaagcagaacttataaaattatatatatatatattaaaaagtctctattcttcaccccccagccttcctgaacctgcctctctgaggataaagcaattcattttctcccaccctcggccctcttgtttttaaaataaacttttaaaaagga

SEQ ID NO: 330912 - DNA, 971 bp, Homo sapiens
gggcggtaggcgggggcctggccctcccgctgcgcctcgagtgggatcccaacgggtgacccccctgcagggagtaggggcgcactgggggtcaccaggagcggcgcctgggtgtgcaggcgccccggagctcggagacgcacttttgggaccccccccttagccccccggccttaggacatgcctggaggcaggggtccaccttcccgggcggagggcctttactctcccctccatatcagggcaaagggcagtgtttgcccccaacccagtcccatttctgtcccctctctaggagaaagggacattgtgggggtgggagggacagtccttcctcttcagtcgggaaagtggatggggacctgtctagggctgagcacttgggcgaaatggggaagacgagcatggggactggctcttggatgctttggtggcttgaaagcgtggtctgtctctttgggggaaacgaagggagggtctcccacccccgtgtattgaggcgtaatgacaaggaagtgtcacatgctgctaggactgacctctccagctccatttgcagcctccccatggcctggaggggtgggggtcggtagaatgggaggactttgccgccgaccggctcctgggctgtcccaatgcctccggggctagagactggctcctcccaaggtgggaggtcccgttaagtgaacgcctgtgttctggccctctgtcgtctctctcacccttggagttgggtgggttctagcgtgcatttggtcttattgcccatggaaccgtctgattctgggacagcttgaagggaggaagctggtgctgtcagttggtggggacaggccccctgtgggcatcccatgagttttggctctagggcagcgtagaaaaatggagactggtggaaagggagattcttaacatggtttgggtttctaaaccccagactctgatcctaagtttgctgggttgaggtt

SEQ ID NO: 330913 - DNA, 3116 bp, Homo sapiens
ggactgtatcaagcttagtatagggcgacgtggagggttttaaccgcgggtgcgcgtactgatcaacttacagttgatcagcaatcgcgactccgatcgtcagacggatatcacgaactctcagagctcagagtggtcccccaggtcctccagggggtccaggcatgcccccggggggccgaggccgaggaagaggccaaggcaattggggtccccctggcggggagatgaccttctccatccccactcacaagtgtgggctggtcatcggccgaggtggcgagaatgtgaaagccataaaccagcagacgggagccttcgtagagatctcccggcagctgccacccaacggggaccccaacttcaagttgttcatcatccggggttcaccccagcagattgaccacgccaagcagcttatcgaggaaaagatcgagggtcctctctgcccagttggaccaggcccaggtggcccaggccctgctggcccaatggggcccttcaatcctgggcccttcaaccaggggccacccggggctcccccacatgccggggggccccctcctcaccagtacccaccccagggctggggcaatacctacccccagtggcagccgcctgctcctcatgacccaagcaaagcagctgcagcggccgcggaccccaacgccgcgtgggccgcctactactcacactactaccagcagcccccgggccccgtccccggccccgcaccggcccctgcggccccaccggctcagggtgagccccctcagcccccacccaccggccagtcggactacactaaggcctgggaagagtattacaaaaagatcggccagcagccccagcagcccggagcgcccccacagcaggactacacgaaggcttgggaggagtactacaagaagcaagcgcaagtggccaccggagggggtccaggagctcccccaggctcccagccagactacagtgccgcctgggcggaatattacagacagcaggccgcttactacggacagaccccaggtcctggcggcccccagccgccgcccacgcagcagggacagcagcaggcaagtgggaattgccaccctcctcctcctcctttctccttccaacccccggccaccgtccatcctgccttagtgggtagcgccggaaaccccttcccctgcggggtgtgcccttgatgcctgcagcgggggccgtgtggccggaggtctccgggagtccccacgcaccgccagggaagcattcgctgggtccagaggttaaacgaagaggcctccctgcgccggctgcttgttcctgtgtgccgctgtcgtgatgctggggagcgctgagactcgcaggcgggacttctgaactgctggggagtcggggggcaggcagacagcgcggacggtgggcaccggcccggccgccaccacctcgctcacaatctggccacttgggaagaaaacgtctattttttccccttctctgcatcacttttttggtttttgttctttttattcttttattttttaaacccatgatcttttttcctgtgtccaagtgactgtgttgcaggcggcccggctctggcagggactggtggggacgcggggagcggcccaggcccctgccccgccgggctcagcctcccatgcgctcgcgcttgcctgtgtcccgggcttgtctgtgaagtgggcgtgaagatcgttgccaccttccaacctacctcacaggggtgttgtggggacaccatgatctctggattgttcatgtcgtcgtgctgcgccgggagccaccgccctccggagacagggcagctcccctacgaccctagcgcctccgccctccgcggcccctctcctctcttcctgctctgtccctccttctccatcagggagcagcgtgacttcagcgagtcccgcgagcacctggctagacagttaacaagcacgtccttccagcctgagccagcgcaggtttgggagggggcttcctggccccccccacggtgttccagcccctcctctcttccgccccctagtctcccacccttccctccccgtagtgaccaattcctatctcttccctctccgcaggctcaatgaatcgaatgaatgtgaacttcttcatctgtgaaaaatcttttttttttccattttgttctgtttgggggcttctgttttgtttggcgagagagcgatggctgccgtggggagtactggggagccctcgcggcaagcagggtgggggggacttgggggcatgccgggccctcactctctcgcctgttctgtgtctcacatgctttttctttcaaaattgggatccttccatgttgagccagccagagaagatagcgagatctaaatctctgccaaaaaaaaaaaaaaacttaaaaattaaaaacacaaagagcaaagcagaacttataaaattatatatatatatattaaaaagtctctattcttcaccccccagccttcctgaacctgcctctctgaggataaagcaattcattttctcccaccctcggccctcttgtttttaaaataaacttttaaaaaggaaaaaaaaaagtcactcttgctatttcttttttttagttagaggtggaacattccttggaccaggtgttgtattgcaggaccccttcccccagcagccaagccccctcttctctccctcccgccctggctcagctcccgcggccccgcccgtcccccctcccaggactggtctgttgtcttttcatctgttcaagaggagattgaaactgaaaacaaaatgagaacaacaaaaaaaattgtatggcagtttttactttttatcgctcgtttttaacttcacaaataaatgataacaaaacctccccgtctgcgggtgctgtctgtctccccccctttccttccctccctgtagttttgaagcggatgtttgttctttatagatgttgtttaaaaagcctgataatggtgattgaaatttacaaactttgtgtttttttttttttaagaaaaatataaaatagttttcttcaggctcaatgtgctttcctaaccgtgccccccccccctttttttttttgttaaataaagtgctttttgtttaaaaaagac

SEQ ID NO: 330914 - DNA, 3671 bp, Homo sapiens
aaaatacggctaggtacgaggcctgggtgaaagccaagatgatgctggatgacattgtgtctcggggtcgtgggggccccccaggacagttccacgacaacgccaacgggggccagaacggcaccgtgcaggagatcatgatccccgcgggcaaggccggcctggtcattggcaagggcggggagaccattaagcagctgcaggaacgcgctggagtgaagatgatcttaattcaggacggatctcagaatacgaatgtggacaaacctctccgcatcattggggatccttacaaagtgcagcaagcctgtgagatggtgatggacatcctccgggaacgtgaccaaggcggctttggggaccggaatgagtacggatctcggattggcggaggcatcgatgtgccagtgcccaggcattctgttggcgtggtcattggccggagtggagagatgatcaagaagatccagaatgatgctggcgtgcggatacagttcaagcaagatgacgggacagggcccgagaagattgctcatataatggggcccccagacaggtgcgagcacgcagcccggatcatcaacgacctcctccagagcctcagggtaggtggccccgggtgctgaaggggctggcagggcctccaggggagtgcaagaccagaccggcttccagggttcatcatcctcctcctcctcttgtcttgcagagtggtcccccaggtcctccagggggtccaggcatgcccccggggggccgaggccgaggaagaggccaaggcaattggggtccccctggcggggagatgaccttctccatccccactcacaagtgtgggctggtcatcggccgaggtggcgagaatgtgaaagccataaaccagcagacgggagccttcgtagagatctcccggcagctgccacccaacggggaccccaacttcaagttgttcatcatccggggttcaccccagcagattgaccacgccaagcagcttatcgaggaaaagatcgagggtcctctctgcccagttggaccaggcccaggtggcccaggccctgctggcccaatggggcccttcaatcctgggcccttcaaccaggggccacccggggctcccccacatgccggggggccccctcctcaccagtacccaccccagggctggggcaatacctacccccagtggcagccgcctgctcctcatgacccaagcaaagcagctgcagcggccgcggaccccaacgccgcgtgggccgcctactactcacactactaccagcagcccccgggccccgtccccggccccgcaccggcccctgcggccccaccggctcagggtgagccccctcagcccccacccaccggccagtcggactacactaaggcctgggaagagtattacaaaaagatcggccagcagccccagcagcccggagcgcccccacagcaggactacacgaaggcttgggaggagtactacaagaagcaagcgcaagtggccaccggagggggtccaggagctcccccaggctcccagccagactacagtgccgcctgggcggaatattacagacagcaggccgcttactacggacagaccccaggtcctggcggcccccagccgccgcccacgcagcagggacagcagcaggcaagtgggaattgccaccctcctcctcctcctttctccttccaacccccggccaccgtccatcctgccttagtgggtagcgccggaaaccccttcccctgcggggtgtgcccttgatgcctgcagcgggggccgtgtggccggaggtctccgggagtccccacgcaccgccagggaagcattcgctgggtccagaggttaaacgaagaggcctccctgcgccggctgcttgttcctgtgtgccgctgtcgtgatgctggggagcgctgagactcgcaggcgggacttctgaactgctggggagtcggggggcaggcagacagcgcggacggtgggcaccggcccggccgccacttgggaagaaaacgtctattttttccccttctctgcatcacttttttggtttttgttctttttattcttttattttttaaacccatgatcttttttcctgtgtccaagtgactgtgttgcaggcggcccggctctggcagggactggtggggacgcggggagcggcccaggcccctgccccgccgggctcagcctcccatgcgctcgcgcttgcctgtgtcccgggcttgtctgtgaagtgggcgtgaagatcgttgccaccttccaacctacctcacaggggtgttgtggggacaccatgatctctggattgttcatgtcgtcgtgctgcgccgggagccaccgccctccggagacagggcagctcccctacgaccctagcgcctccgccctccgcggcccctctcctctcttcctgctctgtccctccttctccatcagggagcagcgtgacttcagcgagtcccgcgagcacctggctagacagttaacaagcacgtccttccagcctgagccagcgcaggtttgggagggggcttcctggccccccccacggtgttccagcccctcctctcttccgccccctagtctcccacccttccctccccgtagtgaccaattcctatctcttccctctccgcaggctcaatgaatcgaatgaatgtgaacttcttcatctgtgaaaaatcttttttttttccattttgttctgtttgggggcttctgttttgtttggcgagagagcgatggctgccgtggggagtactggggagccctcgcggcaagcagggtgggggggacttgggggcatgccgggccctcactctctcgcctgttctgtgtctcacatgctttttctttcaaaattgggatccttccatgttgagccagccagagaagatagcgagatctaaatctctgccaaaaaaaaaaaaaaacttaaaaattaaaaacacaaagagcaaagcagaacttataaaattatatatatatatattaaaaagtctctattcttcaccccccagccttcctgaacctgcctctctgaggataaagcaattcattttctcccaccctcggccctcttgtttttaaaataaacttttaaaaaggaaaaaaaaaagtcactcttgctatttcttttttttagttagaggtggaacattccttggaccaggtgttgtattgcaggaccccttcccccagcagccaagccccctcttctctccctcccgccctggctcagctcccgcggccccgcccgtcccccctcccaggactggtctgttgtcttttcatctgttcaagaggagattgaaactgaaaacaaaatgagaacaacaaaaaaaattgtatggcagtttttactttttatcgctcgtttttaacttcacaaataaatgataacaaaacctccccgtctgcgggtgctgtctgtctccccccctttccttccctccctgtagttttgaagcggatgtttgttctttatagatgttgtttaaaaagcctgataatggtgattgaaatttacaaactttgtgtttttttttttttaagaaaaatataaaatagttttcttcaggctcaatgtgctttcctaaccgtgccccccccccctttttttttttgttaaataaagtgctttttgtttaaaaaagac

SEQ ID NO: 330915 - DNA, 2846 bp, Homo sapiens
aaaatacggctaggtacgaggcctgggtgaaagccaagatgatgctggatgacattgtgtctcggggtcgtgggggccccccaggacagttccacgacaacgccaacgggggccagaacggcaccgtgcaggagatcatgatccccgcgggcaaggccggcctggtcattggcaagggcggggagaccattaagcagctgcaggaacgcgctggagtgaagatgatcttaattcaggacggatctcagaatacgaatgtggacaaacctctccgcatcattggggatccttacaaagtgcagcaagcctgtgagatggtgatggacatcctccgggaacgtgaccaaggcggctttggggaccggaatgagtacggatctcggattggcggaggcatcgatgtgccagtgcccaggcattctgttggcgtggtcattggccggagtggagagatgatcaagaagatccagaatgatgctggcgtgcggatacagttcaagcaagatgacgggacagggcccgagaagattgctcatataatggggcccccagacaggtgcgagcacgcagcccggatcatcaacgacctcctccagagcctcagggtaggtggccccgggtgctgaaggggctggcagggcctccaggggagtgcaagaccagaccggcttccagggttcatcatcctcctcctcctcttgtcttgcagagtggtcccccaggtcctccagggggtccaggcatgcccccggggggccgaggccgaggaagaggccaaggcaattggggtccccctggcggggagatgaccttctccatccccactcacaagtgtgggctggtcatcggccgaggtggcgagaatgtgaaagccataaaccagcagacgggagccttcgtagagatctcccggcagctgccacccaacggggaccccaacttcaagttgttcatcatccggggttcaccccagcagattgaccacgccaagcagcttatcgaggaaaagatcgagggtcctctctgcccagttggaccaggcccaggtggcccaggccctgctggcccaatggggcccttcaatcctgggcccttcaaccaggggccacccggggctcccccacatgccggggggccccctcctcaccagtacccaccccagggctggggcaatacctacccccagtggcagccgcctgctcctcatgacccaagcaaagcagctgcagcggccgcggaccccaacgccgcgtgggccgcctactactcacactactaccagcagcccccgggccccgtccccggccccgcaccggcccctgcggccccaccggctcagggtgagccccctcagcccctgccccgccgggctcagcctcccatgcgctcgcgcttgcctgtgtcccgggcttgtctgtgaagtgggcgtgaagatcgttgccaccttccaacctacctcacaggggtgttgtggggacaccatgatctctggattgttcatgtcgtcgtgctgcgccgggagccaccgccctccggagacagggcagctcccctacgaccctagcgcctccgccctccgcggcccctctcctctcttcctgctctgtccctccttctccatcagggagcagcgtgacttcagcgagtcccgcgagcacctggctagacagttaacaagcacgtccttccagcctgagccagcgcaggtttgggagggggcttcctggccccccccacggtgttccagcccctcctctcttccgccccctagtctcccacccttccctccccgtagtgaccaattcctatctcttccctctccgcaggctcaatgaatcgaatgaatgtgaacttcttcatctgtgaaaaatcttttttttttccattttgttctgtttgggggcttctgttttgtttggcgagagagcgatggctgccgtggggagtactggggagccctcgcggcaagcagggtgggggggacttgggggcatgccgggccctcactctctcgcctgttctgtgtctcacatgctttttctttcaaaattgggatccttccatgttgagccagccagagaagatagcgagatctaaatctctgccaaaaaaaaaaaaaaacttaaaaattaaaaacacaaagagcaaagcagaacttataaaattatatatatatatattaaaaagtctctattcttcaccccccagccttcctgaacctgcctctctgaggataaagcaattcattttctcccaccctcggccctcttgtttttaaaataaacttttaaaaaggaaaaaaaaaagtcactcttgctatttcttttttttagttagaggtggaacattccttggaccaggtgttgtattgcaggaccccttcccccagcagccaagccccctcttctctccctcccgccctggctcagctcccgcggccccgcccgtcccccctcccaggactggtctgttgtcttttcatctgttcaagaggagattgaaactgaaaacaaaatgagaacaacaaaaaaaattgtatggcagtttttactttttatcgctcgtttttaacttcacaaataaatgataacaaaacctccccgtctgcgggtgctgtctgtctccccccctttccttccctccctgtagttttgaagcggatgtttgttctttatagatgttgtttaaaaagcctgataatggtgattgaaatttacaaactttgtgtttttttttttttaagaaaaatataaaatagttttcttcaggctcaatgtgctttcctaaccgtgccccccccccctttttttttttgttaaataaagtgctttttgtttaaaaaagac

SEQ ID NO: 330916 - DNA, 3669 bp, Homo sapiens
aaaatacggctaggtacgaggcctgggtgaaagccaagatgatgctggatgacattgtgtctcggggtcgtgggggccccccaggacagttccacgacaacgccaacgggggccagaacggcaccgtgcaggagatcatgatccccgcgggcaaggccggcctggtcattggcaagggcggggagaccattaagcagctgcaggaacgcgctggagtgaagatgatcttaattcaggacggatctcagaatacgaatgtggacaaacctctccgcatcattggggatccttacaaagtgcagcaagcctgtgagatggtgatggacatcctccgggaacgtgaccaaggcggctttggggaccggaatgagtacggatctcggattggcggaggcatcgatgtgccagtgcccaggcattctgttggcgtggtcattggccggagtggagagatgatcaagaagatccagaatgatgctggcgtgcggatacagttcaagcaagatgacgggacagggcccgagaagattgctcatataatggggcccccagacaggtgcgagcacgcagcccggatcatcaacgacctcctccagagcctcagggtaggtggccccgggtgctgaaggggctggcagggcctccaggggagtgcaagaccagaccggcttccagggttcatcatcctcctcctcctcttgtcttgcagagtggtcccccaggtcctccagggggtccaggcatgcccccggggggccgaggccgaggaagaggccaaggcaattggggtccccctggcggggagatgaccttctccatccccactcacaagtgtgggctggtcatcggccgaggtggcgagaatgtgaaagccataaaccagcagacgggagccttcgtagagatctcccggcagctgccacccaacggggaccccaacttcaagttgttcatcatccggggttcaccccagcagattgaccacgccaagcagcttatcgaggaaaagatcgagggtcctctctgcccagttggaccaggcccaggtggcccaggccctgctggcccaatggggcccttcaatcctgggcccttcaaccaggggccacccggggctcccccacatgccggggggccccctcctcaccagtacccaccccagggctggggcaatacctacccccagtggcagccgcctgctcctcatgacccaagcaaagcagctgcagcggccgcggaccccaacgccgcgtgggccgcctactactcacactactaccagcagcccccgggccccgtccccggccccgcaccggcccctgcggccccaccggctcagggtgagccccctcagcccccacccaccggccagtcggactacactaaggcctgggaagagtattacaaaaagatcggccagcagccccagcagcccggagcgcccccacagcaggactacacgaaggcttgggaggagtactacaagaagcaagcgcaagtggccaccggagggggtccaggagctcccccaggctcccagccagactacagtgccgcctgggcggaatattacagacagcaggccgcttactacggacagaccccaggtcctggcggcccccagccgccgcccacgcagcagggacagcagcaggcaagtgggaattgccaccctcctcctcctcctttctccttccaacccccggccaccgtccatcctgccttagtgggtagcgccggaaaccccttcccctgcggggtgtgcccttgatgcctgcagcgggggccgtgtggccggaggtctccgggagtccccacgcaccgccagggaagcattcgctgggtccagaggttaaacgaagaggcctccctgcgccggctgcttgttcctgtgtgccgctgtcgtgatgctggggagcgctgagactcgcaggcgggacttctgaactgctggggagtcggggggcaggcagacagcgcggacggtgggcaccggcccggccgccaccacctcgctcacaatctggccacttgggaagaaaacgtctattttttccccttctctgcatcacttttttggtttttgttctttttattcttttattttttaaacccatgatcttttttcctgtgtccaagtgactgtgttgcaggcggcccggctctggcagggactggtggggacgcggggagcggcccaggcccctgccccgccgggctcagcctcccatgcgctcgcgcttgcctgtgtcccgggcttgtctgtgaagtgggcgtgaagatcgttgccaccttccaacctacctcacaggggtgttgtggggacaccatgatctctggattgttcatgtcgtcgtgctgcgccgggagccaccgccctccggagacagggcagctcccctacgaccctagcgcctccgccctccgcggcccctctcctctcttcctgctctgtccctcttcagcgagtcccgcgagcacctggctagacagttaacaagcacgtccttccagcctgagccagcgcaggtttgggagggggcttcctggccccccccacggtgttccagcccctcctctcttccgccccctagtctcccacccttccctccccgtagtgaccaattcctatctcttccctctccgcaggctcaatgaatcgaatgaatgtgaacttcttcatctgtgaaaaatcttttttttttccattttgttctgtttgggggcttctgttttgtttggcgagagagcgatggctgccgtggggagtactggggagccctcgcggcaagcagggtgggggggacttgggggcatgccgggccctcactctctcgcctgttctgtgtctcacatgctttttctttcaaaattgggatccttccatgttgagccagccagagaagatagcgagatctaaatctctgccaaaaaaaaaaaaaaacttaaaaattaaaaacacaaagagcaaagcagaacttataaaattatatatatatatattaaaaagtctctattcttcaccccccagccttcctgaacctgcctctctgaggataaagcaattcattttctcccaccctcggccctcttgtttttaaaataaacttttaaaaaggaaaaaaaaaagtcactcttgctatttcttttttttagttagaggtggaacattccttggaccaggtgttgtattgcaggaccccttcccccagcagccaagccccctcttctctccctcccgccctggctcagctcccgcggccccgcccgtcccccctcccaggactggtctgttgtcttttcatctgttcaagaggagattgaaactgaaaacaaaatgagaacaacaaaaaaaattgtatggcagtttttactttttatcgctcgtttttaacttcacaaataaatgataacaaaacctccccgtctgcgggtgctgtctgtctccccccctttccttccctccctgtagttttgaagcggatgtttgttctttatagatgttgtttaaaaagcctgataatggtgattgaaatttacaaactttgtgtttttttttttttaagaaaaatataaaatagttttcttcaggctcaatgtgctttcctaaccgtgccccccccccctttttttttttgttaaataaagtgctttttgtttaaaaaagac

SEQ ID NO: 330917 - DNA, 3614 bp, Homo sapiens
aaaatacggctaggtacgaggcctgggtgaaagccaagatgatgctggatgacattgtgtctcggggtcgtgggggccccccaggacagttccacgacaacgccaacgggggccagaacggcaccgtgcaggagatcatgatccccgcgggcaaggccggcctggtcattggcaagggcggggagaccattaagcagctgcaggaacgcgctggagtgaagatgatcttaattcaggacggatctcagaatacgaatgtggacaaacctctccgcatcattggggatccttacaaagtgcagcaagcctgtgagatggtgatggacatcctccgggaacgtgaccaaggcggctttggggaccggaatgagtacggatctcggattggcggaggcatcgatgtgccagtgcccaggcattctgttggcgtggtcattggccggagtggagagatgatcaagaagatccagaatgatgctggcgtgcggatacagttcaagcaagatgacgggacagggcccgagaagattgctcatataatggggcccccagacaggtgcgagcacgcagcccggatcatcaacgacctcctccagagcctcagggtaggtggccccgggtgctgaaggggctggcagggcctccaggggagtgcaagaccagaccggcttccagggttcatcatcctcctcctcctcttgtcttgcagagtggtcccccaggtcctccagggggtccaggcatgcccccggggggccgaggccgaggaagaggccaaggcaattggggtccccctggcggggagatgaccttctccatccccactcacaagtgtgggctggtcatcggccgaggtggcgagaatgtgaaagccataaaccagcagacgggagccttcgtagagatctcccggcagctgccacccaacggggaccccaacttcaagttgttcatcatccggggttcaccccagcagattgaccacgccaagcagcttatcgaggaaaagatcgagggtcctctctgcccagttggaccaggcccaggtggcccaggccctgctggcccaatggggcccttcaatcctgggcccttcaaccaggggccacccggggctcccccacatgccggggggccccctcctcaccagtacccaccccagggctggggcaatacctacccccagtggcagccgcctgctcctcatgacccaagcaaagcagctgcagcggccgcggaccccaacgccgcgtgggccgcctactactcacactactaccagcagcccccgggccccgtccccggccccgcaccggcccctgcggccccaccggctcagggtgagccccctcagcccccacccaccggccagtcggactacactaaggcctgggaagagtattacaaaaagatcggccagcagccccagcagcccggagcgcccccacagcaggactacacgaaggcttgggaggagtactacaagaagcaagcgcaagtggccaccggagggggtccaggagctcccccaggctcccagccagactacagtgccgcctgggcggaatattacagacagcaggccgcttactacggacagaccccaggtcctggcggcccccagccgccgcccacgcagcagggacagcagcaggcaagtgggaattgccaccctcctcctcctcctttctccttccaacccccggccaccgtccatcctgccttagtgggtagcgccggaaaccccttcccctgcggggtgtgcccttgatgcctgcagcgggggccgtgtggccggaggtctccgggagtccccacgcaccgccagggaagcattcgctgggtccagaggttaaacgaagaggcctccctgcgccggctgcttgttcctgtgtgccgctgtcgtgatgctggggagcgctgagactcgcaggcgggacttctgaactgctggggagtcggggggcaggcagacagcgcggacggtgggcaccggcccggccgccaccacctcgctcacaatctggccacttgggaagaaaacgtctattttttccccttctctgcatcacttttttggtttttgttctttttattcttttattttttaaacccatgatcttttttcctgtgtccaagtgactgtgttgcaggcggcccggctctggcagggactggtggggacgcggggagcggcccaggcccctgccccgccgggctcagcctcccatgcgctcgcgcttgcctgtgtcccgggcttgtctgtgaagtgggcgtgaagatcgttgccaccttccaacctacctcacaggggtgttgtggggacaccatgatctctggattgttcatgtcgtcgtgctgcgccgggagccaccgccctccggagacagggcagctcccctacgaccctagcgcctccgccctccgcggcccctctcctctcttcctgctctgtccctccttctccatcagggagcagcgtgacttcagcgagtcccgcgagcacctggctagacagttaacaagcacgtccttccagcctgagccagcgcaggtttgggagggggcttcctggccccccccacggtgttccagcccctcctctcttccgccccctagtctcccacccttccctccccgtagtgaccaattcctatctcttccctctccgcaggctcaatgaatcgaatgaatgtgaacttcttcatctgtgaaaaatcttttttttttccattttgttctgtttgggggcttgggggcatgccgggccctcactctctcgcctgttctgtgtctcacatgctttttctttcaaaattgggatccttccatgttgagccagccagagaagatagcgagatctaaatctctgccaaaaaaaaaaaaaaacttaaaaattaaaaacacaaagagcaaagcagaacttataaaattatatatatatatattaaaaagtctctattcttcaccccccagccttcctgaacctgcctctctgaggataaagcaattcattttctcccaccctcggccctcttgtttttaaaataaacttttaaaaaggaaaaaaaaaagtcactcttgctatttcttttttttagttagaggtggaacattccttggaccaggtgttgtattgcaggaccccttcccccagcagccaagccccctcttctctccctcccgccctggctcagctcccgcggccccgcccgtcccccctcccaggactggtctgttgtcttttcatctgttcaagaggagattgaaactgaaaacaaaatgagaacaacaaaaaaaattgtatggcagtttttactttttatcgctcgtttttaacttcacaaataaatgataacaaaacctccccgtctgcgggtgctgtctgtctccccccctttccttccctccctgtagttttgaagcggatgtttgttctttatagatgttgtttaaaaagcctgataatggtgattgaaatttacaaactttgtgtttttttttttttaagaaaaatataaaatagttttcttcaggctcaatgtgctttcctaaccgtgccccccccccctttttttttttgttaaataaagtgctttttgtttaaaaaagac

SEQ ID NO: 330918 - DNA, 3510 bp, Homo sapiens
aaaatacggctaggtacgaggcctgggtgaaagccaagatgatgctggatgacattgtgtctcggggtcgtgggggccccccaggacagttccacgacaacgccaacgggggccagaacggcaccgtgcaggagatcatgatccccgcgggcaaggccggcctggtcattggcaagggcggggagaccattaagcagctgcaggaacgcgctggagtgaagatgatcttaattcaggacggatctcagaatacgaatgtggacaaacctctccgcatcattggggatccttacaaagtgcagcaagcctgtgagatggtgatggacatcctccgggaacgtgaccaaggcggctttggggaccggaatgagtacggatctcggattggcggaggcatcgatgtgccagtgcccaggcattctgttggcgtggtcattggccggagtggagagatgatcaagaagatccagaatgatgctggcgtgcggatacagttcaagcaagatgacgggacagggcccgagaagattgctcatataatggggcccccagacaggtgcgagcacgcagcccggatcatcaacgacctcctccagagcctcagggtaggtggccccgggtgctgaaggggctggcagggcctccaggggagtgcaagaccagaccggcttccagggttcatcatcctcctcctcctcttgtcttgcagagtggtcccccaggtcctccagggggtccaggcatgcccccggggggccgaggccgaggaagaggccaaggcaattggggtccccctggcggggagatgaccttctccatccccactcacaagtgtgggctggtcatcggccgaggtggcgagaatgtgaaagccataaaccagcagacgggagccttcgtagagatctcccggcagctgccacccaacggggaccccaacttcaagttgttcatcatccggggttcaccccagcagattgaccacgccaagcagcttatcgaggaaaagatcgagggtcctctctgcccagttggaccaggcccaggtggcccaggccctgctggcccaatggggcccttcaatcctgggcccttcaaccaggggccacccggggctcccccacatgccggggggccccctcctcaccagtacccaccccagggctggggcaatacctacccccagtggcagccgcctgctcctcatgacccaagcaaagcagctgcagcggccgcggaccccaacgccgcgtgggccgcctactactcacactactaccagcagcccccgggccccgtccccggccccgcaccggcccctgcggccccaccggctcagggtgagccccctcagcccccacccaccggccagtcggactacactaaggcctgggaagagtattacaaaaagatcggccagcagccccagcagcccggagcgcccccacagcaggactacacgaaggcttgggaggagtactacaagaagcaagcgcaagtggccaccggagggggtccaggagctcccccaggctcccagccagactacagtgccgcctgggcggaatattacagacagcaggccgcttactacggacagaccccaggtcctggcggcccccagccgccgcccacgcagcagggacagcagcaggcaagtgggaattgccaccctcctcctcctcctttctccttccaacccccggccaccgtccatcctgccttagtgggtagcgccggaaaccccttcccctgcggggtgtgcccttgatgcctgcagcgggggccgtgtggccggaggtctccgggagtccccacgcaccgccagggaagcattcgctgggtccagaggttaaacgaagaggcctccctgcgccggctgcttgttcctgtgtgccgctgtcgtgatgctggggagcgctgagactcgcaggcgggacttctgaactgctggggagtcggggggcaggcagacagcgcggacggtgggcaccggcccggccgccaccacctcgctcacaatctggccacttgggaagaaaacgtctattttttccccttctctgcatcacttttttggtttttgttctttttattcttttattttttaaacccatgatcttttttcctgtgtccaagtgactgtgttgcaggcggcccggctctggcagggactggtggggacgcggggagcggcccaggcccctgccccgccgggctcagcctcccatgcgctcgcgcttgcctgtgtcccgggcttgtctgtgaagtgggcgtgaagatcgttgccaccttccaacctacctcacaggggtgttgtggggacaccatgatctctggattgttcatgtcgtcgtgctgcgccgggagccaccgccctccggagacagggcagctcccctacgaccctagcgcctccgccctccgcggcccctctcctctcttcctgctctgtccctccttctccatcagggagcagcgtgacttcagcgagtcccgcgagcacctggctagacagttaacaagcacgtccttccagcctgagccagcgcaggtttgggagggggcttcctggccccccccacggtgttccagcccctcctctcttccgccccctagtctcccacccttccctccccgtagtgaccaattcctatctcttccctctcactctctcgcctgttctgtgtctcacatgctttttctttcaaaattgggatccttccatgttgagccagccagagaagatagcgagatctaaatctctgccaaaaaaaaaaaaaaacttaaaaattaaaaacacaaagagcaaagcagaacttataaaattatatatatatatattaaaaagtctctattcttcaccccccagccttcctgaacctgcctctctgaggataaagcaattcattttctcccaccctcggccctcttgtttttaaaataaacttttaaaaaggaaaaaaaaaagtcactcttgctatttcttttttttagttagaggtggaacattccttggaccaggtgttgtattgcaggaccccttcccccagcagccaagccccctcttctctccctcccgccctggctcagctcccgcggccccgcccgtcccccctcccaggactggtctgttgtcttttcatctgttcaagaggagattgaaactgaaaacaaaatgagaacaacaaaaaaaattgtatggcagtttttactttttatcgctcgtttttaacttcacaaataaatgataacaaaacctccccgtctgcgggtgctgtctgtctccccccctttccttccctccctgtagttttgaagcggatgtttgttctttatagatgttgtttaaaaagcctgataatggtgattgaaatttacaaactttgtgtttttttttttttaagaaaaatataaaatagttttcttcaggctcaatgtgctttcctaaccgtgccccccccccctttttttttttgttaaataaagtgctttttgtttaaaaaagac

SEQ ID NO: 330919 - DNA, 2679 bp, Homo sapiens
aaaatacggctaggtacgaggcctgggtgaaagccaagatgatgctggatgacattgtgtctcggggtcgtgggggccccccaggacagttccacgacaacgccaacgggggccagaacggcaccgtgcaggagatcatgatccccgcgggcaaggccggcctggtcattggcaagggcggggagaccattaagcagctgcaggaacgcgctggagtgaagatgatcttaattcaggacggatctcagaatacgaatgtggacaaacctctccgcatcattggggatccttacaaagtgcagcaagcctgtgagatggtgatggacatcctccgggaacgtgaccaaggcggctttggggaccggaatgagtacggatctcggattggcggaggcatcgatgtgccagtgcccaggcattctgttggcgtggtcattggccggagtggagagatgatcaagaagatccagaatgatgctggcgtgcggatacagttcaagcaagatgacgggacagggcccgagaagattgctcatataatggggcccccagacaggtgcgagcacgcagcccggatcatcaacgacctcctccagagcctcagggtaggtggccccgggtgctgaaggggctggcagggcctccaggggagtgcaagaccagaccggcttccagggttcatcatcctcctcctcctcttgtcttgcagagtggtcccccaggtcctccagggggtccaggcatgcccccggggggccgaggccgaggaagaggccaaggcaattggggtccccctggcggggagatgaccttctccatccccactcacaagtgtgggctggtcatcggccgaggtggcgagaatgtgaaagccataaaccagcagacgggagccttcgtagagatctcccggcagctgccacccaacggggaccccaacttcaagttgttcatcatccggggttcaccccagcagattgaccacgccaagcagcttatcgaggaaaagatcgagggtcctctctgcccagttggaccaggcccaggtggcccaggccctgctggcccaatggggcccttcaatcctgggcccttcaaccaggggccacccggggctcccccacatgccggggggccccctcctcaccagtacccaccccagggctggggcaatacctacccccagtggcagccgcctgctcctcatgacccaagcaaagcagctgcagcggccgcggaccccaacgccgcgtgggccgcctactactcacactactaccagcagcccccgggccccgtccccggccccgcaccggcccctgcggccccaccggctcagggtgagccccctcagcccccacccaccggccagtcggactacactaaggcctgggaagagtattacaaaaagatcggccagcagccccagcagcccggagcgcccccacagcaggactacacgaaggcttgggaggagtactacaagaagcaagcgcaagtggccaccggagggggtccaggagctcccccaggctcccagccagactacagtgccgcctgggcggaatattacagacagcaggccgcttactacggacagaccccaggtcctggcggcccccagccgccgcccacgcagcagggacagcagcagcgcaggctcaatgaatcgaatgaatgtgaacttcttcatctgtgaaaaatcttttttttttccattttgttctgtttgggggcttctgttttgtttggcgagagagcgatggctgccgtggggagtactggggagccctcgcggcaagcagggtgggggggacttgggggcatgccgggccctcactctctcgcctgttctgtgtctcacatgctttttctttcaaaattgggatccttccatgttgagccagccagagaagatagcgagatctaaatctctgccaaaaaaaaaaaaaaacttaaaaattaaaaacacaaagagcaaagcagaacttataaaattatatatatatatattaaaaagtctctattcttcaccccccagccttcctgaacctgcctctctgaggataaagcaattcattttctcccaccctcggccctcttgtttttaaaataaacttttaaaaaggaaaaaaaaaagtcactcttgctatttcttttttttagttagaggtggaacattccttggaccaggtgttgtattgcaggaccccttcccccagcagccaagccccctcttctctccctcccgccctggctcagctcccgcggccccgcccgtcccccctcccaggactggtctgttgtcttttcatctgttcaagaggagattgaaactgaaaacaaaatgagaacaacaaaaaaaattgtatggcagtttttactttttatcgctcgtttttaacttcacaaataaatgataacaaaacctccccgtctgcgggtgctgtctgtctccccccctttccttccctccctgtagttttgaagcggatgtttgttctttatagatgttgtttaaaaagcctgataatggtgattgaaatttacaaactttgtgtttttttttttttaagaaaaatataaaatagttttcttcaggctcaatgtgctttcctaaccgtgccccccccccctttttttttttgttaaataaagtgctttttgtttaaaaaagac

SEQ ID NO: 330920 - DNA, 2562 bp, Homo sapiens
aaaatacggctaggtacgaggcctgggtgaaagccaagatgatgctggatgacattgtgtctcggggtcgtgggggccccccaggacagttccacgacaacgccaacgggggccagaacggcaccgtgcaggagatcatgatccccgcgggcaaggccggcctggtcattggcaagggcggggagaccattaagcagctgcaggaacgcgctggagtgaagatgatcttaattcaggacggatctcagaatacgaatgtggacaaacctctccgcatcattggggatccttacaaagtgcagcaagcctgtgagatggtgatggacatcctccgggaacgtgaccaaggcggctttggggaccggaatgagtacggatctcggattggcggaggcatcgatgtgccagtgcccaggcattctgttggcgtggtcattggccggagtggagagatgatcaagaagatccagaatgatgctggcgtgcggatacagttcaagcaagatgacgggacagggcccgagaagattgctcatataatggggcccccagacaggtgcgagcacgcagcccggatcatcaacgacctcctccagagcctcagggtaggtggccccgggtgctgaaggggctggcagggcctccaggggagtgcaagaccagaccggcttccagggttcatcatcctcctcctcctcttgtcttgcagagtggtcccccaggtcctccagggggtccaggcatgcccccggggggccgaggccgaggaagaggccaaggcaattggggtccccctggcggggagatgaccttctccatccccactcacaagtgtgggctggtcatcggccgaggtggcgagaatgtgaaagccataaaccagcagacgggagccttcgtagagatctcccggcagctgccacccaacggggaccccaacttcaagttgttcatcatccggggttcaccccagcagattgaccacgccaagcagcttatcgaggaaaagatcgagggtcctctctgcccagttggaccaggcccaggtggcccaggccctgctggcccaatggggcccttcaatcctgggcccttcaaccaggggccacccggggctcccccacatgccggggggccccctcctcaccagtacccaccccagggctggggcaatacctacccccagtggcagccgcctgctcctcatgacccaagcaaagcagctgcagcggccgcggaccccaacgccgcgtgggccgcctactactcacactactaccagcagcccccgggccccgtccccggccccgcaccggcccctgcggccccaccggctcagggtgagccccctcagcccccacccaccggccagtcggactacactaaggcctgggaagagtattacaaaaagatcggctcccagccagactacagtgccgcctgggcggaatattacagacagcaggccgcttactacggacagaccccaggtcctggcggcccccagccgccgcccacgcagcagggacagcagcagcgcaggctcaatgaatcgaatgaatgtgaacttcttcatctgtgaaaaatcttttttttttccattttgttctgtttgggggcttctgttttgtttggcgagagagcgatggctgccgtggggagtactggggagccctcgcggcaagcagggtgggggggacttgggggcatgccgggccctcactctctcgcctgttctgtgtctcacatgctttttctttcaaaattgggatccttccatgttgagccagccagagaagatagcgagatctaaatctctgccaaaaaaaaaaaaaaacttaaaaattaaaaacacaaagagcaaagcagaacttataaaattatatatatatatattaaaaagtctctattcttcaccccccagccttcctgaacctgcctctctgaggataaagcaattcattttctcccaccctcggccctcttgtttttaaaataaacttttaaaaaggaaaaaaaaaagtcactcttgctatttcttttttttagttagaggtggaacattccttggaccaggtgttgtattgcaggaccccttcccccagcagccaagccccctcttctctccctcccgccctggctcagctcccgcggccccgcccgtcccccctcccaggactggtctgttgtcttttcatctgttcaagaggagattgaaactgaaaacaaaatgagaacaacaaaaaaaattgtatggcagtttttactttttatcgctcgtttttaacttcacaaataaatgataacaaaacctccccgtctgcgggtgctgtctgtctccccccctttccttccctccctgtagttttgaagcggatgtttgttctttatagatgttgtttaaaaagcctgataatggtgattgaaatttacaaactttgtgtttttttttttttaagaaaaatataaaatagttttcttcaggctcaatgtgctttcctaaccgtgccccccccccctttttttttttgttaaataaagtgctttttgtttaaaaaagac

SEQ ID NO: 330921 - DNA, 2973 bp, Homo sapiens
aaaatacggctaggtacgaggcctgggtgaaagccaagatgatgctggatgacattgtgtctcggggtcgtgggggccccccaggacagttccacgacaacgccaacgggggccagaacggcaccgtgcaggagatcatgatccccgcgggcaaggccggcctggtcattggcaagggcggggagaccattaagcagctgcaggaacgcgctggagtgaagatgatcttaattcaggacggatctcagaatacgaatgtggacaaacctctccgcatcattggggatccttacaaagtgcagcaagcctgtgagatggtgatggacatcctccgggaacgtgaccaaggcggctttggggaccggaatgagtacggatctcggattggcggaggcatcgatgtgccagtgcccaggcattctgttggcgtggtcattggccggagtggagagatgatcaagaagatccagaatgatgctggcgtgcggatacagttcaagcaagatgacgggacagggcccgagaagattgctcatataatggggcccccagacaggtgcgagcacgcagcccggatcatcaacgacctcctccagagcctcagggtaggtggccccgggtgctgaaggggctggcagggcctccaggggagtgcaagaccagaccggcttccagggttcatcatcctcctcctcctcttgtcttgcagagtggtcccccaggtcctccagggggtccaggcatgcccccggggggccgaggccgaggaagaggccaaggcaattggggtccccctggcggggagatgaccttctccatccccactcacaagtgtgggctggtcatcggccgaggtggcgagaatgtgaaagccataaaccagcagacgggagccttcgtagagatctcccggcagctgccacccaacggggaccccaacttcaagttgttcatcatccggggttcaccccagcagattgaccacgccaagcagcttatcgaggaaaagatcgagggtcctctctgcccagttggaccaggcccaggtggcccaggccctgctggcccaatggggcccttcaatcctgggcccttcaaccaggggccacccggggctcccccacatgccggggggccccctcctcaccagtacccaccccagggctggggcaatacctacccccagtggcagccgcctgctcctcatgacccaagcaaagcagctgcagcggccgcggaccccaacgccgcgtgggccgcctactactcacactactaccagcagcccccgggccccgtccccggccccgcaccggcccctgcggccccaccggctcagggtgagccccctcagcccccacccaccggccagtcggactacactaaggcctgggaagagtattacaaaaagatcggccagcagccccagcagcccggagcgcccccacagcaggactacacgaaggcttgggaggagtactacaagaagcaagcgcaagtggccaccggagggggtccaggagctcccccaggctcccagccagactacagtgccgcctgggcggaatattacagacagcaggccgcttactacggacagaccccaggtcctggcggcccccagccgccgcccacgcagcagggacagcagcaggcaagtgggaattgccaccctcctcctcctcctttctccttccaacccccggccaccgtccatcctgccttagtgggtagcgccggaaaccccttcccctgcggggtgtgcccttgatgcctgcagcgggggccgtgtggccggaggtctccgggagtccccacgcaccgccagggaagcattcgctgggtccagaggttaaacgaagaggcctccctgcgccggctgcttgttcctgtgtgccgctgtcgtgatgctggggagcgctgagactcgcaggcgggacttctgaactgctggggagtcggggggcaggcagacagcgcggacggtgggcaccggcccggccgccaccacctcgctcacaatctggccacttgggaagaaaacgtctattttttccccttctctgcatcacttttttggtttttgttctttttattcttttattttttaaacccatgatcttttttcctgtgtccaagtgactgtgttgcaggcggcccggctctggcagggactggtggggacgcggggagcggcccaggcccctgccccgccgggctcagcctcccatgcgctcgcgcttgcctgtgtcccgggcttgtctgtgaagtgggcgtgaagatcgttgccaccttccaacctacctcacaggggtgttgtggggacaccatgatctctggattgttcatgtcgtcgtgctgcgccgggagccaccgccctccggagacagggcagctcccctacgaccctagcgcctccgccctccgcggcccctctcctctcttcctgctctgtccctccttctccatcagggagcagcgtgacttcagcgagtcccgcgagcacctggctagacagttaacaagcacgtccttccagcctgagccagcgcaggtttgggagggggcttcctggccccccccacggtgttccagcccctcctctcttccgccccctagtctcccacccttccctccccgtagtgaccaattcctatctcttccctctccgcaggctcaatgaatcgaatgaatgtgaacttcttcatctgtgaaaaatcttttttttttccattttgttctgtttgggggcttctgttttgtttggcgagagagcgatggctgccgtggggagtactggggagccctcgcggcaagcagggtgggggggacttgggggcatgccgggccctcactctctcgcctgttctgtgtctcacatgctttttctttcaaaattgggatccttccatgttgagccagccagagaagatagcgagatctaaatcgctggctcaacatggaaggatccca

SEQ ID NO: 330922 - DNA, 2626 bp, Homo sapiens
  misc_feature (2591)..(2591): n is a, c, g, or t
aaaatacggctaggtacgaggcctgggtgaaagccaagatgatgctggatgacattgtgtctcggggtcgtgggggccccccaggacagttccacgacaacgccaacgggggccagaacggcaccgtgcaggagatcatgatccccgcgggcaaggccggcctggtcattggcaagggcggggagaccattaagcagctgcaggaacgcgctggagtgaagatgatcttaattcaggacggatctcagaatacgaatgtggacaaacctctccgcatcattggggatccttacaaagtgcagcaagcctgtgagatggtgatggacatcctccgggaacgtgaccaaggcggctttggggaccggaatgagtacggatctcggattggcggaggcatcgatgtgccagtgcccaggcattctgttggcgtggtcattggccggagtggagagatgatcaagaagatccagaatgatgctggcgtgcggatacagttcaagcaagatgacgggacagggcccgagaagattgctcatataatggggcccccagacaggtgcgagcacgcagcccggatcatcaacgacctcctccagagcctcagggtaggtggccccgggtgctgaaggggctggcagggcctccaggggagtgcaagaccagaccggcttccagggttcatcatcctcctcctcctcttgtcttgcagagtggtcccccaggtcctccagggggtccaggcatgcccccggggggccgaggccgaggaagaggccaaggcaattggggtccccctggcggggagatgaccttctccatccccactcacaagtgtgggctggtcatcggccgaggtggcgagaatgtgaaagccataaaccagcagacgggagccttcgtagagatctcccggcagctgccacccaacggggaccccaacttcaagttgttcatcatccggggttcaccccagcagattgaccacgccaagcagcttatcgaggaaaagatcgagggtcctctctgcccagttggaccaggcccaggtggcccaggccctgctggcccaatggggcccttcaatcctgggcccttcaaccaggggccacccggggctcccccacatgccggggggccccctcctcaccagtacccaccccagggctggggcaatacctacccccagtggcagccgcctgctcctcatgacccaagcaaagcagctgcagcggccgcggaccccaacgccgcgtgggccgcctactactcacactactaccagcagcccccgggccccgtccccggccccgcaccggcccctgcggccccaccggctcagggtgagccccctcagcccccacccaccggccagtcggactacactaaggcctgggaagagtattacaaaaagatcggccagcagccccagcagcccggagcgcccccacagcaggactacacgaaggcttgggaggagtactacaagaagcaagcgcaagtggccaccggagggggtccaggagctcccccaggctcccagccagactacagtgccgcctgggcggaatattacagacagcaggccgcttactacggacagaccccaggtcctggcggcccccagccgccgcccacgcagcagggacagcagcaggcaagtgggaattgccaccctcctcctcctcctttctccttccaacccccggccaccgtccatcctgccttagtgggtagcgccggaaaccccttcccctgcggggtgtgcccttgatgcctgcagcgggggccgtgtggccggaggtctccgggagtccccacgcaccgccagggaagcattcgctgggtccagaggttaaacgaagaggcctccctgcgccggctgcttgttcctgtgtgccgctgtcgtgatgctggggagcgctgagactcgcaggcgggacttctgaactgctggggagtcggggggcaggcagacagcgcggacggtgggcaccggcccggccgccaccacctcgctcacaatctggccacttgggaagaaaacgtctattttttccccttctctgcatcacttttttggtttttgttctttttattcttttattttttaaacccatgatcttttttcctgtgtccaagtgactgtgttgcaggcggcccggctctggcagggactggtggggacgcggggagcggcccaggcccctgccccgccgggctcagcctcccatgcgctcgcgcttgcctgtgtcccgggcttgtctgtgaagtgggcgtgaagatcgttgccaccttccaacctacctcacaggggtgttgtggggacaccatgatctctggattgttcatgtcgtcgtgctgcgccgggagccaccgccctccggagacagggcagctcccctacgaccctagcgcctccgccctccgcggcccctctcctctcttcctgctctgtccctccttctccatcagggagcagcgtgacttcagcgagtcccgcgagcacctggctagacagttaacaagcacgtccttccagcctgagccagcgcaggtttgggagggggcttcctggccccccccacggtgtnagagagagcgtcgggatcctctaagtcacctcaga

SEQ ID NO: 330923 - DNA, 1634 bp, Homo sapiens
aaaatacggctaggtacgaggcctgggtgaaagccaagatgatgctggatgacattgtgtctcggggtcgtgggggccccccaggacagttccacgacaacgccaacgggggccagaacggcaccgtgcaggagatcatgatccccgcgggcaaggccggcctggtcattggcaagggcggggagaccattaagcagctgcaggaacgcgctggagtgaagatgatcttaattcaggacggatctcagaatacgaatgtggacaaacctctccgcatcattggggatccttacaaagtgcagcaagcctgtgagatggtgatggacatcctccgggaacgtgaccaaggcggctttggggaccggaatgagtacggatctcggattggcggaggcatcgatgtgccagtgcccaggcattctgttggcgtggtcattggccggagtggagagatgatcaagaagatccagaatgatgctggcgtgcggatacagttcaagcaagatgacgggacagggcccgagaagattgctcatataatggggcccccagacaggtgcgagcacgcagcccggatcatcaacgacctcctccagagcctcagggtaggtggccccgggtgctgaaggggctggcagggcctccaggggagtgcaagaccagaccggcttccagggttcatcatcctcctcctcctcttgtcttgcagagtggtcccccaggtcctccagggggtccaggcatgcccccggggggccgaggccgaggaagaggccaaggcaattggggtccccctggcggggagatgaccttctccatccccactcacaagtgtgggctggtcatcggccgaggtggcgagaatgtgaaagccataaaccagcagacgggagccttcgtagagatctcccggcagctgccacccaacggggaccccaacttcaagttgttcatcatccggggttcaccccagcagattgaccacgccaagcagcttatcgaggaaaagatcgagggtcctctctgcccagttggaccaggcccaggtggcccaggccctgctggcccaatggggcccttcaatcctgggcccttcaaccaggggccacccggggctcccccacatgccggggggccccctcctcaccagtacccaccccagggctggggcaatacctacccccagtggcagccgcctgctcctcatgacccaagcaaagcagctgcagcggccgcggaccccaacgccgcgtgggccgcctactactcacactactaccagcagcccccgggccccgtccccggccccgcaccggcccctgcggccccaccggctcagggtgagccccctcagcccccacccaccggccagtcggactacactaaggcctgggaagagtattacaaaaagatcgcccttcccccagcagccaagccccctcttctctccctcccgccctggctcagctcccgcggccccgcccgtcccccctcccaggactggtctgttgtcttttcatctgttcaagaggagattgaaactgaaaacaaaatgagaacaacaaaaaaaattgtatggcagtttttactttttatcgctcgtttttaacttcacaaataaatgataacaaaac

SEQ ID NO: 330924 - DNA, 172 bp, Homo sapiens
cgttctttcttgcaaggggcatagatgtctgtctcccttaggagggaggactgctaaggcagggaggaggctattgcctcctggtgggagagggaggttcccagccactggtctgcagattcatcttaaacaagtcttgcccatggcattcaacttcctgctctaaccccca

SEQ ID NO: 330925 - DNA, 1052 bp, Homo sapiens
ccgcccgagttgccgcccacctgcccgcctttcgccccgcaggcggtgcgtgctgggcgcgctgcaggtgctgctgacgctgccgctcctcttcctggggctgtcgctgctctggacggtgctgttggaccccggcgccgtctccgcgtggctctggagcctcacctcggagacgacgctgcgccgcctgcgctacacgctgtccccgctgctggagctgcgcgctaacgggcttctgccaacctaagtgcagcgccccgcgcctggctccaggtggactccagggcacctggctttatttctggtgcactcctctcctgagagtgtagaccaaggttgcctaataaactcaagggatgaagctcgtgggttcgtcgtctgtctcccatgtcatgtaggagcttgactggcttttcagcctccaaagattccttccttccttacagctcatggatttagagccactccccagtattgtaaacagcatttttagtttttcaggatacataatttgccgtattgccagaaacttgtacatagcatttgacactttgccaatctgacaagctgccttttcaagtattgtgatttgaaattatttctactatatttgaatttatttctaccatttgtaacatgttgatcctgatttttcaatgctcccctttccttctgtttatttgggaagtcacactctgtattctggtattcttactacttgagctcagctcatcgctgtcatcttcccctaaaccgccttaaagcatcttaggtcttttccctctgatcacatgtgctacttttttttttcttttctttggagacggagtcttgctctgcgcccaggatggagtgcagtggcatgatctcggctcactgcaagctctgcctcccgggttccagcgattctcctgcctcagcctcccaagtagctgggacttcagacgcccgccatcatgcccgtttaattttttgtattttttgtagagacagagtttcactgtgttagccaggatggtctcgatctcctgacctcgtgatccgcccacctt

SEQ ID NO: 330926 - DNA, 2060 bp, Homo sapiens
cgcccattgtgacgcctgccagccgcaggctgggtccccgaggcgggcggcatttaggctcggtctccacagccatggccgcgacgcaggagctgctgctgcagttgcagaaggataaccgagatggtcgccagcggaagcaggagctagagaagctgatgcgcgggctcgaggccgagagcgagagcctcaaccagcgcctgcaggacctgagcgagcgggagcggagcctgctgcggaggcgaagccaggcagcgcagcctctgcaaggggaggcgcgcgaggcggcgcgggagcgcgcggagcgggtgcgcagaagactggaggaggcggagcgccacaaggaggacttggtgaggaagagtcctggaatggggctggacccagggtggggtggggcagggcgggcggaaggggggccggggtggggtgagtaggaccggcggagaggtcggcaccgccccaggaccccgtccgcaggagcagcacagcaggcagctgcaggagcagtgggaggagctgtcgagtcaggtacgtgcaggagatgggagggcctgtctcttggttcctctcggaagtcctgcccttgtcctcgcccttgttgcctccccgtccctgtctcccctgacacccgttcctccagaagcccggtaaaccccgcccttacaagccccgcccctagctcttctactacggaggggaactgcagagccagaagagcacggagcagcaactcgcagcccaattggtgacgctgcagaatgaactggagctggcggagaccaaatgcgccttgcaggaggagaagctgcagcaggacgcgctgcagacagcggaggcctgggccatattccaggagcagaccgtagtcctgcaggtgcggccccactcagacgccaaggtgcctcccgcctctcctcccccagacctggggcggtgtgacgggcagcttcgcggagtgcagtacagcaccgagtcgctcatggaggagatggccagggcggaccgagagacgcggctgttcggcggccctcgcgcgctggccatcaggcggtgcgtgctgggcgcgctgcaggtgctgctgacgctgccgctcctcttcctggggctgtcgctgctctggacggtgctgttggaccccggcgccgtctccgcgtggctctggagcctcacctcggagacgacgctgcgccgcctgcgctacacgctgtccccgctgctggagctgcgcgctaacgggcttctgccaacctaagtgcagcgccccgcgcctggctccaggtggactccagggcacctggctttatttctggtgcactcctctcctgagagtgtagaccaaggttgcctaataaactcaagggatgaagctcgtgggttcgtcgtctgtctcccatgtcatgtaggagcttgactggcttttcagcctccaaagattccttccttccttacagctcatggatttagagccactccccagtattgtaaacagcatttttagtttttcaggatacataatttgccgtattgccagaaacttgtacatagcatttgacactttgccaatctgacaagctgccttttcaagtattgtgatttgaaattatttctactatatttgaatttatttctaccatttgtaacatgttgatcctgatttttcaatgctcccctttccttctgtttatttgggaagtcacactctgtattctggtattcttactacttgagctcagctcatcgctgtcatcttcccctaaaccgccttaaagcatcttaggtcttttccctctgatcacatgtgctacttttttttttcttttctttggagacggagtcttgctctgcgcccaggatggagtgcagtggcatgatctcggctcactgcaagctctgcctcccgggttccagcgattctcctgcctcagcctcccaagtagctgggacttcagacgcccgccatcatgcccgtttaattttttgtattttttgtagagacagagtttcactgtgttagccaggatggtctcgatctcctgacctcgtgatccgcccacctt

SEQ ID NO: 330927 - DNA, 2267 bp, Homo sapiens
cgcccattgtgacgcctgccagccgcaggctgggtccccgaggcgggcggcatttaggctcggtctccacagccatggccgcgacgcaggagctgctgctgcagttgcagaaggataaccgagatggtcgccagcggaagcaggagctagagaagctgatgcgcgggctcgaggccgagagcgagagcctcaaccagcgcctgcaggacctgagcgagcgggagcggagcctgctgcggaggcgaagccaggcagcgcagcctctgcaaggggaggcgcgcgaggcggcgcgggagcgcgcggagcgggtgcgcagaagactggaggaggcggagcgccacaaggaggacttggtgaggaagagtcctggaatggggctggacccagggtggggtggggcagggcgggcggaaggggggccggggtggggtgagtaggaccggcggagaggtcggcaccgccccaggaccccgtccgcaggagcagcacagcaggcagctgcaggagcagtgggaggagctgtcgagtcagctcttctactacggaggggaactgcagagccagaagagcacggagcagcaactcgcagcccaattggtgacgctgcagaatgaactggagctggcggagaccaaatgcgccttgcaggaggagaagctgcagcaggacgcgctgcagacagcggaggcctgggccatattccaggagcagaccgtagtcctgcaggtgcggccccactcagacgccaaggtgcctcccgcctctcctcccccagacctggggcggtaagtctcccaacccaccgccaggacgcctccccgaggcctcagtccgcactctcacccgctccaggaggtgcaggtgaaggtgatggaggctgcggaggagctggacgcctggcagagtggccgggaactgtaagggagttgggcctgcgggcgcggcggggcactgtggggccgggatgggctcccacctgcatgcctgtccccgcaggtgtgacgggcagcttcgcggagtgcagtacagcaccgagtcgctcatggaggagatggccagggcggaccgagtgagcgcctgcgcgggtccgggcggggtgggctggagcgggacaaccctccccgtcccccccgcggtaccgcctccccctcctcctggaaaccgggccggcgccgcgggcgcggaggtagctggatgcggccctctctccccgcaggagacgcggctgttcggcggccctcgcgcgctggccatcaggcggtgcgtgctgggcgcgctgcaggtgctgctgacgctgccgctcctcttcctggggctgtcgctgctctggacggtgctgttggaccccggcgccgtctccgcgtggctctggagcctcacctcggagacgacgctgcgccgcctgcgctacacgctgtccccgctgctggagctgcgcgctaacgggcttctgccaacctaagtgcagcgccccgcgcctggctccaggtggactccagggcacctggctttatttctggtgcactcctctcctgagagtgtagaccaaggttgcctaataaactcaagggatgaagctcgtgggttcgtcgtctgtctcccatgtcatgtaggagcttgactggcttttcagcctccaaagattccttccttccttacagctcatggatttagagccactccccagtattgtaaacagcatttttagtttttcaggatacataatttgccgtattgccagaaacttgtacatagcatttgacactttgccaatctgacaagctgccttttcaagtattgtgatttgaaattatttctactatatttgaatttatttctaccatttgtaacatgttgatcctgatttttcaatgctcccctttccttctgtttatttgggaagtcacactctgtattctggtattcttactacttgagctcagctcatcgctgtcatcttcccctaaaccgccttaaagcatcttaggtcttttccctctgatcacatgtgctacttttttttttcttttctttggagacggagtcttgctctgcgcccaggatggagtgcagtggcatgatctcggctcactgcaagctctgcctcccgggttccagcgattctcctgcctcagcctcccaagtagctgggacttcagacgcccgccatcatgcccgtttaattttttgtattttttgtagagacagagtttcactgtgttagccaggatggtctcgatctcctgacctcgtgatccgcccacctt

SEQ ID NO: 330928 - DNA, 2056 bp, Homo sapiens
cgcccattgtgacgcctgccagccgcaggctgggtccccgaggcgggcggcatttaggctcggtctccacagccatggccgcgacgcaggagctgctgctgcagttgcagaaggataaccgagatggtcgccagcggaagcaggagctagagaagctgatgcgcgggctcgaggccgagagcgagagcctcaaccagcgcctgcaggacctgagcgagcgggagcggagcctgctgcggaggcgaagccaggcagcgcagcctctgcaaggggaggcgcgcgaggcggcgcgggagcgcgcggagcgggtgcgcagaagactggaggaggcggagcgccacaaggaggacttggtgaggaagagtcctggaatggggctggacccagggtggggtggggcagggcgggcggaaggggggccggggtggggtgagtaggaccggcggagaggtcggcaccgccccaggaccccgtccgcaggagcagcacagcaggcagctgcaggagcagtgggaggagctgtcgagtcagctcttctactacggaggggaactgcagagccagaagagcacggagcagcaactcgcagcccaattggtgacgctgcagaatgaactggagctggcggagaccaaatgcgccttgcaggaggagaagctgcagcaggacgcgctgcagacagcggaggcctgggccatattccaggagcagaccgtagtcctgcaggtgcggccccactcagacgccaaggtgcctcccgcctctcctcccccagacctggggcggtgtgacgggcagcttcgcggagtgcagtacagcaccgagtcgctcatggaggagatggccagggcggaccgagtgagcgcctgcgcgggtccgggcggggtgggctggagcgggacaaccctccccgtcccccccgcggtaccgcctccccctcctcctggaaaccgggccggcgccgcgggcgcggaggtagctggatgcggccctctctccccgcaggagacgcggctgttcggcggccctcgcgcgctggccatcaggcggtgcgtgctgggcgcgctgcaggtgctgctgacgctgccgctcctcttcctggggctgtcgctgctctggacggtgctgttggaccccggcgccgtctccgcgtggctctggagcctcacctcggagacgacgctgcgccgcctgcgctacacgctgtccccgctgctggagctgcgcgctaacgggcttctgccaacctaagtgcagcgccccgcgcctggctccaggtggactccagggcacctggctttatttctggtgcactcctctcctgagagtgtagaccaaggttgcctaataaactcaagggatgaagctcgtgggttcgtcgtctgtctcccatgtcatgtaggagcttgactggcttttcagcctccaaagattccttccttccttacagctcatggatttagagccactccccagtattgtaaacagcatttttagtttttcaggatacataatttgccgtattgccagaaacttgtacatagcatttgacactttgccaatctgacaagctgccttttcaagtattgtgatttgaaattatttctactatatttgaatttatttctaccatttgtaacatgttgatcctgatttttcaatgctcccctttccttctgtttatttgggaagtcacactctgtattctggtattcttactacttgagctcagctcatcgctgtcatcttcccctaaaccgccttaaagcatcttaggtcttttccctctgatcacatgtgctacttttttttttcttttctttggagacggagtcttgctctgcgcccaggatggagtgcagtggcatgatctcggctcactgcaagctctgcctcccgggttccagcgattctcctgcctcagcctcccaagtagctgggacttcagacgcccgccatcatgcccgtttaattttttgtattttttgtagagacagagtttcactgtgttagccaggatggtctcgatctcctgacctcgtgatccgcccacctt

SEQ ID NO: 330929 - DNA, 2001 bp, Homo sapiens
cgcccattgtgacgcctgccagccgcaggctgggtccccgaggcgggcggcatttaggctcggtctccacagccatggccgcgacgcaggagctgctgctgcagttgcagaaggataaccgagatggtcgccagcggaagcaggagctagagaagctgatgcgcgggctcgaggccgagagcgagagcctcaaccagcgcctgcaggacctgagcgagcgggagcggagcctgctgcggaggcgaagccaggcagcgcagcctctgcaaggggaggcgcgcgaggcggcgcgggagcgcgcggagcgggtgcgcagaagactggaggaggcggagcgccacaaggaggacttggtgaggaagagtcctggaatggggctggacccagggtggggtggggcagggcgggcggaaggggggccggggtggggtgagtaggaccggcggagaggtcggcaccgccccaggaccccgtccgcaggagcagcacagcaggcagctgcaggagcagtgggaggagctgtcgagtcaggtacgtgcaggagatgggagggcctgtctcttggttcctctcggaagtcctgcccttgtcctcgcccttgttgcctccccgtccctgtctcccctgacacccgttcctccagaagcccggtaaaccccgcccttacaagccccgcccctagctcttctactacggaggggaactgcagagccagaagagcacggagcagcaactcgcagcccaattggtgacgctgcagaatgaactggagctggcggagaccaaatgcgccttgcaggaggagaagctgcagcaggacgcgctgcagacagcggaggcctgggccatattccaggagcagaccgtagtcctgcaggtgtgacgggcagcttcgcggagtgcagtacagcaccgagtcgctcatggaggagatggccagggcggaccgagagacgcggctgttcggcggccctcgcgcgctggccatcaggcggtgcgtgctgggcgcgctgcaggtgctgctgacgctgccgctcctcttcctggggctgtcgctgctctggacggtgctgttggaccccggcgccgtctccgcgtggctctggagcctcacctcggagacgacgctgcgccgcctgcgctacacgctgtccccgctgctggagctgcgcgctaacgggcttctgccaacctaagtgcagcgccccgcgcctggctccaggtggactccagggcacctggctttatttctggtgcactcctctcctgagagtgtagaccaaggttgcctaataaactcaagggatgaagctcgtgggttcgtcgtctgtctcccatgtcatgtaggagcttgactggcttttcagcctccaaagattccttccttccttacagctcatggatttagagccactccccagtattgtaaacagcatttttagtttttcaggatacataatttgccgtattgccagaaacttgtacatagcatttgacactttgccaatctgacaagctgccttttcaagtattgtgatttgaaattatttctactatatttgaatttatttctaccatttgtaacatgttgatcctgatttttcaatgctcccctttccttctgtttatttgggaagtcacactctgtattctggtattcttactacttgagctcagctcatcgctgtcatcttcccctaaaccgccttaaagcatcttaggtcttttccctctgatcacatgtgctacttttttttttcttttctttggagacggagtcttgctctgcgcccaggatggagtgcagtggcatgatctcggctcactgcaagctctgcctcccgggttccagcgattctcctgcctcagcctcccaagtagctgggacttcagacgcccgccatcatgcccgtttaattttttgtattttttgtagagacagagtttcactgtgttagccaggatggtctcgatctcctgacctcgtgatccgcccacctt

SEQ ID NO: 330930 - DNA, 1974 bp, Homo sapiens
cgcccattgtgacgcctgccagccgcaggctgggtccccgaggcgggcggcatttaggctcggtctccacagccatggccgcgacgcaggagctgctgctgcagttgcagaaggataaccgagatggtcgccagcggaagcaggagctagagaagctgatgcgcgggctcgaggccgagagcgagagcctcaaccagcgcctgcaggacctgagcgagcgggagcggagcctgctgcggaggcgaagccaggcagcgcagcctctgcaaggggaggcgcgcgaggcggcgcgggagcgcgcggagcgggtgcgcagaagactggaggaggcggagcgccacaaggaggacttggagcagcacagcaggcagctgcaggagcagtgggaggagctgtcgagtcagaagcccggtaaaccccgcccttacaagccccgcccctagctcttctactacggaggggaactgcagagccagaagagcacggagcagcaactcgcagcccaattggtgacgctgcagaatgaactggagctggcggagaccaaatgcgccttgcaggaggagaagctgcagcaggacgcgctgcagacagcggaggcctgggccatattccaggagcagaccgtagtcctgcaggaggtgcaggtgaaggtgatggaggctgcggaggagctggacgcctggcagagtggccgggaactgtgtgacgggcagcttcgcggagtgcagtacagcaccgagtcgctcatggaggagatggccagggcggaccgagtgagcgcctgcgcgggtccgggcggggtgggctggagcgggacaaccctccccgtcccccccgcggtaccgcctccccctcctcctggaaaccgggccggcgccgcgggcgcggaggtagctggatgcggccctctctccccgcaggagacgcggctgttcggcggccctcgcgcgctggccatcaggcggtgcgtgctgggcgcgctgcaggtgctgctgacgctgccgctcctcttcctggggctgtcgctgctctggacggtgctgttggaccccggcgccgtctccgcgtggctctggagcctcacctcggagacgacgctgcgccgcctgcgctacacgctgtccccgctgctggagctgcgcgctaacgggcttctgccaacctaagtgcagcgccccgcgcctggctccaggtggactccagggcacctggctttatttctggtgcactcctctcctgagagtgtagaccaaggttgcctaataaactcaagggatgaagctcgtgggttcgtcgtctgtctcccatgtcatgtaggagcttgactggcttttcagcctccaaagattccttccttccttacagctcatggatttagagccactccccagtattgtaaacagcatttttagtttttcaggatacataatttgccgtattgccagaaacttgtacatagcatttgacactttgccaatctgacaagctgccttttcaagtattgtgatttgaaattatttctactatatttgaatttatttctaccatttgtaacatgttgatcctgatttttcaatgctcccctttccttctgtttatttgggaagtcacactctgtattctggtattcttactacttgagctcagctcatcgctgtcatcttcccctaaaccgccttaaagcatcttaggtcttttccctctgatcacatgtgctacttttttttttcttttctttggagacggagtcttgctctgcgcccaggatggagtgcagtggcatgatctcggctcactgcaagctctgcctcccgggttccagcgattctcctgcctcagcctcccaagtagctgggacttcagacgcccgccatcatgcccgtttaattttttgtattttttgtagagacagagtttcactgtgttagccaggatggtctcgatctcctgacctcgtgatccgcccacctt

SEQ ID NO: 330931 - DNA, 899 bp, Homo sapiens
cgcccattgtgacgcctgccagccgcaggctgggtccccgaggcgggcggcatttaggctcggtctccacagccatggccgcgacgcaggagctgctgctgcagttgcagaaggataaccgagatggtcgccagcggaagcaggagctagagaagctgatgcgcgggctcgaggccgagagcgagagcctcaaccagcgcctgcaggacctgagcgagcgggagcggagcctgctgcggaggcgaagccaggcagcgcagcctctgcaaggggaggcgcgcgaggcggcgcgggagcgcgcggagcgggtgcgcagaagactggaggaggcggagcgccacaaggaggacttggtgaggaagagtcctggaatggggctggacccagggtggggtggggcagggcgggcggaaggggggccggggtggggtgagtaggaccggcggagaggtcggcaccgccccaggaccccgtccgcaggagcagcacagcaggcagctgcaggagcagtgggaggagctgtcgagtcaggtacgtgcaggagatgggagggcctgtctcttggttcctctcggaagtcctgcccttgtcctcgcccttgttgcctccccgtccctgtctcccctgacacccgttcctccagaagcccggtaaaccccgcccttacaagccccgcccctagctcttctactacggaggggaactgcagagccagaagagcacggagcagcaactcgcagcccaattggtgacgctgcaggtgcttgagcgggaccctgaggtgtttagtaggggcggagcagcagcatgagctgggccgtgaccacctgggggtgtggcttaaggcaggccctgaaggcgtgggcggggcggggaatgtgggcggagcacaatcgcat

SEQ ID NO: 330932 - DNA, 1313 bp, Homo sapiens
ggtccttctcaagaatgaactggagctggcggagaccaaatgcgccttgcaggaggagaagctgcagcaggacgcgctgcagacagcggaggcctgggccatattccaggagcagaccgtagtcctgcaggtgcggccccactcagacgccaaggtgcctcccgcctctcctcccccagacctggggcggtgtgacgggcagcttcgcggagtgcagtacagcaccgagtcgctcatggaggagatggccagggcggaccgagagacgcggctgttcggcggccctcgcgcgctggccatcaggcggtgcgtgctgggcgcgctgcaggtgctgctgacgctgccgctcctcttcctggggctgtcgctgctctggacggtgctgttggaccccggcgccgtctccgcgtggctctggagcctcacctcggagacgacgctgcgccgcctgcgctacacgctgtccccgctgctggagctgcgcgctaacgggcttctgccaacctaagtgcagcgccccgcgcctggctccaggtggactccagggcacctggctttatttctggtgcactcctctcctgagagtgtagaccaaggttgcctaataaactcaagggatgaagctcgtgggttcgtcgtctgtctcccatgtcatgtaggagcttgactggcttttcagcctccaaagattccttccttccttacagctcatggatttagagccactccccagtattgtaaacagcatttttagtttttcaggatacataatttgccgtattgccagaaacttgtacatagcatttgacactttgccaatctgacaagctgccttttcaagtattgtgatttgaaattatttctactatatttgaatttatttctaccatttgtaacatgttgatcctgatttttcaatgctcccctttccttctgtttatttgggaagtcacactctgtattctggtattcttactacttgagctcagctcatcgctgtcatcttcccctaaaccgccttaaagcatcttaggtcttttccctctgatcacatgtgctacttttttttttcttttctttggagacggagtcttgctctgcgcccaggatggagtgcagtggcatgatctcggctcactgcaagctctgcctcccgggttccagcgattctcctgcctcagcctcccaagtagctgggacttcagacgcccgccatcatgcccgtttaattttttgtattttttgtagagacagagtttcactgtgttagccaggatggtctcgatctcctgacctcgtgatccgcccacctt

SEQ ID NO: 330933 - DNA, 1909 bp, Homo sapiens
cgcccattgtgacgcctgccagccgcaggctgggtccccgaggcgggcggcatttaggctcggtctccacagccatggccgcgacgcaggagctgctgctgcagttgcagaaggataaccgagatggtcgccagcggaagcaggagctagagaagctgatgcgcgggctcgaggccgagagcgagagcctcaaccagcgcctgcaggacctgagcgagcgggagcggagcctgctgcggaggcgaagccaggcagcgcagcctctgcaaggggaggcgcgcgaggcggcgcgggagcgcgcggagcgggtgcgcagaagactggaggaggcggagcgccacaaggaggacttggtgaggaagagtcctggaatggggctggacccagggtggggtggggcagggcgggcggaaggggggccggggtggggtgagtaggaccggcggagaggtcggcaccgccccaggaccccgtccgcaggagcagcacagcaggcagctgcaggagcagtgggaggagctgtcgagtcagctcttctactacggaggggaactgcagagccagaagagcacggagcagcaactcgcagcccaattggtgacgctgcagaatgaactggagctggcggagaccaaatgcgccttgcaggaggagaagctgcagcaggacgcgctgcagacagcggaggcctgggccatattccaggagcagaccgtagtcctgcaggtgcggccccactcagacgccaaggtgcctcccgcctctcctcccccagacctggggcggtgtgacgggcagcttcgcggagtgcagtacagcaccgagtcgctcatggaggagatggccagggcggaccgagagacgcggctgttcggcggccctcgcgcgctggccatcaggcggtgcgtgctgggcgcgctgcaggtgctgctgacgctgccgctcctcttcctggggctgtcgctgctctggacggtgctgttggaccccggcgccgtctccgcgtggctctggagcctcacctcggagacgacgctgcgccgcctgcgctacacgctgtccccgctgctggagctgcgcgctaacgggcttctgccaacctaagtgcagcgccccgcgcctggctccaggtggactccagggcacctggctttatttctggtgcactcctctcctgagagtgtagaccaaggttgcctaataaactcaagggatgaagctcgtgggttcgtcgtctgtctcccatgtcatgtaggagcttgactggcttttcagcctccaaagattccttccttccttacagctcatggatttagagccactccccagtattgtaaacagcatttttagtttttcaggatacataatttgccgtattgccagaaacttgtacatagcatttgacactttgccaatctgacaagctgccttttcaagtattgtgatttgaaattatttctactatatttgaatttatttctaccatttgtaacatgttgatcctgatttttcaatgctcccctttccttctgtttatttgggaagtcacactctgtattctggtattcttactacttgagctcagctcatcgctgtcatcttcccctaaaccgccttaaagcatcttaggtcttttccctctgatcacatgtgctacttttttttttcttttctttggagacggagtcttgctctgcgcccaggatggagtgcagtggcatgatctcggctcactgcaagctctgcctcccgggttccagcgattctcctgcctcagcctcccaagtagctgggacttcagacgcccgccatcatgcccgtttaattttttgtattttttgtagagacagagtttcactgtgttagccaggatggtctcgatctcctgacctcgtgatccgcccacctt

SEQ ID NO: 330934 - DNA, 1868 bp, Homo sapiens
cgcccattgtgacgcctgccagccgcaggctgggtccccgaggcgggcggcatttaggctcggtctccacagccatggccgcgacgcaggagctgctgctgcagttgcagaaggataaccgagatggtcgccagcggaagcaggagctagagaagctgatgcgcgggctcgaggccgagagcgagagcctcaaccagcgcctgcaggacctgagcgagcgggagcggagcctgctgcggaggcgaagccaggcagcgcagcctctgcaaggggaggcgcgcgaggcggcgcgggagcgcgcggagcgggtgcgcagaagactggaggaggcggagcgccacaaggaggacttggtgaggaagagtcctggaatggggctggacccagggtggggtggggcagggcgggcggaaggggggccggggtggggtgagtaggaccggcggagaggtcggcaccgccccaggaccccgtccgcaggagcagcacagcaggcagctgcaggagcagtgggaggagctgtcgagtcagctcttctactacggaggggaactgcagagccagaagagcacggagcagcaactcgcagcccaattggtgacgctgcagaatgaactggagctggcggagaccaaatgcgccttgcaggaggagaagctgcagcaggacgcgctgcagacagcggaggcctgggccatattccaggagcagaccgtagtcctgcaggtgcggccccactcagacgccaaggtgcctcccgcctctcctcccccagacctggggcggtgtgacgggcagcttcgcggagtgcagtacagcaccgagtcgctcatggaggagatggccagggcggaccgagcggtgcgtgctgggcgcgctgcaggtgctgctgacgctgccgctcctcttcctggggctgtcgctgctctggacggtgctgttggaccccggcgccgtctccgcgtggctctggagcctcacctcggagacgacgctgcgccgcctgcgctacacgctgtccccgctgctggagctgcgcgctaacgggcttctgccaacctaagtgcagcgccccgcgcctggctccaggtggactccagggcacctggctttatttctggtgcactcctctcctgagagtgtagaccaaggttgcctaataaactcaagggatgaagctcgtgggttcgtcgtctgtctcccatgtcatgtaggagcttgactggcttttcagcctccaaagattccttccttccttacagctcatggatttagagccactccccagtattgtaaacagcatttttagtttttcaggatacataatttgccgtattgccagaaacttgtacatagcatttgacactttgccaatctgacaagctgccttttcaagtattgtgatttgaaattatttctactatatttgaatttatttctaccatttgtaacatgttgatcctgatttttcaatgctcccctttccttctgtttatttgggaagtcacactctgtattctggtattcttactacttgagctcagctcatcgctgtcatcttcccctaaaccgccttaaagcatcttaggtcttttccctctgatcacatgtgctacttttttttttcttttctttggagacggagtcttgctctgcgcccaggatggagtgcagtggcatgatctcggctcactgcaagctctgcctcccgggttccagcgattctcctgcctcagcctcccaagtagctgggacttcagacgcccgccatcatgcccgtttaattttttgtattttttgtagagacagagtttcactgtgttagccaggatggtctcgatctcctgacctcgtgatccgcccacctt

SEQ ID NO: 330935 - DNA, 1915 bp, Homo sapiens
cgcccattgtgacgcctgccagccgcaggctgggtccccgaggcgggcggcatttaggctcggtctccacagccatggccgcgacgcaggagctgctgctgcagttgcagaaggataaccgagatggtcgccagcggaagcaggagctagagaagctgatgcgcgggctcgaggccgagagcgagagcctcaaccagcgcctgcaggacctgagcgagcgggagcggagcctgctgcggaggcgaagccaggcagcgcagcctctgcaaggggaggcgcgcgaggcggcgcgggagcgcgcggagcgggtgcgcagaagactggaggaggcggagcgccacaaggaggacttggtgaggaagagtcctggaatggggctggacccagggtggggtggggcagggcgggcggaaggggggccggggtggggtgagtaggaccggcggagaggtcggcaccgccccaggaccccgtccgcaggagcagcacagcaggcagctgcaggagcagtgggaggagctgtcgagtcagctcttctactacggaggggaactgcagagccagaagagcacggagcagcaactcgcagcccaattggtgacgctgcagaatgaactggagctggcggagaccaaatgcgccttgcaggaggagaagctgcagcaggacgcgctgcagacagcggaggcctgggccatattccaggagcagaccgtagtcctgcaggaggtgcaggtgaaggtgatggaggctgcggaggagctggacgcctggcagagtggccgggaactgtgtgacgggcagcttcgcggagtgcagtacagcaccgagtcgctcatggaggagatggccagggcggaccgagagacgcggctgttcggcggccctcgcgcgctggccatcaggcggtgcgtgctgggcgcgctgcaggtgctgctgacgctgccgctcctcttcctggggctgtcgctgctctggacggtgctgttggaccccggcgccgtctccgcgtggctctggagcctcacctcggagacgacgctgcgccgcctgcgctacacgctgtccccgctgctggagctgcgcgctaacgggcttctgccaacctaagtgcagcgccccgcgcctggctccaggtggactccagggcacctggctttatttctggtgcactcctctcctgagagtgtagaccaaggttgcctaataaactcaagggatgaagctcgtgggttcgtcgtctgtctcccatgtcatgtaggagcttgactggcttttcagcctccaaagattccttccttccttacagctcatggatttagagccactccccagtattgtaaacagcatttttagtttttcaggatacataatttgccgtattgccagaaacttgtacatagcatttgacactttgccaatctgacaagctgccttttcaagtattgtgatttgaaattatttctactatatttgaatttatttctaccatttgtaacatgttgatcctgatttttcaatgctcccctttccttctgtttatttgggaagtcacactctgtattctggtattcttactacttgagctcagctcatcgctgtcatcttcccctaaaccgccttaaagcatcttaggtcttttccctctgatcacatgtgctacttttttttttcttttctttggagacggagtcttgctctgcgcccaggatggagtgcagtggcatgatctcggctcactgcaagctctgcctcccgggttccagcgattctcctgcctcagcctcccaagtagctgggacttcagacgcccgccatcatgcccgtttaattttttgtattttttgtagagacagagtttcactgtgttagccaggatggtctcgatctcctgacctcgtgatccgcccacctt

SEQ ID NO: 330936 - DNA, 2237 bp, Homo sapiens
cgcccattgtgacgcctgccagccgcaggctgggtccccgaggcgggcggcatttaggctcggtctccacagccatggccgcgacgcaggagctgctgctgcagttgcagaaggataaccgagatggtcgccagcggaagcaggagctagagaagctgatgcgcgggctcgaggccgagagcgagagcctcaaccagcgcctgcaggacctgagcgagcgggagcggagcctgctgcggaggcgaagccaggcagcgcagcctctgcaaggggaggcgcgcgaggcggcgcgggagcgcgcggagcgggtgcgcagaagactggaggaggcggagcgccacaaggaggacttggtgaggaagagtcctggaatggggctggacccagggtggggtggggcagggcgggcggaaggggggccggggtggggtgagtaggaccggcggagaggtcggcaccgccccaggaccccgtccgcaggagcagcacagcaggcagctgcaggagcagtgggaggagctgtcgagtcaggtacgtgcaggagatgggagggcctgtctcttggttcctctcggaagtcctgcccttgtcctcgcccttgttgcctccccgtccctgtctcccctgacacccgttcctccagaagcccggtaaaccccgcccttacaagccccgcccctagctcttctactacggaggggaactgcagagccagaagagcacggagcagcaactcgcagcccaattggtgacgctgcagaatgaactggagctggcggagaccaaatgcgccttgcaggaggagaagctgcagcaggacgcgctgcagacagcggaggcctgggccatattccaggagcagaccgtagtcctgcaggtgcggccccactcagacgccaaggaggtgcaggtgaaggtgatggaggctgcggaggagctggacgcctggcagagtggccgggaactgtgtgacgggcagcttcgcggagtgcagtacagcaccgagtcgctcatggaggagatggccagggcggaccgagtgagcgcctgcgcgggtccgggcggggtgggctggagcgggacaaccctccccgtcccccccgcggtaccgcctccccctcctcctggaaaccgggccggcgccgcgggcgcggaggtagctggatgcggccctctctccccgcaggagacgcggctgttcggcggccctcgcgcgctggccatcaggcggtgcgtgctgggcgcgctgcaggtgctgctgacgctgccgctcctcttcctggggctgtcgctgctctggacggtgctgttggaccccggcgccgtctccgcgtggctctggagcctcacctcggagacgacgctgcgccgcctgcgctacacgctgtccccgctgctggagctgcgcgctaacgggcttctgccaacctaagtgcagcgccccgcgcctggctccaggtggactccagggcacctggctttatttctggtgcactcctctcctgagagtgtagaccaaggttgcctaataaactcaagggatgaagctcgtgggttcgtcgtctgtctcccatgtcatgtaggagcttgactggcttttcagcctccaaagattccttccttccttacagctcatggatttagagccactccccagtattgtaaacagcatttttagtttttcaggatacataatttgccgtattgccagaaacttgtacatagcatttgacactttgccaatctgacaagctgccttttcaagtattgtgatttgaaattatttctactatatttgaatttatttctaccatttgtaacatgttgatcctgatttttcaatgctcccctttccttctgtttatttgggaagtcacactctgtattctggtattcttactacttgagctcagctcatcgctgtcatcttcccctaaaccgccttaaagcatcttaggtcttttccctctgatcacatgtgctacttttttttttcttttctttggagacggagtcttgctctgcgcccaggatggagtgcagtggcatgatctcggctcactgcaagctctgcctcccgggttccagcgattctcctgcctcagcctcccaagtagctgggacttcagacgcccgccatcatgcccgtttaattttttgtattttttgtagagacagagtttcactgtgttagccaggatggtctcgatctcctgacctcgtgatccgcccacctt

SEQ ID NO: 330937 - DNA, 1076 bp, Homo sapiens
cgcccattgtgacgcctgccagccgcaggctgggtccccgaggcgggcggcatttaggctcggtctccacagccatggccgcgacgcaggagctgctgctgcagttgcagaaggataaccgagatggtcgccagcggaagcaggagctagagaagctgatgcgcgggctcgaggccgagagcgagagcctcaaccagcgcctgcaggacctgagcgagcgggagcggagcctgctgcggaggcgaagccaggcagcgcagcctctgcaaggggaggcgcgcgaggcggcgcgggagcgcgcggagcgggtgcgcagaagactggaggaggcggagcgccacaaggaggacttggtgaggaagagtcctggaatggggctggacccagggtggggtggggcagggcgggcggaaggggggccggggtggggtgagtaggaccggcggagaggtcggcaccgccccaggaccccgtccgcaggagcagcacagcaggcagctgcaggagcagtgggaggagctgtcgagtcaggtacgtgcaggagatgggagggcctgtctcttggttcctctcggaagtcctgcccttgtcctcgcccttgttgcctccccgtccctgtctcccctgacacccgttcctccagaagcccggtaaaccccgcccttacaagccccgcccctagctcttctactacggaggggaactgcagagccagaagagcacggagcagcaactcgcagcccaattggtgacgctgcagaatgaactggagctggcggagaccaaatgcgccttgcaggaggagaagctgcagcaggacgcgctgcagacagcggaggcctgggccatattccaggagcagaccgtagtcctgcaggtgcggccccactcagacgccaaggtgcctcccgcctctcctcccccagacctggggcggtgtgacgggcagcttcgcggagtgcagtacagcaccgagtcgctcatggaggagatggccagggcggaccgagagacgcggctgttcggcggccctcgcgcgctggccatcaggtgagccgggcggtgggcgcggccgc

SEQ ID NO: 330938 - DNA, 824 bp, Homo sapiens
ttgctttttttgtctctaactcaaactccatcacaagaccttttctcatactcttctctctgcctggagactttgcctagttaaaacttgcttatcctttgatctgtatagaatgttatttccacagagatgcctccccgggtaaggtcatattttcctttcacgtacattggtagcaccttgttcatctcctttctcactgtgatcataaatgcagtggtacattcttcattgagaatgtttaatgtctgcctctgccattagaaaatagccttctgagggcaggaaccgtgtctactttgcagatagaagtacctatttcgtaggatagtgaggattacatgagtttagctcagtgcctagtacataagcacataatgttagttaaatcctgctgtatattgttttggttgtagtagaaggagattatattgatggtgaatacgttaactgggttaagtttaaggaagaattctgactctccttgtccagaaatagatcacctttggagagaagtagctagtctttttgtgacaagggaaagagaaaaatagcttcactcctgtactattcttgacttctgtatctaagtcaaactgtaagaaagcagctttttccaaaatattttctcctcttttccagcaatatttccctaattaaaaaaaaaatcaagtaggtaggcagtttcaaacagagattttcgattggaatttgggaaattaatatatagaattacagatccatatctgttatatcaaccaaagttataaaaatcaagaggatgggatccaagatgatacaacagacatttcatgtcatggcat

SEQ ID NO: 330939 - DNA, 612 bp, Homo sapiens
acagtgatgaagtcacctaatgatgcatttctcagaatgtattcccatcattaagtgatgtatgactgtattccaaaattcaaaaaaaaattcaaaatcaaaaacactttgttcccgagcatttcagataagggatactcaacctgtatatagtatataaaaattagtatataaaaaatcttgtcctcagggagtttataatttgtgaggaacgggtgatgcggttggcattcctggcggatggaatgcaataaacacagtccagagacaggcagtttcattccacctggctctggaacaaagcaggaggggagggccggggagagatgaggtcagccaggctggaaagcagggcgcttaatgccatacaaaggaattgggatcagcttctgggctagtggggggttaaagtaggagtgggggtggtgatacaattaaatcactcgggctgcagtcgacgggaggattagagggaacaagacctggggcagggggatctgtctggatgctggggtccaggcgagagatcgtggggaacccgcagagagatcagatcgtcactgtgtctgtgcagaacgaagtcgacctaggagactccattccgtcatgtac

SEQ ID NO: 330940 - DNA, 424 bp, Homo sapiens
tggacaaagctagtgaatggcacatcaggactagaatttaggtttcctgactcttaagctctctcaccaagaagaaaaatgggagataaactggaacagtgtagattggaattgagccctctcatagctaaggagttgagaaatataaactttaaccccttggacaatgggaacctttgaaggtttctgagcaaaggagtgacaacagggttctcaaaataatatgacatgggtgttaaaaacccttatttggggccaggcacggtggctcacacctgtaatcccagcactttgggaggccgagacgggcggatcacgaggtcaggagatcgagaccatcctggctaaaacggtgaaaccctgtctctactaaaaatacaaaaaattagccgggtgtgttggcaggcacctgtagtcccagcta

SEQ ID NO: 330941 - DNA, 693 bp, Homo sapiens
acatttatgccaaaatatttgaaggttattttcttcatttttctctaatattttcacttttgaaagggaagaaaataattgtataagcatcagccatcttctgcagccttttgcatctattttgttaccttacgagatcatcacagtccttactaaaacaaaaattgtcacaacgtgagtgaatttaatataaactagcatttcccccttcccttagtgaataatcattgtttgtagaaaaagctcccatcattgagtcatgtttgtgatcaacacaaagggtaaatgaaaggaccttagagtggtgaataggtattcctgccttgagggtttctttttcatttaaacattggtgtacaaatacttcagtagctaatgcattcttggttactccttaagatatcttattcttctctaagtttttctaattgcagtgcaatgacaacagtcacatatctgccacttataggaagggagtagaaaaggaggaggctgggaagacagctgtgtaaaggtgagatacgtgagcactgatgaacttcactctccactgcagcccatatatagcctgcagttgtgtgcttctttattttagtctctactaggctctggcaaggaaaacaacatattctgctggaagaaatttttcatttgccactgcaattttttttttttgccactgcaatttttttt

SEQ ID NO: 330942 - DNA, 147 bp, Homo sapiens
tcagcaaatgggagttctaattgctaccaaaagtgaatgtcagggagcagccaccttgagctcttgtgatactgggtacagcccatgataaagtccacaccaacattgcctcattctactcaaggcacttcatcaggcaggccagaa

SEQ ID NO: 330943 - DNA, 535 bp, Homo sapiens
cctcttactatttcttggagtaggcctaggtaaactgtgaggctatttctctttatcttggcacaagagtcagttgttctacaactttcttccttctcctcgtcagccctcttcacctatactcctgtctttggcttttctctacttaataagcctgacgttaggagcatttgatgattttagttatagtagaataactataatgaagcagtttggtgatttgtgtttttttttcagcctatgggctatgggcctcgtatgcaacagccttccaaccagggccagttccttcctcagactcagttcccatcacagggaatgaatgtaacaaatatccctttggctccgtccagcggtcaagctccagtgtctcaagcacaaatgtctagttcttcctgcccggtgaactctcctataatgcctccagggtctcaggggagccacattcactgtccccagcttcctcaaccagctcttcatcagaattcaccctcgcctgtacctagtcgtacccccacccctcaccatactcccc

SEQ ID NO: 330944 - DNA, 321 bp, Homo sapiens
ctgttcctacacctcctgccatgccacctgggccacagtcccaggctctacatccccctccaaggcagacacctacaccaccaacaacacaacttccccaacaagtgcagccttcacttcctgctgcaccttctgctgaccagccccagcagctcgcccctgagttaactgggcgagctgcactaactcaggggcgagctgcacgacgcctgtgtgtctggcctttccttcttcttctcttccccggcagcacagtgtggctgtttgtctcctgcccgccaaattagcccagtcgaacgactccacgcagctcgtaatgag

SEQ ID NO: 330945 - DNA, 1476 bp, Homo sapiens
ttgactggagcacccgttggacttggaaatcctagctctctaggggtgggtcaacagtctgcccccaacctaagcactgttagtcagattgatcccagctccatagaaagagcctatgcagctcttggactaccctatcaagtaaatcagatgccgacacaaccccaggtgcaagcaaagaaccagcagaatcagcagcctgggcagtctccccaaggcatgcggcccatgagcaacatgagtgctagtcctatgggagtaaatggaggtgtaggagttcaaacgccgagtcttctttctgactcaatgttgcattcagccataaattctcaaaacccaatgatgagtgaaaatgccagtgtgccctccctgggtcctatgccaacagcagctcaaccatccactactggaattcggaaacagtggcacgaagatattactcaggatcttcgaaatcatcttgttcacaaactcgtccaagccatatttcctacgccggatcctgctgctttaaaagacagacggatggaaaacctagttgcatatgctcggaaagttgaaggggacatgtatgaatctgcaaacaatcgagcggaatactaccaccttctagctgagaaaatctataagatccagaaagaactagaagaaaaacgaaggaccagactacagaagcagaacatgctaccaaatgctgcaggcatggttccagtttccatgaatccagggcctaacatgggacagccgcaaccaggaatgacttctaatggccctctacctgacccaagtatgatccgtggcagtgtgccaaaccagatgatgcctcgaataactccacaatctggtttgaatcaatttggccagatgagcatggcccagccccctattgtaccccggcaaacccctcctcttcagcaccatggacagttggctcaacctggagctctcaacccggttagtttgacgtctttggtaatctctttggcctttacctggtattttgaaaatcctgtttgttcctactttataaattctcacagtcatttaaacagaccataactcctagttcttctgtaattcttctgtatttaactctactagaaagctgaccaaaaaacgaaaacagccagtcccttgtcccgggagtgtcagtgtttagtggcctgcatgcgttttcacgggtcaacttctcttccctgatgtctgtcttccctcctccaggcagagaactgtcttgcaaggttgatggtgcgtttttgcctggttcttgaactcggagaagagagactaggcttctcctgctccttatgcgaactcttaaccagtccatctctctaccttgaccctaaccctcctgctgccctttagagttagctggtgcctctgattcttgacccttttgggggttcctgagcattactacttctcactaatctgccattttcaacagggagttctgtccttcattttaaccta

SEQ ID NO: 330946 - DNA, 1174 bp, Homo sapiens
ttgactggagcacccgttggacttggaaatcctagctctctaggggtgggtcaacagtctgcccccaacctaagcactgttagtcagattgatcccagctccatagaaagagcctatgcagctcttggactaccctatcaagtaaatcagatgccgacacaaccccaggtgcaagcaaagaaccagcagaatcagcagcctgggcagtctccccaaggcatgcggcccatgagcaacatgagtgctagtcctatgggagtaaatggaggtgtaggagttcaaacgccgagtcttctttctgactcaatgttgcattcagccataaattctcaaaacccaatgatgagtgaaaatgccagtgtgccctccctgggtcctatgccaacagcagctcaaccatccactactggaattcggaaacagtggcacgaagatattactcaggatcttcgaaatcatcttgttcacaaactcgtccaagccatatttcctacgccggatcctgctgctttaaaagacagacggatggaaaacctagttgcatatgctcggaaagttgaaggggacatgtatgaatctgcaaacaatcgagcggaatactaccaccttctagctgagaaaatctataagatccagaaagaactagaagaaaaacgaaggaccagactacagaagcagaacatgctaccaaatgctgcaggcatggttccagtttccatgaatccagggcctaacatgggacagccgcaaccaggaatgacttctagtttgaatcaatttggccagatgagcatggcccagccccctattgtaccccggcaaacccctcctcttcagcaccatggacagttggctcaacctggagctctcaacccgcctatgggctatgggcctcgtatgcaacagccttccaaccagggccagttccttcctcagactcagttcccatcacagggaatgaatgtaacaaatatccctttggctccgtccagcggtcaagctccagtgtctcaagcacaaatgtctagttcttcctgcccggtgaactctcctataatgcctccagggtctcaggggagccacattcactgtccccagcttcctcaaccagctcttcatcagaattcaccctcgcctgtacctagtcgtacccccacccctcaccatactcccc

SEQ ID NO: 330947 - DNA, 118 bp, Homo sapiens
tgctgcaccttctgctgaccagccccagcagcagcctcgctcacagcagagcacagcagcgtctgttcctaccccaacagcaccgctgcttcctccgcagcctgcaactccagtaagt

SEQ ID NO: 330948 - DNA, 264 bp, Homo sapiens
gtgcttcaaatcagcctttacatatgtgttgccagttatattgtcaattatttattgtatatgctgcaaattttttttctgatttgtcatttgtttcttaactttatagtatttattgtatggtggctgttgtatttatttctgtctcctgttatttcattttgacttaggtgctagtcctatgggagtaaatggaggtgtaggagttcaaacgccgagtcttctttctgactcaatgttgcattcagccataaattctcaaaa

SEQ ID NO: 330949 - DNA, 237 bp, Homo sapiens
aaaatgccagtgtgccctccctgggtcctatgccaacagcagctcaaccatccactactggaattcggaaacagtggcacgaagatattactcaggatcttcgaaatcatcttgttcacaaactgtaagtaagattgtggacacgtctcattcgtaaagagatgttacgtcaacatgttttcaatctcctgggcatttaattactaaaggaatattagcaatttttctgtagcatgg

SEQ ID NO: 330950 - DNA, 396 bp, Homo sapiens
tcctaaatttatatatcatgcctatgtaagtatttccttaattctgttctgaattgctgtcttgttatgttttttattttaacaggcacaaatgtctagttcttcctgcccggtgaactctcctataatgcctccagggtctcaggggagccacattcactgtccccagcttcctcaaccagctcttcatcagaattcaccctcgcctgtacctagtcgtacccccacccctcaccatactcccccaagcataggggctcagcagccaccagcaacaacaattccagcccctgttcctacacctcctgccatgccacctgggccacagtcccaggctctacatccccctccaaggcagacacctacaccaccaacaacacaacttccccaacaagt

SEQ ID NO: 330951 - DNA, 1252 bp, Homo sapiens
ttgactggagcacccgttggacttggaaatcctagctctctaggggtgggtcaacagtctgcccccaacctaagcactgttagtcagattgatcccagctccatagaaagagcctatgcagctcttggactaccctatcaagtaaatcagatgccgacacaaccccaggtgcaagcaaagaaccagcagaatcagcagcctgggcagtctccccaaggcatgcggcccatgagcaacatgagtgctagtcctatgggagtaaatggaggtgtaggagttcaaacgccgagtcttctttctgactcaatgttgcattcagccataaattctcaaaacccaatgatgagtgaaaatgccagtgtgccctccctgggtcctatgccaacagcagctcaaccatccactactggaattcggaaacagtggcacgaagatattactcaggatcttcgaaatcatcttgttcacaaactcgtccaagccatatttcctacgccggatcctgctgctttaaaagacagacggatggaaaacctagttgcatatgctcggaaagttgaaggggacatgtatgaatctgcaaacaatcgagcggaatactaccaccttctagctgagaaaatctataagatccagaaagaactagaagaaaaacgaaggaccagactacagaagcagaacatgctaccaaatgctgcaggcatggttccagtttccatgaatccagggcctaacatgggacagccgcaaccaggaatgacttctaatggccctctacctgacccaagtatgatccgtggcagtgtgccaaaccagatgatgcctcgaataactccacaatctggtttgaatcaatttggccagatgagcatggcccagccccctattgtaccccggcaaacccctcctcttcagcaccatggacagttggctcaacctggagctctcaacccgcctatgggctatgggcctcgtatgcaacagccttccaaccagggccagttccttcctcagactcagttcccatcacagggaatgaatgtaacaaatatccctttggctccgtccagcggtcaagctccagtgtctcaagcacaaatgtctagttcttcctgcccggtgaactctcctataatgcctccagggtctcaggggagccacattcactgtccccagcttcctcaaccagctcttcatcagaattcaccctcgcctgtacctagtcgtacccccacccctcaccatactcccc

SEQ ID NO: 330952 - DNA, 922 bp, Homo sapiens
tgaaggtcttcccatggttccatggctcggcacagcccggcaggacactggacacgctgtagcagccacagaggtcacggtcaggtggtccttgaacagcgctcttcccacttgagggcgtccaggtgaaggtgacacctgaggcatctctcaggccggtcagtgtgcacgtgaggttcgcttctgaacctaagagcaggtcctcgagggccggtcggtgcagtgacagtcgggggtggcagcatgagggagatggggtaggtggagcgctccacccgacggggtgggaaaatctataagatccagaaagaactagaagaaaaacgaaggaccagactacagaagcagaacatgctaccaaatgctgcaggcatggttccagtttccatgaatccagggcctaacatgggacagccgcaaccaggaatgacttctaatggccctctacctgacccaagtatgatccgtggcagtgtgccaaaccagatgatgcctcgaataactccacaatctggtttgaatcaatttggccagatgagcatggcccagccccctattgtaccccggcaaacccctcctcttcagcaccatggacagttggctcaacctggagctctcaacccgcctatgggctatgggcctcgtatgcaacagccttccaaccagggccagttccttcctcagactcagttcccatcacagggaatgaatgtaacaaatatccctttggctccgtccagcggtcaagctccagtgtctcaagcacaaatgtctagttcttcctgcccggtgaactctcctataatgcctccagggtctcaggggagccacattcactgtccccagcttcctcaaccagctcttcatcagaattcaccctcgcctgtacctagtcgtacccccacccctcaccatactcccc

SEQ ID NO: 330953 - DNA, 1213 bp, Homo sapiens
tggaactacactcctttctactctttgcctgattaacttacaaactttctcttatggtaggtctgttttatttgagttcttccctaatttagttaaacctaaattaggtacctatgttaattcttcagagcataatagcatttatctcagtttgcaattgtgtgtgcatacagtgattatttgcttaatggctgttgctccctaaggtctacaagggcaggttccccagggtgtccacatagaaggtgctcagaaaaataccttgaattggcctagcttggtaagaacatgggctttggcagcaggaagttcaaatacctgctctactctttattattagtaatgtgatcttggacaacccacatagccttgctgagacctgttttatttgtaaaacatctcttggagttgctgtgaggataaaatgacaacatatataaagagccaggcttcttctagaagaatgtccttgggtagcatgtacatttccatccttccttttagagagtgggggtaataggataccccctcctccaggggtatcccctctttctagggacctacccaagctaggcctttcttccagtgaaacgtgcatcccgagggcttctaggatgaagtagtccactggaaggcaccagctcttccttttatctctccagagctggacagtgcaccaggggccggtactggttccccagctaggagacaccttgggcggggctttgctcgccggaagcacgcagagcgtggggaggagggccccctctgcctgtgtttgtgccaacagcacccgcgctgccgcgtcgggttccggcggccggagtcacacatgatgtcacagacaatgacacaagccggtgtctcattccgacacagcgtccgagctgcacaatgtcacacccgggtgccaaacacttggccccgcgcgacccggccctacgcctcctgccgccgctctccgcgtctccgggggaggtggcccggttcggccgggcagggggctggcgggcgagccccgcgggcgggctggcgagcgggtgatgtcacgggcagcggtgggtgggtcactcggaggtgaggcgccgccaggcgagttcagcgagagttcagccgcattgcattaggcaaatgaggcccggcctgtccacatgccgcctctccctctcggttccctgcgtttctcccgctgcagccggacgcgccgggaatg

SEQ ID NO: 330954 - DNA, 3156 bp, Homo sapiens
  misc_feature (3121)..(3121): n is a, c, g, or t
ctccccttcagcttctcttcacgcactccaagatctaaaccgagaatcgaaactaagctggggtccatggagcctgcacccgcccgatctccgaggccccagcaggaccccgcccggccccaggagcccaccatgcctccccccgagaccccctctgaaggccgccagcccagccccagccccagccctacagagcgagcccccgcttcggaggaggagttccagtttctgcgctgccagcaatgccaggcggaagccaagtgcccgaagctgctgccttgtctgcacacgctgtgctcaggatgcctggaggcgtcgggcatgcagtgccccatctgccaggcgccctggcccctaggtgcagacacacccgccctggataacgtctttttcgagagtctgcagcggcgcctgtcggtgtaccggcagattgtggatgcgcaggctgtgtgcacccgctgcaaagagtcggccgacttctggtgctttgagtgcgagcagctcctctgcgccaagtgcttcgaggcacaccagtggttcctcaagcacgaggcccggcccctagcagagctgcgcaaccagtcggtgcgtgagttcctggacggcacccgcaagaccaacaacatcttctgctccaaccccaaccaccgcacccctacgctgaccagcatctactgccgaggatgttccaagccgctgtgctgctcgtgcgcgctccttgacagcagccacagtgagctcaagtgcgacatcagcgcagagatccagcagcgacaggaggagctggacgccatgacgcaggcgctgcaggagcaggatagtgcctttggcgcggttcacgcgcagatgcacgcggccgtcggccagctgggccgcgcgcgtgccgagaccgaggagctgatccgcgagcgcgtgcgccaggtggtagctcacgtgcgggctcaggagcgcgagctgctggaggctgtggacgcgcggtaccagcgcgactacgaggagatggccagtcggctgggccgcctggatgctgtgctgcagcgcatccgcacgggcagcgcgctggtgcagaggatgaagtgctacgcctcggaccaggaggtgctggacatgcacggtttcctgcgccaggcgctctgccgcctgcgccaggaggagccccagagcctgcaagctgccgtgcgcaccgatggcttcgacgagttcaaggtgcgcctgcaggacctcagctcttgcatcacccaggggaaagccattgagacccagagcagcagttctgaagagatagtgcccagccctccctcgccaccccctctaccccgcatctacaagccttgctttgtctgtcaggacaagtcctcaggctaccactatggggtcagcgcctgtgagggctgcaagggcttcttccgccgcagcatccagaagaacatggtgtacacgtgtcaccgggacaagaactgcatcatcaacaaggtgacccggaaccgctgccagtactgccgactgcagaagtgctttgaagtgggcatgtccaaggagtctgtgagaaacgaccgaaacaagaagaagaaggaggtgcccaagcccgagtgctctgagagctacacgctgacgccggaggtgggggagctcattgagaaggtgcgcaaagcgcaccaggaaaccttccctgccctctgccagctgggcaaatacactacgaacaacagctcagaacaacgtgtctctctggacattgacctctgggacaagttcagtgaactctccaccaagtgcatcattaagactgtggagttcgccaagcagctgcccggcttcaccaccctcaccatcgccgaccagatcaccctcctcaaggctgcctgcctggacatcctgatcctgcggatctgcacgcggtacacgcccgagcaggacaccatgaccttctcggacgggctgaccctgaaccggacccagatgcacaacgctggcttcggccccctcaccgacctggtctttgccttcgccaaccagctgctgcccctggagatggatgatgcggagacggggctgctcagcgccatctgcctcatctgcggagaccgccaggacctggagcagccggaccgggtggacatgctgcaggagccgctgctggaggcgctaaaggtctacgtgcggaagcggaggcccagccgcccccacatgttccccaagatgctaatgaagattactgacctgcgaagcatcagcgccaagggggctgagcgggtgatcacgctgaagatggagatcccgggctccatgccgcctctcatccaggaaatgttggagaactcagagggcctggacactctgagcggacagccggggggtggggggcgggacgggggtggcctggcccccccgccaggcagctgtagccccagcctcagccccagctccaacagaagcagcccggccacccactccccgtgaccgcccacgccacatggacacagccctcgccctccgccccggcttttctctgcctttctaccgaccatgtgaccccgcaccagccctgcccccacctgccctcccgggcagtactggggaccttccctgggggacggggagggaggaggcagcgactccttggacagaggcctgggccctcagtggactgcctgctcccacagcctgggctgacgtcagaggccgaggccaggaactgagtgaggcccctggtcctgggtctcaggatgggtcctgggggcctcgtgttcatcaagacacccctctgcccagctcaccacatcttcatcaccagcaaacgccaggacttggctcccccatcctcagaactcacaagccattgctccccagctggggaacctcaacctcccccctgcctcggttggtgacagagggggtgggacaggggcggggggttccccctgtacataccctgccataccaaccccaggtattaattctcgctggttttgtttttattttaatttttttgttttgatttttttaataagaattttcattttaagcaaaaaaaagctttttaatcacctgggtgcaggtgggctgagtccaaaaagagtcagcaaagggtggtgggattatcattagttcttgtaggttngggataggcggtggagttaggagcaattttttgtg

SEQ ID NO: 330955 - DNA, 668 bp, Homo sapiens
gtcgccagctgcccctggcctggcgggggcggaaccgcgcgggatccccacccccacccggaatcctcgccacggagaatccctggagaagccccggatccccggctgggaggaggaagtgctcgttgacccccagccccgcgctgatcccgcccccggcctgcggacttggggagccgctgtactctgcctcggacgccacgagactctagacgggagtcccctcgaggtgaagccgctgagttcccgggccccgccaggcttccctgggagagccgacggaccccccctcccagcacacacaacttccctgcttttcaccgggactggcggagcggccggcggacttagacgcggggacttcagggcagggggcgccccctgcccgggtcaccagtcggggcgaggggacgtctcctctcccccagctgctctgctcggatggcgccgccggctgagtgacgggggcggcgcgcaggacttcccagctcggacctcttgcgtaccggcctctcagtctgctgttgtagggggtgggagtgggcggtagggcttccactactactcgggggtgagagtcccggggtgtagtggaggtcctgtctctacctttcacttaacccgtgttgcccttgctggacaattgaaccctcccggccgcaccctcc

SEQ ID NO: 330956 - DNA, 3397 bp, Homo sapiens
tctgctccgtaccctccgccccttcagtctggggctccgggtaaagtttcagcctccgcacgtgactcgctatggccgctgccatcgccccgcgcccctgagccgcggccccctggacggctcctctcccgggaccccgcaccctgatgccgagcagcaccagggcgccgggttagggcagacgctgtgctcgctggcaccccgaacgggttgcttcccccgctgcgagcatcacaggacatggccccctcagccacctagctggggcccatctaggagtggcatcttttttggtgccctgaaggccagctctggaccttcccaggaaaagtgccagctcacagaactgcttgaccaaaggaccggctcttgagacatcccccaacccacctggcccccagctagggtgggggctccaggagactgagattagcctgccctctttggacagcagctccaggacagggcgggtgggctgaccacccaaaccccatctgggcccaggccccatgccccgaggaggggtggtctgaagcccaccagagccccctgccagactgtctgcctcccttctgactgtggccgcttggcatggccagcaacagcagctcctgcccgacacctgggggcgggcacctcaatgggtacccggtgcctccctacgccttcttcttcccccctatgctgggtggactctccccgccaggcgctctgaccactctccagcaccagcttccagttagtggatatagcacaccatccccagccaccattgagacccagagcagcagttctgaagagatagtgcccagccctccctcgccaccccctctaccccgcatctacaagccttgctttgtctgtcaggacaagtcctcaggctaccactatggggtcagcgcctgtgagggctgcaagggcttcttccgccgcagcatccagaagaacatggtgtacacgtgtcaccgggacaagaactgcatcatcaacaaggtgacccggaaccgctgccagtactgccgactgcagaagtgctttgaagtgggcatgtccaaggagtctgtgagaaacgaccgaaacaagaagaagaaggaggtgcccaagcccgagtgctctgagagctacacgctgacgccggaggtgggggagctcattgagaaggtgcgcaaagcgcaccaggaaaccttccctgccctctgccagctgggcaaatacactacgaacaacagctcagaacaacgtgtctctctggacattgacctctgggacaagttcagtgaactctccaccaagtgcatcattaagactgtggagttcgccaagcagctgcccggcttcaccaccctcaccatcgccgaccagatcaccctcctcaaggctgcctgcctggacatcctgatcctgcggatctgcacgcggtacacgcccgagcaggacaccatgaccttctcggacgggctgaccctgaaccggacccagatgcacaacgctggcttcggccccctcaccgacctggtctttgccttcgccaaccagctgctgcccctggagatggatgatgcggagacggggctgctcagcgccatctgcctcatctgcggagaccgccaggacctggagcagccggaccgggtggacatgctgcaggagccgctgctggaggcgctaaaggtctacgtgcggaagcggaggcccagccgcccccacatgttccccaagatgctaatgaagattactgacctgcgaagcatcagcgccaagggggctgagcgggtgatcacgctgaagatggagatcccgggctccatgccgcctctcatccaggaaatgttggagaactcagagggcctggacactctgagcggacagccggggggtggggggcgggacgggggtggcctggcccccccgccaggcagctgtagccccagcctcagccccagctccaacagaagcagcccggccacccactccccgtgaccgcccacgccacatggacacagccctcgccctccgccccggcttttctctgcctttctaccgaccatgtgaccccgcaccagccctgcccccacctgccctcccgggcagtactggggaccttccctgggggacggggagggaggaggcagcgactccttggacagaggcctgggccctcagtggactgcctgctcccacagcctgggctgacgtcagaggccgaggccaggaactgagtgaggcccctggtcctgggtctcaggatgggtcctgggggcctcgtgttcatcaagacacccctctgcccagctcaccacatcttcatcaccagcaaacgccaggacttggctcccccatcctcagaactcacaagccattgctccccagctggggaacctcaacctcccccctgcctcggttggtgacagagggggtgggacaggggcggggggttccccctgtacataccctgccataccaaccccaggtattaattctcgctggttttgtttttattttaatttttttgttttgatttttttaataagaattttcattttaagcacatttatactgaaggaatttgtgctgtgtattggggggagctggatccagagctggagggggtgggtccgggggagggagtggctcggaaggggcccccactctcctttcatgtccctgtgccccccagttctcctcctcagccttttcctcctcagttttctctttaaaactgtgaagtactaactttccaaggcctgccttcccctccctcccactggagaagccgccagcccctttctccctctgcctgaccactgggtgtggacggtgtggggcagccctgaaaggacaggctcctggccttggcacttgcctgcacccaccatgaggcatggagcagggcagagcaagggccccgggacagagttttcccagacctggctcctcggcagagctgcctcccgtcagggcccacatcatctaggctccccagcccccactgtgaaggggctggccaggggcccgagctgcccccacccccggcctcagccaccagcacccccatagggcccccagacaccacacacatgcgcgtgcgcacacacacaaacacacacacactggacagtagatgggccgacacacacttggcccgagttcctccatttccctggcctgccccccacccccaacctgtcccacccccgtgccccctccttaccccgcaggacgggcctacaggggggtctcccctcacccctgcacccccagctgggggagctggctctgccccgacctccttcaccaggggttggggccccttcccctggagcccgtgggtgcacctgttactgttgggctttccactgagatctactggataaagaataaagttctatttattcta

SEQ ID NO: 330957 - DNA, 3664 bp, Homo sapiens
  misc_feature (15)..(15): n is a, c, g, or t
tccacgcgcccgacncagaagcaggggggaatcctgaatcgagctgagagggcttccccggttctcctgggaaccccatcggccccctgccagcacacacctgagcagcatcacaggacatggccccctcagccacctagctggggcccatctaggagtggcatcttttttggtgccctgaaggccagctctggaccttcccaggaaaagtgccagctcacagaactgcttgaccaaaggaccggctcttgagacatcccccaacccacctggcccccagctagggtgggggctccaggagactgagattagcctgccctctttggacagcagctccaggacagggcgggtgggctgaccacccaaaccccatctgggcccaggccccatgccccgaggaggggtggtctgaagcccaccagagccccctgccagactgtctgcctcccttctgactgtggccgcttggcatggccagcaacagcagctcctgcccgacacctgggggcgggcacctcaatgggtacccggtgcctccctacgccttcttcttcccccctatgctgggtggactctccccgccaggcgctctgaccactctccagcaccagcttccagttagtggatatagcacaccatccccagccaccattgagacccagagcagcagttctgaagagatagtgcccagccctccctcgccaccccctctaccccgcatctacaagccttgctttgtctgtcaggacaagtcctcaggctaccactatggggtcagcgcctgtgagggctgcaagggcttcttccgccgcagcatccagaagaacatggtgtacacgtgtcaccgggacaagaactgcatcatcaacaaggtgacccggaaccgctgccagtactgccgactgcagaagtgctttgaagtgggcatgtccaaggagtctgtgagaaacgaccgaaacaagaagaagaaggaggtgcccaagcccgagtgctctgagagctacacgctgacgccggaggtgggggagctcattgagaaggtgcgcaaagcgcaccaggaaaccttccctgccctctgccagctgggcaaatacactacgaacaacagctcagaacaacgtgtctctctggacattgacctctgggacaagttcagtgaactctccaccaagtgcatcattaagactgtggagttcgccaagcagctgcccggcttcaccaccctcaccatcgccgaccagatcaccctcctcaaggctgcctgcctggacatcctgatcctgcggatctgcacgcggtacacgcccgagcaggacaccatgaccttctcggacgggctgaccctgaaccggacccagatgcacaacgctggcttcggccccctcaccgacctggtctttgccttcgccaaccagctgctgcccctggagatggatgatgcggagacggggctgctcagcgccatctgcctcatctgcggagaccgccaggacctggagcagccggaccgggtggacatgctgcaggagccgctgctggaggcgctaaaggtctacgtgcggaagcggaggcccagccgcccccacatgttccccaagatgctaatgaagattactgacctgcgaagcatcagcgccaagggggctgagcgggtgatcacgctgaagatggagatcccgggctccatgccgcctctcatccaggaaatgttggagaactcagagggcctggacactctgagcggacagccggggggtggggggcgggacgggggtggcctggcccccccgccaggcagctgtagccccagcctcagccccagctccaacagaagcagcccggccacccactccccgtgaccgcccacgccacatggacacagccctcgccctccgccccggcttttctctgcctttctaccgaccatgtgaccccgcaccagccctgcccccacctgccctcccgggcagtactggggaccttccctgggggacggggagggaggaggcagcgactccttggacagaggcctgggccctcagtggactgcctgctcccacagcctgggctgacgtcagaggccgaggccaggaactgagtgaggcccctggtcctgggtctcaggatgggtcctgggggcctcgtgttcatcaagacacccctctgcccagctcaccacatcttcatcaccagcaaacgccaggacttggctcccccatcctcagaactcacaagccattgctccccagctggggaacctcaacctcccccctgcctcggttggtgacagagggggtgggacaggggcggggggttccccctgtacataccctgccataccaaccccaggtattaattctcgctggttttgtttttattttaatttttttgttttgatttttttaataagaattttcattttaagcacatttatactgaaggaatttgtgctgtgtattggggggagctggatccagagctggagggggtgggtccgggggagggagtggctcggaaggggcccccactctcctttcatgtccctgtgccccccagttctcctcctcagccttttcctcctcagttttctctttaaaactgtgaagtactaactttccaaggcctgccttcccctccctcccactggagaagccgccagcccctttctccctctgcctgaccactgggtgtggacggtgtggggcagccctgaaaggacaggctcctggccttggcacttgcctgcacccaccatgaggcatggagcagggcagagcaagggccccgggacagagttttcccagacctggctcctcggcagagctgcctcccgtcagggcccacatcatctaggctccccagcccccactgtgaaggggctggccaggggcccgagctgcccccacccccggcctcagccaccagcacccccatagggcccccagacaccacacacatgcgcgtgcgcacacacacaaacacacacacactggacagtagatgggccgacacacacttggcccgagttcctccatttccctggcctgccccccacccccaacctgtcccacccccgtgccccctccttaccccgcaggacgggcctacaggggggtctcccctcacccctgcacccccagctgggggagctggctctgccccgacctccttcaccaggggttggggccccttcccctggagcccgtgggtgcacctgttactgttgggctttccactgagatctactggataaagaataaagttctatttattctaaaaaaaaaaaaaaaaaaacaaaaaaataccaaaaaaataccacacaaacaaactctacttcacctctcctcccttccaacttaacctattaaatccctctttccacctcataaacaaaaaaaaaaactctggggggggccccggacccacatttccctttaggggcgctttaaatatccaggccctcttttaaaacctcggaactggaaaacccctgcgttcaaaacttattccgttggaaccatatccctttccccgtctgccattttccggccccgttattttcgtcaaatccccttaaattctggcaaaccattttttcttacccaaggcgcaaatggccaatcttttaaaccaagataaccgctaagggtaggttttgtcctct

SEQ ID NO: 330958 - DNA, 3421 bp, Homo sapiens
aattccctcctggagcccccaccctagctgggggccaggtgggttgggggatgtctcaagagccggtcctttggtcaagcagttctgtgagctggcacttttcctgggaaggtccagagctggccttcagggcaccaaaaaagatgccactcctagatgggccccagctaggtggctgagggggccatgtcctgtgatgctcgcagcgggggaagcaacccgttcggggtgccagcgagcacagctcctgcccgacacctgggggcgggcacctcaatgggtacccggtgcctccctacgccttcttcttcccccctatgctgggtggactctccccgccaggcgctctgaccactctccagcaccagcttccagttagtggatatagcacaccatccccagccaccattgagacccagagcagcagttctgaagagatagtgcccagccctccctcgccaccccctctaccccgcatctacaagccttgctttgtctgtcaggacaagtcctcaggctaccactatggggtcagcgcctgtgagggctgcaagggcttcttccgccgcagcatccagaagaacatggtgtacacgtgtcaccgggacaagaactgcatcatcaacaaggtgacccggaaccgctgccagtactgccgactgcagaagtgctttgaagtgggcatgtccaaggagtctgtgagaaacgaccgaaacaagaagaagaaggaggtgcccaagcccgagtgctctgagagctacacgctgacgccggaggtgggggagctcattgagaaggtgcgcaaagcgcaccaggaaaccttccctgccctctgccagctgggcaaatacactacgaacaacagctcagaacaacgtgtctctctggacattgacctctgggacaagttcagtgaactctccaccaagtgcatcattaagactgtggagttcgccaagcagctgcccggcttcaccaccctcaccatcgccgaccagatcaccctcctcaaggctgcctgcctggacatcctgatcctgcggatctgcacgcggtacacgcccgagcaggacaccatgaccttctcggacgggctgaccctgaaccggacccagatgcacaacgctggcttcggccccctcaccgacctggtctttgccttcgccaaccagctgctgcccctggagatggatgatgcggagacggggctgctcagcgccatctgcctcatctgcggagaccgccaggacctggagcagccggaccgggtggacatgctgcaggagccgctgctggaggcgctaaaggtctacgtgcggaagcggaggcccagccgcccccacatgttccccaagatgctaatgaagattactgacctgcgaagcatcagcgccaagggggctgagcgggtgatcacgctgaagatggagatcccgggctccatgccgcctctcatccaggaaatgttggagaactcagagggcctggacactctgagcggacagccggggggtggggggcgggacgggggtggcctggcccccccgccaggcagctgtagccccagcctcagccccagctccaacagaagcagcccggccacccactccccgtgaccgcccacgccacatggacacagccctcgccctccgccccggcttttctctgcctttctaccgaccatgtgaccccgcaccagccctgcccccacctgccctcccgggcagtactggggaccttccctgggggacggggagggaggaggcagcgactccttggacagaggcctgggccctcagtggactgcctgctcccacagcctgggctgacgtcagaggccgaggccaggaactgagtgaggcccctggtcctgggtctcaggatgggtcctgggggcctcgtgttcatcaagacacccctctgcccagctcaccacatcttcatcaccagcaaacgccaggacttggctcccccatcctcagaactcacaagccattgctccccagctggggaacctcaacctcccccctgcctcggttggtgacagagggggtgggacaggggcggggggttccccctgtacataccctgccataccaaccccaggtattaattctcgctggttttgtttttattttaatttttttgttttgatttttttaataagaattttcattttaagcacatttatactgaaggaatttgtgctgtgtattggggggagctggatccagagctggagggggtgggtccgggggagggagtggctcggaaggggcccccactctcctttcatgtccctgtgccccccagttctcctcctcagccttttcctcctcagttttctctttaaaactgtgaagtactaactttccaaggcctgccttcccctccctcccactggagaagccgccagcccctttctccctctgcctgaccactgggtgtggacggtgtggggcagccctgaaaggacaggctcctggccttggcacttgcctgcacccaccatgaggcatggagcagggcagagcaagggccccgggacagagttttcccagacctggctcctcggcagagctgcctcccgtcagggcccacatcatctaggctccccagcccccactgtgaaggggctggccaggggcccgagctgcccccacccccggcctcagccaccagcacccccatagggcccccagacaccacacacatgcgcgtgcgcacacacacaaacacacacacactggacagtagatgggccgacacacacttggcccgagttcctccatttccctggcctgccccccacccccaacctgtcccacccccgtgccccctccttaccccgcaggacgggcctacaggggggtctcccctcacccctgcacccccagctgggggagctggctctgccccgacctccttcaccaggggttggggccccttcccctggagcccgtgggtgcacctgttactgttgggctttccactgagatctactggataaagaataaagttctatttattctaaaaaaaaaaaaaaaaaaacaaaaaaataccaaaaaaataccacacaaacaaactctacttcacctctcctcccttccaacttaacctattaaatccctctttccacctcataaacaaaaaaaaaaactctggggggggccccggacccacatttccctttaggggcgctttaaatatccaggccctcttttaaaacctcggaactggaaaacccctgcgttcaaaacttattccgttggaaccatatccctttccccgtctgccattttccggccccgttattttcgtcaaatccccttaaattctggcaaaccattttttcttacccaaggcgcaaatggccaatcttttaaaccaagataaccgctaagggtaggttttgtcctct

SEQ ID NO: 330959 - DNA, 3451 bp, Homo sapiens
ccgtcctgcgcggttgttctctggagcagcgttcttttatctccgtccgccttctctcctacctaagtgcgtgccgccacccgatggaagattcgatggacatggacatgagccccctgaggccccagaactatcttttcggttgtgaactaaaggccgacaaagattatcactttaaggtggataatgatgaaaatgagcaccagttatctttaagaacggtcagtttaggggctggtgcaaaggatgagttgcacattgttgaagcagaggcaatgaattacgaaggcagtccaattaaagtaacactggcaactttgaaaatgtctgtacagccaacggtttcccttgggggctttgaaataacaccaccagtggtcttaaggttgaagtgtggttcagggccagtgcatattagtggacagcacttagtagccattgagacccagagcagcagttctgaagagatagtgcccagccctccctcgccaccccctctaccccgcatctacaagccttgctttgtctgtcaggacaagtcctcaggctaccactatggggtcagcgcctgtgagggctgcaagggcttcttccgccgcagcatccagaagaacatggtgtacacgtgtcaccgggacaagaactgcatcatcaacaaggtgacccggaaccgctgccagtactgccgactgcagaagtgctttgaagtgggcatgtccaaggagtctgtgagaaacgaccgaaacaagaagaagaaggaggtgcccaagcccgagtgctctgagagctacacgctgacgccggaggtgggggagctcattgagaaggtgcgcaaagcgcaccaggaaaccttccctgccctctgccagctgggcaaatacactacgaacaacagctcagaacaacgtgtctctctggacattgacctctgggacaagttcagtgaactctccaccaagtgcatcattaagactgtggagttcgccaagcagctgcccggcttcaccaccctcaccatcgccgaccagatcaccctcctcaaggctgcctgcctggacatcctgatcctgcggatctgcacgcggtacacgcccgagcaggacaccatgaccttctcggacgggctgaccctgaaccggacccagatgcacaacgctggcttcggccccctcaccgacctggtctttgccttcgccaaccagctgctgcccctggagatggatgatgcggagacggggctgctcagcgccatctgcctcatctgcggagaccgccaggacctggagcagccggaccgggtggacatgctgcaggagccgctgctggaggcgctaaaggtctacgtgcggaagcggaggcccagccgcccccacatgttccccaagatgctaatgaagattactgacctgcgaagcatcagcgccaagggggctgagcgggtgatcacgctgaagatggagatcccgggctccatgccgcctctcatccaggaaatgttggagaactcagagggcctggacactctgagcggacagccggggggtggggggcgggacgggggtggcctggcccccccgccaggcagctgtagccccagcctcagccccagctccaacagaagcagcccggccacccactccccgtgaccgcccacgccacatggacacagccctcgccctccgccccggcttttctctgcctttctaccgaccatgtgaccccgcaccagccctgcccccacctgccctcccgggcagtactggggaccttccctgggggacggggagggaggaggcagcgactccttggacagaggcctgggccctcagtggactgcctgctcccacagcctgggctgacgtcagaggccgaggccaggaactgagtgaggcccctggtcctgggtctcaggatgggtcctgggggcctcgtgttcatcaagacacccctctgcccagctcaccacatcttcatcaccagcaaacgccaggacttggctcccccatcctcagaactcacaagccattgctccccagctggggaacctcaacctcccccctgcctcggttggtgacagagggggtgggacaggggcggggggttccccctgtacataccctgccataccaaccccaggtattaattctcgctggttttgtttttattttaatttttttgttttgatttttttaataagaattttcattttaagcacatttatactgaaggaatttgtgctgtgtattggggggagctggatccagagctggagggggtgggtccgggggagggagtggctcggaaggggcccccactctcctttcatgtccctgtgccccccagttctcctcctcagccttttcctcctcagttttctctttaaaactgtgaagtactaactttccaaggcctgccttcccctccctcccactggagaagccgccagcccctttctccctctgcctgaccactgggtgtggacggtgtggggcagccctgaaaggacaggctcctggccttggcacttgcctgcacccaccatgaggcatggagcagggcagagcaagggccccgggacagagttttcccagacctggctcctcggcagagctgcctcccgtcagggcccacatcatctaggctccccagcccccactgtgaaggggctggccaggggcccgagctgcccccacccccggcctcagccaccagcacccccatagggcccccagacaccacacacatgcgcgtgcgcacacacacaaacacacacacactggacagtagatgggccgacacacacttggcccgagttcctccatttccctggcctgccccccacccccaacctgtcccacccccgtgccccctccttaccccgcaggacgggcctacaggggggtctcccctcacccctgcacccccagctgggggagctggctctgccccgacctccttcaccaggggttggggccccttcccctggagcccgtgggtgcacctgttactgttgggctttccactgagatctactggataaagaataaagttctatttattctaaaaaaaaaaaaaaaaaaacaaaaaaataccaaaaaaataccacacaaacaaactctacttcacctctcctcccttccaacttaacctattaaatccctctttccacctcataaacaaaaaaaaaaactctggggggggccccggacccacatttccctttaggggcgctttaaatatccaggccctcttttaaaacctcggaactggaaaacccctgcgttcaaaacttattccgttggaaccatatccctttccccgtctgccattttccggccccgttattttcgtcaaatccccttaaattctggcaaaccattttttcttacccaaggcgcaaatggccaatcttttaaaccaagataaccgctaagggtaggttttgtcctct

SEQ ID NO: 330960 - DNA, 3056 bp, Homo sapiens
cccaacagcaaccacgtggccagtggcgccggggaggcagccattgagacccagagcagcagttctgaagagatagtgcccagccctccctcgccaccccctctaccccgcatctacaagccttgctttgtctgtcaggacaagtcctcaggctaccactatggggtcagcgcctgtgagggctgcaagggcttcttccgccgcagcatccagaagaacatggtgtacacgtgtcaccgggacaagaactgcatcatcaacaaggtgacccggaaccgctgccagtactgccgactgcagaagtgctttgaagtgggcatgtccaaggagtctgtgagaaacgaccgaaacaagaagaagaaggaggtgcccaagcccgagtgctctgagagctacacgctgacgccggaggtgggggagctcattgagaaggtgcgcaaagcgcaccaggaaaccttccctgccctctgccagctgggcaaatacactacgaacaacagctcagaacaacgtgtctctctggacattgacctctgggacaagttcagtgaactctccaccaagtgcatcattaagactgtggagttcgccaagcagctgcccggcttcaccaccctcaccatcgccgaccagatcaccctcctcaaggctgcctgcctggacatcctgatcctgcggatctgcacgcggtacacgcccgagcaggacaccatgaccttctcggacgggctgaccctgaaccggacccagatgcacaacgctggcttcggccccctcaccgacctggtctttgccttcgccaaccagctgctgcccctggagatggatgatgcggagacggggctgctcagcgccatctgcctcatctgcggagaccgccaggacctggagcagccggaccgggtggacatgctgcaggagccgctgctggaggcgctaaaggtctacgtgcggaagcggaggcccagccgcccccacatgttccccaagatgctaatgaagattactgacctgcgaagcatcagcgccaagggggctgagcgggtgatcacgctgaagatggagatcccgggctccatgccgcctctcatccaggaaatgttggagaactcagagggcctggacactctgagcggacagccggggggtggggggcgggacgggggtggcctggcccccccgccaggcagctgtagccccagcctcagccccagctccaacagaagcagcccggccacccactccccgtgaccgcccacgccacatggacacagccctcgccctccgccccggcttttctctgcctttctaccgaccatgtgaccccgcaccagccctgcccccacctgccctcccgggcagtactggggaccttccctgggggacggggagggaggaggcagcgactccttggacagaggcctgggccctcagtggactgcctgctcccacagcctgggctgacgtcagaggccgaggccaggaactgagtgaggcccctggtcctgggtctcaggatgggtcctgggggcctcgtgttcatcaagacacccctctgcccagctcaccacatcttcatcaccagcaaacgccaggacttggctcccccatcctcagaactcacaagccattgctccccagctggggaacctcaacctcccccctgcctcggttggtgacagagggggtgggacaggggcggggggttccccctgtacataccctgccataccaaccccaggtattaattctcgctggttttgtttttattttaatttttttgttttgatttttttaataagaattttcattttaagcacatttatactgaaggaatttgtgctgtgtattggggggagctggatccagagctggagggggtgggtccgggggagggagtggctcggaaggggcccccactctcctttcatgtccctgtgccccccagttctcctcctcagccttttcctcctcagttttctctttaaaactgtgaagtactaactttccaaggcctgccttcccctccctcccactggagaagccgccagcccctttctccctctgcctgaccactgggtgtggacggtgtggggcagccctgaaaggacaggctcctggccttggcacttgcctgcacccaccatgaggcatggagcagggcagagcaagggccccgggacagagttttcccagacctggctcctcggcagagctgcctcccgtcagggcccacatcatctaggctccccagcccccactgtgaaggggctggccaggggcccgagctgcccccacccccggcctcagccaccagcacccccatagggcccccagacaccacacacatgcgcgtgcgcacacacacaaacacacacacactggacagtagatgggccgacacacacttggcccgagttcctccatttccctggcctgccccccacccccaacctgtcccacccccgtgccccctccttaccccgcaggacgggcctacaggggggtctcccctcacccctgcacccccagctgggggagctggctctgccccgacctccttcaccaggggttggggccccttcccctggagcccgtgggtgcacctgttactgttgggctttccactgagatctactggataaagaataaagttctatttattctaaaaaaaaaaaaaaaaaaacaaaaaaataccaaaaaaataccacacaaacaaactctacttcacctctcctcccttccaacttaacctattaaatccctctttccacctcataaacaaaaaaaaaaactctggggggggccccggacccacatttccctttaggggcgctttaaatatccaggccctcttttaaaacctcggaactggaaaacccctgcgttcaaaacttattccgttggaaccatatccctttccccgtctgccattttccggccccgttattttcgtcaaatccccttaaattctggcaaaccattttttcttacccaaggcgcaaatggccaatcttttaaaccaagataaccgctaagggtaggttttgtcctct

SEQ ID NO: 330961 - DNA, 3206 bp, Homo sapiens
ttctacagcacgcggtctgctcctgcttcccaggctagcctgcgagccacctcctctactcagtctctagctcgcctgggttctcccgattatggcaactcagccctgctcagcttgcctggctaccgccccaccactcgcagttctgctcgtcgttcccaggccggggtgtccagtggggcccctccagccattgagacccagagcagcagttctgaagagatagtgcccagccctccctcgccaccccctctaccccgcatctacaagccttgctttgtctgtcaggacaagtcctcaggctaccactatggggtcagcgcctgtgagggctgcaagggcttcttccgccgcagcatccagaagaacatggtgtacacgtgtcaccgggacaagaactgcatcatcaacaaggtgacccggaaccgctgccagtactgccgactgcagaagtgctttgaagtgggcatgtccaaggagtctgtgagaaacgaccgaaacaagaagaagaaggaggtgcccaagcccgagtgctctgagagctacacgctgacgccggaggtgggggagctcattgagaaggtgcgcaaagcgcaccaggaaaccttccctgccctctgccagctgggcaaatacactacgaacaacagctcagaacaacgtgtctctctggacattgacctctgggacaagttcagtgaactctccaccaagtgcatcattaagactgtggagttcgccaagcagctgcccggcttcaccaccctcaccatcgccgaccagatcaccctcctcaaggctgcctgcctggacatcctgatcctgcggatctgcacgcggtacacgcccgagcaggacaccatgaccttctcggacgggctgaccctgaaccggacccagatgcacaacgctggcttcggccccctcaccgacctggtctttgccttcgccaaccagctgctgcccctggagatggatgatgcggagacggggctgctcagcgccatctgcctcatctgcggagaccgccaggacctggagcagccggaccgggtggacatgctgcaggagccgctgctggaggcgctaaaggtctacgtgcggaagcggaggcccagccgcccccacatgttccccaagatgctaatgaagattactgacctgcgaagcatcagcgccaagggggctgagcgggtgatcacgctgaagatggagatcccgggctccatgccgcctctcatccaggaaatgttggagaactcagagggcctggacactctgagcggacagccggggggtggggggcgggacgggggtggcctggcccccccgccaggcagctgtagccccagcctcagccccagctccaacagaagcagcccggccacccactccccgtgaccgcccacgccacatggacacagccctcgccctccgccccggcttttctctgcctttctaccgaccatgtgaccccgcaccagccctgcccccacctgccctcccgggcagtactggggaccttccctgggggacggggagggaggaggcagcgactccttggacagaggcctgggccctcagtggactgcctgctcccacagcctgggctgacgtcagaggccgaggccaggaactgagtgaggcccctggtcctgggtctcaggatgggtcctgggggcctcgtgttcatcaagacacccctctgcccagctcaccacatcttcatcaccagcaaacgccaggacttggctcccccatcctcagaactcacaagccattgctccccagctggggaacctcaacctcccccctgcctcggttggtgacagagggggtgggacaggggcggggggttccccctgtacataccctgccataccaaccccaggtattaattctcgctggttttgtttttattttaatttttttgttttgatttttttaataagaattttcattttaagcacatttatactgaaggaatttgtgctgtgtattggggggagctggatccagagctggagggggtgggtccgggggagggagtggctcggaaggggcccccactctcctttcatgtccctgtgccccccagttctcctcctcagccttttcctcctcagttttctctttaaaactgtgaagtactaactttccaaggcctgccttcccctccctcccactggagaagccgccagcccctttctccctctgcctgaccactgggtgtggacggtgtggggcagccctgaaaggacaggctcctggccttggcacttgcctgcacccaccatgaggcatggagcagggcagagcaagggccccgggacagagttttcccagacctggctcctcggcagagctgcctcccgtcagggcccacatcatctaggctccccagcccccactgtgaaggggctggccaggggcccgagctgcccccacccccggcctcagccaccagcacccccatagggcccccagacaccacacacatgcgcgtgcgcacacacacaaacacacacacactggacagtagatgggccgacacacacttggcccgagttcctccatttccctggcctgccccccacccccaacctgtcccacccccgtgccccctccttaccccgcaggacgggcctacaggggggtctcccctcacccctgcacccccagctgggggagctggctctgccccgacctccttcaccaggggttggggccccttcccctggagcccgtgggtgcacctgttactgttgggctttccactgagatctactggataaagaataaagttctatttattctaaaaaaaaaaaaaaaaaaacaaaaaaataccaaaaaaataccacacaaacaaactctacttcacctctcctcccttccaacttaacctattaaatccctctttccacctcataaacaaaaaaaaaaactctggggggggccccggacccacatttccctttaggggcgctttaaatatccaggccctcttttaaaacctcggaactggaaaacccctgcgttcaaaacttattccgttggaaccatatccctttccccgtctgccattttccggccccgttattttcgtcaaatccccttaaattctggcaaaccattttttcttacccaaggcgcaaatggccaatcttttaaaccaagataaccgctaagggtaggttttgtcctct

SEQ ID NO: 330962 - DNA, 2984 bp, Homo sapiens
  misc_feature (2949)..(2949): n is a, c, g, or t
tggaactacactcctttctactctttgcctgattaacttacaaactttctcttatggtaggtctgttttatttgagttcttccctaatttagttaaacctaaattaggtacctatgttaattcttcagagcataatagcatttatctcagtttgcaattgtgtgtgcatacagtgattatttgcttaatggctgttgctccctaaggtctacaagggcaggttccccagggtgtccacatagaaggtgctcagaaaaataccttgaattggcctagcttggtaagaacatgggctttggcagcaggaagttcaaatacctgctctactctttattattagtaatgtgatcttggacaacccacatagccttgctgagacctgttttatttgtaaaacatctcttggagttgctgtgaggataaaatgacaacatatataaagagccaggcttcttctagaagaatgtccttgggtagcatgtacatttccatccttccttttagagagtgggggtaataggataccccctcctccaggggtatcccctctttctagggacctacccaagctaggcctttcttccagtgaaacgtgcatcccgagggcttctaggatgaagtagtccactggaaggcaccagctcttccttttatctctccagagctggacagtgcaccaggggccggtactggttccccagctaggagacaccttgggcggggctttgctcgccggaagcacgcagagcgtggggaggagggccccctctgcctgtgtttgtgccaacagcacccgcgctgccgcgtcgggttccggcggccggagtcacacatgatgtcacagacaatgacacaagccggtgtctcattccgacacagcgtccgagctgcacaatgtcacacccgggtgccaaacacttggccccgcgcgacccggccctacgcctcctgccgccgctctccgcgtctccgggggaggtggcccggttcggccgggcagggggctggcgggcgagccccgcgggcgggctggcgagcgggtgatgtcacgggcagcggtgggtgggtcactcggagccattgagacccagagcagcagttctgaagagatagtgcccagccctccctcgccaccccctctaccccgcatctacaagccttgctttgtctgtcaggacaagtcctcaggctaccactatggggtcagcgcctgtgagggctgcaagggcttcttccgccgcagcatccagaagaacatggtgtacacgtgtcaccgggacaagaactgcatcatcaacaaggtgacccggaaccgctgccagtactgccgactgcagaagtgctttgaagtgggcatgtccaaggagtctgtgagaaacgaccgaaacaagaagaagaaggaggtgcccaagcccgagtgctctgagagctacacgctgacgccggaggtgggggagctcattgagaaggtgcgcaaagcgcaccaggaaaccttccctgccctctgccagctgggcaaatacactacgaacaacagctcagaacaacgtgtctctctggacattgacctctgggacaagttcagtgaactctccaccaagtgcatcattaagactgtggagttcgccaagcagctgcccggcttcaccaccctcaccatcgccgaccagatcaccctcctcaaggctgcctgcctggacatcctgatcctgcggatctgcacgcggtacacgcccgagcaggacaccatgaccttctcggacgggctgaccctgaaccggacccagatgcacaacgctggcttcggccccctcaccgacctggtctttgccttcgccaaccagctgctgcccctggagatggatgatgcggagacggggctgctcagcgccatctgcctcatctgcggagaccgccaggacctggagcagccggaccgggtggacatgctgcaggagccgctgctggaggcgctaaaggtctacgtgcggaagcggaggcccagccgcccccacatgttccccaagatgctaatgaagattactgacctgcgaagcatcagcgccaagggggctgagcgggtgatcacgctgaagatggagatcccgggctccatgccgcctctcatccaggaaatgttggagaactcagagggcctggacactctgagcggacagccggggggtggggggcgggacgggggtggcctggcccccccgccaggcagctgtagccccagcctcagccccagctccaacagaagcagcccggccacccactccccgtgaccgcccacgccacatggacacagccctcgccctccgccccggcttttctctgcctttctaccgaccatgtgaccccgcaccagccctgcccccacctgccctcccgggcagtactggggaccttccctgggggacggggagggaggaggcagcgactccttggacagaggcctgggccctcagtggactgcctgctcccacagcctgggctgacgtcagaggccgaggccaggaactgagtgaggcccctggtcctgggtctcaggatgggtcctgggggcctcgtgttcatcaagacacccctctgcccagctcaccacatcttcatcaccagcaaacgccaggacttggctcccccatcctcagaactcacaagccattgctccccagctggggaacctcaacctcccccctgcctcggttggtgacagagggggtgggacaggggcggggggttccccctgtacataccctgccataccaaccccaggtattaattctcgctggttttgtttttattttaatttttttgttttgatttttttaataagaattttcattttaagcaaaaaaaagctttttaatcacctgggtgcaggtgggctgagtccaaaaagagtcagcaaagggtggtgggattatcattagttcttgtaggttngggataggcggtggagttaggagcaattttttgtg

SEQ ID NO: 330963 - DNA, 3201 bp, Homo sapiens
ctcggtaccctgtagctgcacagaggtcacgctcaggtggtccttgaacagcgctcttcccacttgagggcgtccaggtgaaggtgacacctgaggcatctctcaggccggtcagtgtgcacgtgaggttcgcttctgaacctaagagcaggtcctcgagggccggtcggtgcagtgacagtcgggggtggcagcatgagggtcatgcggctggctatggggtggggtggggggtgtgtgcagggccacagctgtgctcatggggcttctggggcagaacttgatgtgtgggttgggtgggcatggagggctggagtgcgtggcaatgccttgcctgcccgtgaacgcgtgctgtgtgcgcgtgcttacaagcctgggtgacctcctcagcagctggcagctctctgtcaggctgggggtggacgaggccctgagcagcctgcagctgccctcttaaccccctctgccctccacagctgtgagaaacgaccgaaacaagaagaagaaggaggtgcccaagcccgagtgctctgagagctacacgctgacgccggaggtgggggagctcattgagaaggtgcgcaaagcgcaccaggaaaccttccctgccctctgccagctgggcaaatacactacgaacaacagctcagaacaacgtgtctctctggacattgacctctgggacaagttcagtgaactctccaccaagtgcatcattaagactgtggagttcgccaagcagctgcccggcttcaccaccctcaccatcgccgaccagatcaccctcctcaaggctgcctgcctggacatcctgatcctgcggatctgcacgcggtacacgcccgagcaggacaccatgaccttctcggacgggctgaccctgaaccggacccagatgcacaacgctggcttcggccccctcaccgacctggtctttgccttcgccaaccagctgctgcccctggagatggatgatgcggagacggggctgctcagcgccatctgcctcatctgcggagaccgccaggacctggagcagccggaccgggtggacatgctgcaggagccgctgctggaggcgctaaaggtctacgtgcggaagcggaggcccagccgcccccacatgttccccaagatgctaatgaagattactgacctgcgaagcatcagcgccaagggggctgagcgggtgatcacgctgaagatggagatcccgggctccatgccgcctctcatccaggaaatgttggagaactcagagggcctggacactctgagcggacagccggggggtggggggcgggacgggggtggcctggcccccccgccaggcagctgtagccccagcctcagccccagctccaacagaagcagcccggccacccactccccgtgaccgcccacgccacatggacacagccctcgccctccgccccggcttttctctgcctttctaccgaccatgtgaccccgcaccagccctgcccccacctgccctcccgggcagtactggggaccttccctgggggacggggagggaggaggcagcgactccttggacagaggcctgggccctcagtggactgcctgctcccacagcctgggctgacgtcagaggccgaggccaggaactgagtgaggcccctggtcctgggtctcaggatgggtcctgggggcctcgtgttcatcaagacacccctctgcccagctcaccacatcttcatcaccagcaaacgccaggacttggctcccccatcctcagaactcacaagccattgctccccagctggggaacctcaacctcccccctgcctcggttggtgacagagggggtgggacaggggcggggggttccccctgtacataccctgccataccaaccccaggtattaattctcgctggttttgtttttattttaatttttttgttttgatttttttaataagaattttcattttaagcacatttatactgaaggaatttgtgctgtgtattggggggagctggatccagagctggagggggtgggtccgggggagggagtggctcggaaggggcccccactctcctttcatgtccctgtgccccccagttctcctcctcagccttttcctcctcagttttctctttaaaactgtgaagtactaactttccaaggcctgccttcccctccctcccactggagaagccgccagcccctttctccctctgcctgaccactgggtgtggacggtgtggggcagccctgaaaggacaggctcctggccttggcacttgcctgcacccaccatgaggcatggagcagggcagagcaagggccccgggacagagttttcccagacctggctcctcggcagagctgcctcccgtcagggcccacatcatctaggctccccagcccccactgtgaaggggctggccaggggcccgagctgcccccacccccggcctcagccaccagcacccccatagggcccccagacaccacacacatgcgcgtgcgcacacacacaaacacacacacactggacagtagatgggccgacacacacttggcccgagttcctccatttccctggcctgccccccacccccaacctgtcccacccccgtgccccctccttaccccgcaggacgggcctacaggggggtctcccctcacccctgcacccccagctgggggagctggctctgccccgacctccttcaccaggggttggggccccttcccctggagcccgtgggtgcacctgttactgttgggctttccactgagatctactggataaagaataaagttctatttattctaaaaaaaaaaaaaaaaaaacaaaaaaataccaaaaaaataccacacaaacaaactctacttcacctctcctcccttccaacttaacctattaaatccctctttccacctcataaacaaaaaaaaaaactctggggggggccccggacccacatttccctttaggggcgctttaaatatccaggccctcttttaaaacctcggaactggaaaacccctgcgttcaaaacttattccgttggaaccatatccctttccccgtctgccattttccggccccgttattttcgtcaaatccccttaaattctggcaaaccattttttcttacccaaggcgcaaatggccaatcttttaaaccaagataaccgctaagggtaggttttgtcctct

SEQ ID NO: 330964 - DNA, 4076 bp, Homo sapiens
tggaactacactcctttctactctttgcctgattaacttacaaactttctcttatggtaggtctgttttatttgagttcttccctaatttagttaaacctaaattaggtacctatgttaattcttcagagcataatagcatttatctcagtttgcaattgtgtgtgcatacagtgattatttgcttaatggctgttgctccctaaggtctacaagggcaggttccccagggtgtccacatagaaggtgctcagaaaaataccttgaattggcctagcttggtaagaacatgggctttggcagcaggaagttcaaatacctgctctactctttattattagtaatgtgatcttggacaacccacatagccttgctgagacctgttttatttgtaaaacatctcttggagttgctgtgaggataaaatgacaacatatataaagagccaggcttcttctagaagaatgtccttgggtagcatgtacatttccatccttccttttagagagtgggggtaataggataccccctcctccaggggtatcccctctttctagggacctacccaagctaggcctttcttccagtgaaacgtgcatcccgagggcttctaggatgaagtagtccactggaaggcaccagctcttccttttatctctccagagctggacagtgcaccaggggccggtactggttccccagctaggagacaccttgggcggggctttgctcgccggaagcacgcagagcgtggggaggagggccccctctgcctgtgtttgtgccaacagcacccgcgctgccgcgtcgggttccggcggccggagtcacacatgatgtcacagacaatgacacaagccggtgtctcattccgacacagcgtccgagctgcacaatgtcacacccgggtgccaaacacttggccccgcgcgacccggccctacgcctcctgccgccgctctccgcgtctccgggggaggtggcccggttcggccgggcagggggctggcgggcgagccccgcgggcgggctggcgagcgggtgatgtcacgggcagcggtgggtgggtcactcggagccattgagacccagagcagcagttctgaagagatagtgcccagccctccctcgccaccccctctaccccgcatctacaagccttgctttgtctgtcaggacaagtcctcaggctaccactatggggtcagcgcctgtgagggctgcaagggcttcttccgccgcagcatccagaagaacatggtgtacacgtgtcaccgggacaagaactgcatcatcaacaaggtgacccggaaccgctgccagtactgccgactgcagaagtgctttgaagtgggcatgtccaaggagtctgtgagaaacgaccgaaacaagaagaagaaggaggtgcccaagcccgagtgctctgagagctacacgctgacgccggaggtgggggagctcattgagaaggtgcgcaaagcgcaccaggaaaccttccctgccctctgccagctgggcaaatacactacgaacaacagctcagaacaacgtgtctctctggacattgacctctgggacaagttcagtgaactctccaccaagtgcatcattaagactgtggagttcgccaagcagctgcccggcttcaccaccctcaccatcgccgaccagatcaccctcctcaaggctgcctgcctggacatcctgatcctgcggatctgcacgcggtacacgcccgagcaggacaccatgaccttctcggacgggctgaccctgaaccggacccagatgcacaacgctggcttcggccccctcaccgacctggtctttgccttcgccaaccagctgctgcccctggagatggatgatgcggagacggggctgctcagcgccatctgcctcatctgcggagaccgccaggacctggagcagccggaccgggtggacatgctgcaggagccgctgctggaggcgctaaaggtctacgtgcggaagcggaggcccagccgcccccacatgttccccaagatgctaatgaagattactgacctgcgaagcatcagcgccaagggggctgagcgggtgatcacgctgaagatggagatcccgggctccatgccgcctctcatccaggaaatgttggagaactcagagggcctggacactctgagcggacagccggggggtggggggcgggacgggggtggcctggcccccccgccaggcagctgtagccccagcctcagccccagctccaacagaagcagcccggccacccactccccgtgaccgcccacgccacatggacacagccctcgccctccgccccggcttttctctgcctttctaccgaccatgtgaccccgcaccagccctgcccccacctgccctcccgggcagtactggggaccttccctgggggacggggagggaggaggcagcgactccttggacagaggcctgggccctcagtggactgcctgctcccacagcctgggctgacgtcagaggccgaggccaggaactgagtgaggcccctggtcctgggtctcaggatgggtcctgggggcctcgtgttcatcaagacacccctctgcccagctcaccacatcttcatcaccagcaaacgccaggacttggctcccccatcctcagaactcacaagccattgctcaacctcccccctgcctcggttggtgacagagggggtgggacaggggcggggggttccccctgtacataccctgccataccaaccccaggtattaattctcgctggttttgtttttattttaatttttttgttttgatttttttaataagaattttcattttaagcacatttatactgaaggaatttgtgctgtgtattggggggagctggatccagagctggagggggtgggtccgggggagggagtggctcggaaggggcccccactctcctttcatgtccctgtgccccccagttctcctcctcagccttttcctcctcagttttctctttaaaactgtgaagtactaactttccaaggcctgccttcccctccctcccactggagaagccgccagcccctttctccctctgcctgaccactgggtgtggacggtgtggggcagccctgaaaggacaggctcctggccttggcacttgcctgcacccaccatgaggcatggagcagggcagagcaagggccccgggacagagttttcccagacctggctcctcggcagagctgcctcccgtcagggcccacatcatctaggctccccagcccccactgtgaaggggctggccaggggcccgagctgcccccacccccggcctcagccaccagcacccccatagggcccccagacaccacacacatgcgcgtgcgcacacacacaaacacacacacactggacagtagatgggccgacacacacttggcccgagttcctccatttccctggcctgccccccacccccaacctgtcccacccccgtgccccctccttaccccgcaggacgggcctacaggggggtctcccctcacccctgcacccccagctgggggagctggctctgccccgacctccttcaccaggggttggggccccttcccctggagcccgtgggtgcacctgttactgttgggctttccactgagatctactggataaagaataaagttctatttattctaaaaaaaaaaaaaaaaaaacaaaaaaataccaaaaaaataccacacaaacaaactctacttcacctctcctcccttccaacttaacctattaaatccctctttccacctcataaacaaaaaaaaaaactctggggggggccccggacccacatttccctttaggggcgctttaaatatccaggccctcttttaaaacctcggaactggaaaacccctgcgttcaaaacttattccgttggaaccatatccctttccccgtctgccattttccggccccgttattttcgtcaaatccccttaaattctggcaaaccattttttcttacccaaggcgcaaatggccaatcttttaaaccaagataaccgctaagggtaggttttgtcctct

SEQ ID NO: 330965 - DNA, 1954 bp, Homo sapiens
tggaactacactcctttctactctttgcctgattaacttacaaactttctcttatggtaggtctgttttatttgagttcttccctaatttagttaaacctaaattaggtacctatgttaattcttcagagcataatagcatttatctcagtttgcaattgtgtgtgcatacagtgattatttgcttaatggctgttgctccctaaggtctacaagggcaggttccccagggtgtccacatagaaggtgctcagaaaaataccttgaattggcctagcttggtaagaacatgggctttggcagcaggaagttcaaatacctgctctactctttattattagtaatgtgatcttggacaacccacatagccttgctgagacctgttttatttgtaaaacatctcttggagttgctgtgaggataaaatgacaacatatataaagagccaggcttcttctagaagaatgtccttgggtagcatgtacatttccatccttccttttagagagtgggggtaataggataccccctcctccaggggtatcccctctttctagggacctacccaagctaggcctttcttccagtgaaacgtgcatcccgagggcttctaggatgaagtagtccactggaaggcaccagctcttccttttatctctccagagctggacagtgcaccaggggccggtactggttccccagctaggagacaccttgggcggggctttgctcgccggaagcacgcagagcgtggggaggagggccccctctgcctgtgtttgtgccaacagcacccgcgctgccgcgtcgggttccggcggccggagtcacacatgatgtcacagacaatgacacaagccggtgtctcattccgacacagcgtccgagctgcacaatgtcacacccgggtgccaaacacttggccccgcgcgacccggccctacgcctcctgccgccgctctccgcgtctccgggggaggtggcccggttcggccgggcagggggctggcgggcgagccccgcgggcgggctggcgagcgggtgatgtcacgggcagcggtgggtgggtcactcggagccattgagacccagagcagcagttctgaagagatagtgcccagccctccctcgccaccccctctaccccgcatctacaagccttgctttgtctgtcaggacaagtcctcaggctaccactatggggtcagcgcctgtgagggctgcaagggcttcttccgccgcagcatccagaagaacatggtgtacacgtgtcaccgggacaagaactgcatcatcaacaaggtgacccggaaccgctgccagtactgccgactgcagaagtgctttgaagtgggcatgtccaaggagtctgtgagaaacgaccgaaacaagaagaagaaggaggtgcccaagcccgagtgctctgagagctacacgctgacgccggaggtgggggagctcattgagaaggtgcgcaaagcgcaccaggaaaccttccctgccctctgccagctgggcaaatacactacgaacaacagctcagaacaacgtgtctctctggacattgacctctgggacaagttcagtgaactctccaccaagtgcatcattaagactgtggagttcgccaagcagctgcccggcttcaccaccctcaccatcgccgaccagatcaccctcctcaaggctgcctgcctggacatcctgatcctgcggatctgcacgcggtacacgcccgagcaggacaccatgaccttctcggacgggctgaccctgaaccggacccagatgcaaagcggtcgggcctcacgacggtctgcttcgcagcagtgtgcccgagagtgtgcggaggggggcaggcatgccactggaacgcaggccgggagggagggggatgggaacgggaggaagacgggaggggcccgccaagccaaggggaagcgaaaccaggggcg

SEQ ID NO: 330966 - DNA, 173 bp, Homo sapiens
ggctgggtagagggcaggcctgtgggggctggagccaggctgagaaggggtgccatggagaagaaggccctcactctccctcctcccccagaacaacagctcagaacaacgtgtctctctggacattgacctctgggacaagttcagtgaactctccaccaagtgcatcatta

SEQ ID NO: 330967 - DNA, 418 bp, Homo sapiens
atacaaatgtgatggtttatcattgtatctttgtggttttgaaggtgggggtcctaggagtccagaggagtgatggggtgctggaggcttcattggcagcctcctgccctgagtctggctggggagtcccagttttcttaagacttgaatcctgccagcagtggtgaggctgggagaggctcttaggagggacggtgaggcagggtggagcttggtactaaggatggcgacctaggtctctaactgcccctcccctcttctctctctagccattgagacccagagcagcagttctgaagagatagtgcccagccctccctcgccaccccctctaccccgcatctacaagccttgctttgtctgtcaggacaagtcctcaggctaccactatggggtcagcgcctgtgagggctgcaag

SEQ ID NO: 330968 - DNA, 3276 bp, Homo sapiens
  misc_feature (15)..(15): n is a, c, g, or t
tccacgcgcccgacncagaagcaggggggaatcctgaatcgagctgagagggcttccccggttctcctgggaaccccatcggccccctgccagcacacacctgagcagcatcacaggacatggccccctcagccacctagctggggcccatctaggagtggcatcttttttggtgccctgaaggccagctctggaccttcccaggaaaagtgccagctcacagaactgcttgaccaaaggaccggctcttgagacatcccccaacccacctggcccccagctagggtgggggctccaggagactgagattagcctgccctctttggacagcagctccaggacagggcgggtgggctgaccacccaaaccccatctgggcccaggccccatgccccgaggaggggtggtctgaagcccaccagagccccctgccagactgtctgcctcccttctgactgtggccgcttggcatggccagcaacagcagctcctgcccgacacctgggggcgggcacctcaatgggtacccggtgcctccctacgccttcttcttcccccctatgctgggtggactctccccgccaggcgctctgaccactctccagcaccagcttccagttagtggatatagcacaccatccccagccaccattgagacccagagcagcagttctgaagagatagtgcccagccctccctcgccaccccctctaccccgcatctacaagccttgctttgtctgtcaggacaagtcctcaggctaccactatggggtcagcgcctgtgagggctgcaagggcttcttccgccgcagcatccagaagaacatggtgtacacgtgtcaccgggacaagaactgcatcatcaacaaggtgacccggaaccgctgccagtactgccgactgcagaagtgctttgaagtgggcatgtccaaggagtctgtgagaaacgaccgaaacaagaagaagaaggaggtgcccaagcccgagtgctctgagagctacacgctgacgccggaggtgggggagctcattgagaaggtgcgcaaagcgcaccaggaaaccttccctgccctctgccagctgggcaaatacactacgaacaacagctcagaacaacgtgtctctctggacattgacctctgggacaagttcagtgaactctccaccaagtgcatcattaagactgtggagttcgccaagcagctgcccggcttcaccaccctcaccatcgccgaccagatcaccctcctcaaggctgcctgcctggacatcctgatcctgcggatctgcacgcggtacacgcccgagcaggacaccatgaccttctcggacgggctgaccctgaaccggacccagatgcacaacgctggcttcggccccctcaccgacctggtctttgccttcgccaaccagctgctgcccctggagatggatgatgcggagacggggctgctcagcgccatctgcctcatctgcggagaccgccaggacctggagcagccggaccgggtggacatgctgcaggagccgctgctggaggcgctaaaggtctacgtgcggaagcggaggcccagccgcccccacatgttccccaagatgctaatgaagattactgacctgcgaagcatcagcgccaagggggctgagcgggtgatcacgctgaagatggagatcccgggctccatgccgcctctcatccaggaaatgttggagaactcagagggcctggacactctgagcggacagccggggggtggggggcgggacgggggtggcctggcccccccgccaggcagctgtagccccagcctcagccccagctccaacagaagcagcccggccacccactccccgtgaccgcccacgccacatggacacagccctcgccctccgccccggcttttctctgcctttctaccgaccatgtgaccccgcaccagccctgcccccacctgccctcccgggcagtactggggaccttccctgggggacggggagggaggaggcagcgactccttggacagaggcctgggccctcagtggactgcctgctcccacagcctgggctgacgtcagaggccgaggccaggaactgagtgaggcccctggtcctgggtctcaggatgggtcctgggggcctcgtgttcatcaagacacccctctgcccagctcaccacatcttcatcaccagcaaacgccaggacttggctcccccatcctcagaactcacaagccattgctccccagctggggaacctcaacctcccccctgcctcggttggtgacagagggggtgggacaggggcggggggttccccctgtacataccctgccataccaaccccaggtattaattctcgctggttttgtttttattttaatttttttgttttgatttttttaataagaattttcattttaagcacatttatactgaaggaatttgtgctgtgtattggggggagctggatccagagctggagggggtgggtccgggggagggagtggctcggaaggggcccccactctcctttcatgtccctgtgccccccagttctcctcctcagccttttcctcctcagttttctctttaaaactgtgaagtactaactttccaaggcctgccttcccctccctcccactggagaagccgccagcccctttctccctctgcctgaccactgggtgtggacggtgtggggcagccctgaaaggacaggctcctggccttggcacttgcctgcacccaccatgaggcatggagcagggcagagcaagggccccgggacagagttttcccagacctggctcctcggcagagctgcctcccgtcagggcccacatcatctaggctccccagcccccactgtgaaggggctggccaggggcccgagctgcccccacccccggcctcagccaccagcacccccatagggcccccagacaccacacacatgcgcgtgcgcacacacacaaacacacacacactggacagtagatgggccgacacacacttggcccgagttcctccatttccctggcctgccccccacccccaacctgtcccacccccgtgccccctccttaccccgcaggacgggcctacaggggggtctcccctcacccctgcacccccagctgggggagctggctctgccccgacctccttcaccaggggttggggccccttcccctggagcccgtgggtgcacctgttactgttgggctttccactgagatctactggataaagaataaagttctatttattcta

SEQ ID NO: 330969 - DNA, 3353 bp, Homo sapiens
  misc_feature (15)..(15): n is a, c, g, or t
tccacgcgcccgacncagaagcaggggggaatcctgaatcgagctgagagggcttccccggttctcctgggaaccccatcggccccctgccagcacacacctgagcaggtgtgtgactctggggtgtaacgcgtgggcagctagggatgctgatgctggagaagggatcctggcaccttctgaggcatcacaggacatggccccctcagccacctagctggggcccatctaggagtggcatcttttttggtgccctgaaggccagctctggaccttcccaggaaaagtgccagctcacagaactgcttgaccaaaggaccggctcttgagacatcccccaacccacctggcccccagctagggtgggggctccaggagactgagattagcctgccctctttggacagcagctccaggacagggcgggtgggctgaccacccaaaccccatctgggcccaggccccatgccccgaggaggggtggtctgaagcccaccagagccccctgccagactgtctgcctcccttctgactgtggccgcttggcatggccagcaacagcagctcctgcccgacacctgggggcgggcacctcaatgggtacccggtgcctccctacgccttcttcttcccccctatgctgggtggactctccccgccaggcgctctgaccactctccagcaccagcttccagttagtggatatagcacaccatccccagccaccattgagacccagagcagcagttctgaagagatagtgcccagccctccctcgccaccccctctaccccgcatctacaagccttgctttgtctgtcaggacaagtcctcaggctaccactatggggtcagcgcctgtgagggctgcaagggcttcttccgccgcagcatccagaagaacatggtgtacacgtgtcaccgggacaagaactgcatcatcaacaaggtgacccggaaccgctgccagtactgccgactgcagaagtgctttgaagtgggcatgtccaaggagtctgtgagaaacgaccgaaacaagaagaagaaggaggtgcccaagcccgagtgctctgagagctacacgctgacgccggaggtgggggagctcattgagaaggtgcgcaaagcgcaccaggaaaccttccctgccctctgccagctgggcaaatacactacgaacaacagctcagaacaacgtgtctctctggacattgacctctgggacaagttcagtgaactctccaccaagtgcatcattaagactgtggagttcgccaagcagctgcccggcttcaccaccctcaccatcgccgaccagatcaccctcctcaaggctgcctgcctggacatcctgatcctgcggatctgcacgcggtacacgcccgagcaggacaccatgaccttctcggacgggctgaccctgaaccggacccagatgcacaacgctggcttcggccccctcaccgacctggtctttgccttcgccaaccagctgctgcccctggagatggatgatgcggagacggggctgctcagcgccatctgcctcatctgcggagaccgccaggacctggagcagccggaccgggtggacatgctgcaggagccgctgctggaggcgctaaaggtctacgtgcggaagcggaggcccagccgcccccacatgttccccaagatgctaatgaagattactgacctgcgaagcatcagcgccaagggggctgagcgggtgatcacgctgaagatggagatcccgggctccatgccgcctctcatccaggaaatgttggagaactcagagggcctggacactctgagcggacagccggggggtggggggcgggacgggggtggcctggcccccccgccaggcagctgtagccccagcctcagccccagctccaacagaagcagcccggccacccactccccgtgaccgcccacgccacatggacacagccctcgccctccgccccggcttttctctgcctttctaccgaccatgtgaccccgcaccagccctgcccccacctgccctcccgggcagtactggggaccttccctgggggacggggagggaggaggcagcgactccttggacagaggcctgggccctcagtggactgcctgctcccacagcctgggctgacgtcagaggccgaggccaggaactgagtgaggcccctggtcctgggtctcaggatgggtcctgggggcctcgtgttcatcaagacacccctctgcccagctcaccacatcttcatcaccagcaaacgccaggacttggctcccccatcctcagaactcacaagccattgctccccagctggggaacctcaacctcccccctgcctcggttggtgacagagggggtgggacaggggcggggggttccccctgtacataccctgccataccaaccccaggtattaattctcgctggttttgtttttattttaatttttttgttttgatttttttaataagaattttcattttaagcacatttatactgaaggaatttgtgctgtgtattggggggagctggatccagagctggagggggtgggtccgggggagggagtggctcggaaggggcccccactctcctttcatgtccctgtgccccccagttctcctcctcagccttttcctcctcagttttctctttaaaactgtgaagtactaactttccaaggcctgccttcccctccctcccactggagaagccgccagcccctttctccctctgcctgaccactgggtgtggacggtgtggggcagccctgaaaggacaggctcctggccttggcacttgcctgcacccaccatgaggcatggagcagggcagagcaagggccccgggacagagttttcccagacctggctcctcggcagagctgcctcccgtcagggcccacatcatctaggctccccagcccccactgtgaaggggctggccaggggcccgagctgcccccacccccggcctcagccaccagcacccccatagggcccccagacaccacacacatgcgcgtgcgcacacacacaaacacacacacactggacagtagatgggccgacacacacttggcccgagttcctccatttccctggcctgccccccacccccaacctgtcccacccccgtgccccctccttaccccgcaggacgggcctacaggggggtctcccctcacccctgcacccccagctgggggagctggctctgccccgacctccttcaccaggggttggggccccttcccctggagcccgtgggtgcacctgttactgttgggctttccactgagatctactggataaagaataaagttctatttattcta

SEQ ID NO: 330970 - DNA, 4093 bp, Homo sapiens
tggaactacactcctttctactctttgcctgattaacttacaaactttctcttatggtaggtctgttttatttgagttcttccctaatttagttaaacctaaattaggtacctatgttaattcttcagagcataatagcatttatctcagtttgcaattgtgtgtgcatacagtgattatttgcttaatggctgttgctccctaaggtctacaagggcaggttccccagggtgtccacatagaaggtgctcagaaaaataccttgaattggcctagcttggtaagaacatgggctttggcagcaggaagttcaaatacctgctctactctttattattagtaatgtgatcttggacaacccacatagccttgctgagacctgttttatttgtaaaacatctcttggagttgctgtgaggataaaatgacaacatatataaagagccaggcttcttctagaagaatgtccttgggtagcatgtacatttccatccttccttttagagagtgggggtaataggataccccctcctccaggggtatcccctctttctagggacctacccaagctaggcctttcttccagtgaaacgtgcatcccgagggcttctaggatgaagtagtccactggaaggcaccagctcttccttttatctctccagagctggacagtgcaccaggggccggtactggttccccagctaggagacaccttgggcggggctttgctcgccggaagcacgcagagcgtggggaggagggccccctctgcctgtgtttgtgccaacagcacccgcgctgccgcgtcgggttccggcggccggagtcacacatgatgtcacagacaatgacacaagccggtgtctcattccgacacagcgtccgagctgcacaatgtcacacccgggtgccaaacacttggccccgcgcgacccggccctacgcctcctgccgccgctctccgcgtctccgggggaggtggcccggttcggccgggcagggggctggcgggcgagccccgcgggcgggctggcgagcgggtgatgtcacgggcagcggtgggtgggtcactcggagccattgagacccagagcagcagttctgaagagatagtgcccagccctccctcgccaccccctctaccccgcatctacaagccttgctttgtctgtcaggacaagtcctcaggctaccactatggggtcagcgcctgtgagggctgcaagggcttcttccgccgcagcatccagaagaacatggtgtacacgtgtcaccgggacaagaactgcatcatcaacaaggtgacccggaaccgctgccagtactgccgactgcagaagtgctttgaagtgggcatgtccaaggagtctgtgagaaacgaccgaaacaagaagaagaaggaggtgcccaagcccgagtgctctgagagctacacgctgacgccggaggtgggggagctcattgagaaggtgcgcaaagcgcaccaggaaaccttccctgccctctgccagctgggcaaatacactacgaacaacagctcagaacaacgtgtctctctggacattgacctctgggacaagttcagtgaactctccaccaagtgcatcattaagactgtggagttcgccaagcagctgcccggcttcaccaccctcaccatcgccgaccagatcaccctcctcaaggctgcctgcctggacatcctgatcctgcggatctgcacgcggtacacgcccgagcaggacaccatgaccttctcggacgggctgaccctgaaccggacccagatgcacaacgctggcttcggccccctcaccgacctggtctttgccttcgccaaccagctgctgcccctggagatggatgatgcggagacggggctgctcagcgccatctgcctcatctgcggagaccgccaggacctggagcagccggaccgggtggacatgctgcaggagccgctgctggaggcgctaaaggtctacgtgcggaagcggaggcccagccgcccccacatgttccccaagatgctaatgaagattactgacctgcgaagcatcagcgccaagggggctgagcgggtgatcacgctgaagatggagatcccgggctccatgccgcctctcatccaggaaatgttggagaactcagagggcctggacactctgagcggacagccggggggtggggggcgggacgggggtggcctggcccccccgccaggcagctgtagccccagcctcagccccagctccaacagaagcagcccggccacccactccccgtgaccgcccacgccacatggacacagccctcgccctccgccccggcttttctctgcctttctaccgaccatgtgaccccgcaccagccctgcccccacctgccctcccgggcagtactggggaccttccctgggggacggggagggaggaggcagcgactccttggacagaggcctgggccctcagtggactgcctgctcccacagcctgggctgacgtcagaggccgaggccaggaactgagtgaggcccctggtcctgggtctcaggatgggtcctgggggcctcgtgttcatcaagacacccctctgcccagctcaccacatcttcatcaccagcaaacgccaggacttggctcccccatcctcagaactcacaagccattgctccccagctggggaacctcaacctcccccctgcctcggttggtgacagagggggtgggacaggggcggggggttccccctgtacataccctgccataccaaccccaggtattaattctcgctggttttgtttttattttaatttttttgttttgatttttttaataagaattttcattttaagcacatttatactgaaggaatttgtgctgtgtattggggggagctggatccagagctggagggggtgggtccgggggagggagtggctcggaaggggcccccactctcctttcatgtccctgtgccccccagttctcctcctcagccttttcctcctcagttttctctttaaaactgtgaagtactaactttccaaggcctgccttcccctccctcccactggagaagccgccagcccctttctccctctgcctgaccactgggtgtggacggtgtggggcagccctgaaaggacaggctcctggccttggcacttgcctgcacccaccatgaggcatggagcagggcagagcaagggccccgggacagagttttcccagacctggctcctcggcagagctgcctcccgtcagggcccacatcatctaggctccccagcccccactgtgaaggggctggccaggggcccgagctgcccccacccccggcctcagccaccagcacccccatagggcccccagacaccacacacatgcgcgtgcgcacacacacaaacacacacacactggacagtagatgggccgacacacacttggcccgagttcctccatttccctggcctgccccccacccccaacctgtcccacccccgtgccccctccttaccccgcaggacgggcctacaggggggtctcccctcacccctgcacccccagctgggggagctggctctgccccgacctccttcaccaggggttggggccccttcccctggagcccgtgggtgcacctgttactgttgggctttccactgagatctactggataaagaataaagttctatttattctaaaaaaaaaaaaaaaaaaacaaaaaaataccaaaaaaataccacacaaacaaactctacttcacctctcctcccttccaacttaacctattaaatccctctttccacctcataaacaaaaaaaaaaactctggggggggccccggacccacatttccctttaggggcgctttaaatatccaggccctcttttaaaacctcggaactggaaaacccctgcgttcaaaacttattccgttggaaccatatccctttccccgtctgccattttccggccccgttattttcgtcaaatccccttaaattctggcaaaccattttttcttacccaaggcgcaaatggccaatcttttaaaccaagataaccgctaagggtaggttttgtcctct

SEQ ID NO: 330971 - DNA, 3580 bp, Homo sapiens
ccgtcctgcgcggttgttctctggagcagcgttcttttatctccgtccgccttctctcctacctaagtgcgtgccgccacccgatggaagattcgatggacatggacatgagccccctgaggccccagaactatcttttcggttgtgaactaaaggccgacaaagattatcactttaaggtggataatgatgaaaatgagcaccagttatctttaagaacggtcagtttaggggctggtgcaaaggatgagttgcacattgttgaagcagaggcaatgaattacgaaggcagtccaattaaagtaacactggcaactttgaaaatgtctgtacagccaacggtttcccttgggggctttgaaataacaccaccagtggtcttaaggttgaagtgtggttcagggccagtgcatattagtggacagcacttagtagctgtggaggaagatgcagagtcagaagatgaagaggaggaggatgtgaacagggttttatttatgaaaccgaaaggcaggggcctcaagcatatgttcggggatttggtgtgcagttggaaattggcagccattgagacccagagcagcagttctgaagagatagtgcccagccctccctcgccaccccctctaccccgcatctacaagccttgctttgtctgtcaggacaagtcctcaggctaccactatggggtcagcgcctgtgagggctgcaagggcttcttccgccgcagcatccagaagaacatggtgtacacgtgtcaccgggacaagaactgcatcatcaacaaggtgacccggaaccgctgccagtactgccgactgcagaagtgctttgaagtgggcatgtccaaggagtctgtgagaaacgaccgaaacaagaagaagaaggaggtgcccaagcccgagtgctctgagagctacacgctgacgccggaggtgggggagctcattgagaaggtgcgcaaagcgcaccaggaaaccttccctgccctctgccagctgggcaaatacactacgaacaacagctcagaacaacgtgtctctctggacattgacctctgggacaagttcagtgaactctccaccaagtgcatcattaagactgtggagttcgccaagcagctgcccggcttcaccaccctcaccatcgccgaccagatcaccctcctcaaggctgcctgcctggacatcctgatcctgcggatctgcacgcggtacacgcccgagcaggacaccatgaccttctcggacgggctgaccctgaaccggacccagatgcacaacgctggcttcggccccctcaccgacctggtctttgccttcgccaaccagctgctgcccctggagatggatgatgcggagacggggctgctcagcgccatctgcctcatctgcggagaccgccaggacctggagcagccggaccgggtggacatgctgcaggagccgctgctggaggcgctaaaggtctacgtgcggaagcggaggcccagccgcccccacatgttccccaagatgctaatgaagattactgacctgcgaagcatcagcgccaagggggctgagcgggtgatcacgctgaagatggagatcccgggctccatgccgcctctcatccaggaaatgttggagaactcagagggcctggacactctgagcggacagccggggggtggggggcgggacgggggtggcctggcccccccgccaggcagctgtagccccagcctcagccccagctccaacagaagcagcccggccacccactccccgtgaccgcccacgccacatggacacagccctcgccctccgccccggcttttctctgcctttctaccgaccatgtgaccccgcaccagccctgcccccacctgccctcccgggcagtactggggaccttccctgggggacggggagggaggaggcagcgactccttggacagaggcctgggccctcagtggactgcctgctcccacagcctgggctgacgtcagaggccgaggccaggaactgagtgaggcccctggtcctgggtctcaggatgggtcctgggggcctcgtgttcatcaagacacccctctgcccagctcaccacatcttcatcaccagcaaacgccaggacttggctcccccatcctcagaactcacaagccattgctccccagctggggaacctcaacctcccccctgcctcggttggtgacagagggggtgggacaggggcggggggttccccctgtacataccctgccataccaaccccaggtattaattctcgctggttttgtttttattttaatttttttgttttgatttttttaataagaattttcattttaagcacatttatactgaaggaatttgtgctgtgtattggggggagctggatccagagctggagggggtgggtccgggggagggagtggctcggaaggggcccccactctcctttcatgtccctgtgccccccagttctcctcctcagccttttcctcctcagttttctctttaaaactgtgaagtactaactttccaaggcctgccttcccctccctcccactggagaagccgccagcccctttctccctctgcctgaccactgggtgtggacggtgtggggcagccctgaaaggacaggctcctggccttggcacttgcctgcacccaccatgaggcatggagcagggcagagcaagggccccgggacagagttttcccagacctggctcctcggcagagctgcctcccgtcagggcccacatcatctaggctccccagcccccactgtgaaggggctggccaggggcccgagctgcccccacccccggcctcagccaccagcacccccatagggcccccagacaccacacacatgcgcgtgcgcacacacacaaacacacacacactggacagtagatgggccgacacacacttggcccgagttcctccatttccctggcctgccccccacccccaacctgtcccacccccgtgccccctccttaccccgcaggacgggcctacaggggggtctcccctcacccctgcacccccagctgggggagctggctctgccccgacctccttcaccaggggttggggccccttcccctggagcccgtgggtgcacctgttactgttgggctttccactgagatctactggataaagaataaagttctatttattctaaaaaaaaaaaaaaaaaaacaaaaaaataccaaaaaaataccacacaaacaaactctacttcacctctcctcccttccaacttaacctattaaatccctctttccacctcataaacaaaaaaaaaaactctggggggggccccggacccacatttccctttaggggcgctttaaatatccaggccctcttttaaaacctcggaactggaaaacccctgcgttcaaaacttattccgttggaaccatatccctttccccgtctgccattttccggccccgttattttcgtcaaatccccttaaattctggcaaaccattttttcttacccaaggcgcaaatggccaatcttttaaaccaagataaccgctaagggtaggttttgtcctct

SEQ ID NO: 330972 - DNA, 3695 bp, Homo sapiens
gtcgccagctgcccctggcctggcgggggcggaaccgcgcgggatccccacccccacccggaatcctcgccacggagaatccctggagaagccccggatccccggctgggaggaggaagtgctcgttgacccccagccccgcgctgatcccgcccccggcctgcggacttggggagccgctgtactctgcctcggacgccacgagactctagacgggagtcccctcgaggtgaagccgctgagttcccgggccccgccaggcttccctgggagagccgacggaccccccctcccagcacacacaacttccctgcttttcaccgggactggcggagcggccggcggacttagacgcggggacttcagggcagggggcgccccctgcccgggtcaccagtcggggcgaggggacgtctcctctcccccagctgctctgctcggatggcgccgccggctgagtgacgggggcggcgcgcaggacttcccagctcggacctcttgccttcgaggggaaagatgtacgagagtgtagaagtggggggtcccacccctaatcccttcctagtggtggatttttataaccagaaccgggcctgtttgctcccagagaaggggctccccgccccgggtccgtactccaccccgctccggactccgctttggaatggctcaaaccactccattgagacccagagcagcagttctgaagagatagtgcccagccctccctcgccaccccctctaccccgcatctacaagccttgctttgtctgtcaggacaagtcctcaggctaccactatggggtcagcgcctgtgagggctgcaagggcttcttccgccgcagcatccagaagaacatggtgtacacgtgtcaccgggacaagaactgcatcatcaacaaggtgacccggaaccgctgccagtactgccgactgcagaagtgctttgaagtgggcatgtccaaggagtctgtgagaaacgaccgaaacaagaagaagaaggaggtgcccaagcccgagtgctctgagagctacacgctgacgccggaggtgggggagctcattgagaaggtgcgcaaagcgcaccaggaaaccttccctgccctctgccagctgggcaaatacactacgaacaacagctcagaacaacgtgtctctctggacattgacctctgggacaagttcagtgaactctccaccaagtgcatcattaagactgtggagttcgccaagcagctgcccggcttcaccaccctcaccatcgccgaccagatcaccctcctcaaggctgcctgcctggacatcctgatcctgcggatctgcacgcggtacacgcccgagcaggacaccatgaccttctcggacgggctgaccctgaaccggacccagatgcacaacgctggcttcggccccctcaccgacctggtctttgccttcgccaaccagctgctgcccctggagatggatgatgcggagacggggctgctcagcgccatctgcctcatctgcggagaccgccaggacctggagcagccggaccgggtggacatgctgcaggagccgctgctggaggcgctaaaggtctacgtgcggaagcggaggcccagccgcccccacatgttccccaagatgctaatgaagattactgacctgcgaagcatcagcgccaagggggctgagcgggtgatcacgctgaagatggagatcccgggctccatgccgcctctcatccaggaaatgttggagaactcagagggcctggacactctgagcggacagccggggggtggggggcgggacgggggtggcctggcccccccgccaggcagctgtagccccagcctcagccccagctccaacagaagcagcccggccacccactccccgtgaccgcccacgccacatggacacagccctcgccctccgccccggcttttctctgcctttctaccgaccatgtgaccccgcaccagccctgcccccacctgccctcccgggcagtactggggaccttccctgggggacggggagggaggaggcagcgactccttggacagaggcctgggccctcagtggactgcctgctcccacagcctgggctgacgtcagaggccgaggccaggaactgagtgaggcccctggtcctgggtctcaggatgggtcctgggggcctcgtgttcatcaagacacccctctgcccagctcaccacatcttcatcaccagcaaacgccaggacttggctcccccatcctcagaactcacaagccattgctccccagctggggaacctcaacctcccccctgcctcggttggtgacagagggggtgggacaggggcggggggttccccctgtacataccctgccataccaaccccaggtattaattctcgctggttttgtttttattttaatttttttgttttgatttttttaataagaattttcattttaagcacatttatactgaaggaatttgtgctgtgtattggggggagctggatccagagctggagggggtgggtccgggggagggagtggctcggaaggggcccccactctcctttcatgtccctgtgccccccagttctcctcctcagccttttcctcctcagttttctctttaaaactgtgaagtactaactttccaaggcctgccttcccctccctcccactggagaagccgccagcccctttctccctctgcctgaccactgggtgtggacggtgtggggcagccctgaaaggacaggctcctggccttggcacttgcctgcacccaccatgaggcatggagcagggcagagcaagggccccgggacagagttttcccagacctggctcctcggcagagctgcctcccgtcagggcccacatcatctaggctccccagcccccactgtgaaggggctggccaggggcccgagctgcccccacccccggcctcagccaccagcacccccatagggcccccagacaccacacacatgcgcgtgcgcacacacacaaacacacacacactggacagtagatgggccgacacacacttggcccgagttcctccatttccctggcctgccccccacccccaacctgtcccacccccgtgccccctccttaccccgcaggacgggcctacaggggggtctcccctcacccctgcacccccagctgggggagctggctctgccccgacctccttcaccaggggttggggccccttcccctggagcccgtgggtgcacctgttactgttgggctttccactgagatctactggataaagaataaagttctatttattctaaaaaaaaaaaaaaaaaaacaaaaaaataccaaaaaaataccacacaaacaaactctacttcacctctcctcccttccaacttaacctattaaatccctctttccacctcataaacaaaaaaaaaaactctggggggggccccggacccacatttccctttaggggcgctttaaatatccaggccctcttttaaaacctcggaactggaaaacccctgcgttcaaaacttattccgttggaaccatatccctttccccgtctgccattttccggccccgttattttcgtcaaatccccttaaattctggcaaaccattttttcttacccaaggcgcaaatggccaatcttttaaaccaagataaccgctaagggtaggttttgtcctct

SEQ ID NO: 330973 - DNA, 3092 bp, Homo sapiens
ctgggctaggggccttcttccgctgccgcggtacacccagagctacccccgcctctccccgggaggaggaaggacgccattgagacccagagcagcagttctgaagagatagtgcccagccctccctcgccaccccctctaccccgcatctacaagccttgctttgtctgtcaggacaagtcctcaggctaccactatggggtcagcgcctgtgagggctgcaagggcttcttccgccgcagcatccagaagaacatggtgtacacgtgtcaccgggacaagaactgcatcatcaacaaggtgacccggaaccgctgccagtactgccgactgcagaagtgctttgaagtgggcatgtccaaggagtctgtgagaaacgaccgaaacaagaagaagaaggaggtgcccaagcccgagtgctctgagagctacacgctgacgccggaggtgggggagctcattgagaaggtgcgcaaagcgcaccaggaaaccttccctgccctctgccagctgggcaaatacactacgaacaacagctcagaacaacgtgtctctctggacattgacctctgggacaagttcagtgaactctccaccaagtgcatcattaagactgtggagttcgccaagcagctgcccggcttcaccaccctcaccatcgccgaccagatcaccctcctcaaggctgcctgcctggacatcctgatcctgcggatctgcacgcggtacacgcccgagcaggacaccatgaccttctcggacgggctgaccctgaaccggacccagatgcacaacgctggcttcggccccctcaccgacctggtctttgccttcgccaaccagctgctgcccctggagatggatgatgcggagacggggctgctcagcgccatctgcctcatctgcggagaccgccaggacctggagcagccggaccgggtggacatgctgcaggagccgctgctggaggcgctaaaggtctacgtgcggaagcggaggcccagccgcccccacatgttccccaagatgctaatgaagattactgacctgcgaagcatcagcgccaagggggctgagcgggtgatcacgctgaagatggagatcccgggctccatgccgcctctcatccaggaaatgttggagaactcagagggcctggacactctgagcggacagccggggggtggggggcgggacgggggtggcctggcccccccgccaggcagctgtagccccagcctcagccccagctccaacagaagcagcccggccacccactccccgtgaccgcccacgccacatggacacagccctcgccctccgccccggcttttctctgcctttctaccgaccatgtgaccccgcaccagccctgcccccacctgccctcccgggcagtactggggaccttccctgggggacggggagggaggaggcagcgactccttggacagaggcctgggccctcagtggactgcctgctcccacagcctgggctgacgtcagaggccgaggccaggaactgagtgaggcccctggtcctgggtctcaggatgggtcctgggggcctcgtgttcatcaagacacccctctgcccagctcaccacatcttcatcaccagcaaacgccaggacttggctcccccatcctcagaactcacaagccattgctccccagctggggaacctcaacctcccccctgcctcggttggtgacagagggggtgggacaggggcggggggttccccctgtacataccctgccataccaaccccaggtattaattctcgctggttttgtttttattttaatttttttgttttgatttttttaataagaattttcattttaagcacatttatactgaaggaatttgtgctgtgtattggggggagctggatccagagctggagggggtgggtccgggggagggagtggctcggaaggggcccccactctcctttcatgtccctgtgccccccagttctcctcctcagccttttcctcctcagttttctctttaaaactgtgaagtactaactttccaaggcctgccttcccctccctcccactggagaagccgccagcccctttctccctctgcctgaccactgggtgtggacggtgtggggcagccctgaaaggacaggctcctggccttggcacttgcctgcacccaccatgaggcatggagcagggcagagcaagggccccgggacagagttttcccagacctggctcctcggcagagctgcctcccgtcagggcccacatcatctaggctccccagcccccactgtgaaggggctggccaggggcccgagctgcccccacccccggcctcagccaccagcacccccatagggcccccagacaccacacacatgcgcgtgcgcacacacacaaacacacacacactggacagtagatgggccgacacacacttggcccgagttcctccatttccctggcctgccccccacccccaacctgtcccacccccgtgccccctccttaccccgcaggacgggcctacaggggggtctcccctcacccctgcacccccagctgggggagctggctctgccccgacctccttcaccaggggttggggccccttcccctggagcccgtgggtgcacctgttactgttgggctttccactgagatctactggataaagaataaagttctatttattctaaaaaaaaaaaaaaaaaaacaaaaaaataccaaaaaaataccacacaaacaaactctacttcacctctcctcccttccaacttaacctattaaatccctctttccacctcataaacaaaaaaaaaaactctggggggggccccggacccacatttccctttaggggcgctttaaatatccaggccctcttttaaaacctcggaactggaaaacccctgcgttcaaaacttattccgttggaaccatatccctttccccgtctgccattttccggccccgttattttcgtcaaatccccttaaattctggcaaaccattttttcttacccaaggcgcaaatggccaatcttttaaaccaagataaccgctaagggtaggttttgtcctct

SEQ ID NO: 330974 - DNA, 2945 bp, Homo sapiens
gagcggaggcggagtcggcgccgagaacatggctggaggcaaagctggaaaggacagtgggaaggccaaggctaaggcagtatctcgctcacagagagctgggctacagtttcctgtgggccgcatccacagacacttgaagactcgcaccacaagccatggaagggtgggtgccactgctgccgtgtacagtgctttgaagtgggcatgtccaaggagtctgtgagaaacgaccgaaacaagaagaagaaggaggtgcccaagcccgagtgctctgagagctacacgctgacgccggaggtgggggagctcattgagaaggtgcgcaaagcgcaccaggaaaccttccctgccctctgccagctgggcaaatacactacgaacaacagctcagaacaacgtgtctctctggacattgacctctgggacaagttcagtgaactctccaccaagtgcatcattaagactgtggagttcgccaagcagctgcccggcttcaccaccctcaccatcgccgaccagatcaccctcctcaaggctgcctgcctggacatcctgatcctgcggatctgcacgcggtacacgcccgagcaggacaccatgaccttctcggacgggctgaccctgaaccggacccagatgcacaacgctggcttcggccccctcaccgacctggtctttgccttcgccaaccagctgctgcccctggagatggatgatgcggagacggggctgctcagcgccatctgcctcatctgcggagaccgccaggacctggagcagccggaccgggtggacatgctgcaggagccgctgctggaggcgctaaaggtctacgtgcggaagcggaggcccagccgcccccacatgttccccaagatgctaatgaagattactgacctgcgaagcatcagcgccaagggggctgagcgggtgatcacgctgaagatggagatcccgggctccatgccgcctctcatccaggaaatgttggagaactcagagggcctggacactctgagcggacagccggggggtggggggcgggacgggggtggcctggcccccccgccaggcagctgtagccccagcctcagccccagctccaacagaagcagcccggccacccactccccgtgaccgcccacgccacatggacacagccctcgccctccgccccggcttttctctgcctttctaccgaccatgtgaccccgcaccagccctgcccccacctgccctcccgggcagtactggggaccttccctgggggacggggagggaggaggcagcgactccttggacagaggcctgggccctcagtggactgcctgctcccacagcctgggctgacgtcagaggccgaggccaggaactgagtgaggcccctggtcctgggtctcaggatgggtcctgggggcctcgtgttcatcaagacacccctctgcccagctcaccacatcttcatcaccagcaaacgccaggacttggctcccccatcctcagaactcacaagccattgctccccagctggggaacctcaacctcccccctgcctcggttggtgacagagggggtgggacaggggcggggggttccccctgtacataccctgccataccaaccccaggtattaattctcgctggttttgtttttattttaatttttttgttttgatttttttaataagaattttcattttaagcacatttatactgaaggaatttgtgctgtgtattggggggagctggatccagagctggagggggtgggtccgggggagggagtggctcggaaggggcccccactctcctttcatgtccctgtgccccccagttctcctcctcagccttttcctcctcagttttctctttaaaactgtgaagtactaactttccaaggcctgccttcccctccctcccactggagaagccgccagcccctttctccctctgcctgaccactgggtgtggacggtgtggggcagccctgaaaggacaggctcctggccttggcacttgcctgcacccaccatgaggcatggagcagggcagagcaagggccccgggacagagttttcccagacctggctcctcggcagagctgcctcccgtcagggcccacatcatctaggctccccagcccccactgtgaaggggctggccaggggcccgagctgcccccacccccggcctcagccaccagcacccccatagggcccccagacaccacacacatgcgcgtgcgcacacacacaaacacacacacactggacagtagatgggccgacacacacttggcccgagttcctccatttccctggcctgccccccacccccaacctgtcccacccccgtgccccctccttaccccgcaggacgggcctacaggggggtctcccctcacccctgcacccccagctgggggagctggctctgccccgacctccttcaccaggggttggggccccttcccctggagcccgtgggtgcacctgttactgttgggctttccactgagatctactggataaagaataaagttctatttattctaaaaaaaaaaaaaaaaaaacaaaaaaataccaaaaaaataccacacaaacaaactctacttcacctctcctcccttccaacttaacctattaaatccctctttccacctcataaacaaaaaaaaaaactctggggggggccccggacccacatttccctttaggggcgctttaaatatccaggccctcttttaaaacctcggaactggaaaacccctgcgttcaaaacttattccgttggaaccatatccctttccccgtctgccattttccggccccgttattttcgtcaaatccccttaaattctggcaaaccattttttcttacccaaggcgcaaatggccaatcttttaaaccaagataaccgctaagggtaggttttgtcctct

SEQ ID NO: 330975 - DNA, 2263 bp, Homo sapiens
  misc_feature (25)..(25): n is a, c, g, or t
  misc_feature (69)..(69): n is a, c, g, or t
  misc_feature (78)..(78): n is a, c, g, or t
acctctcaggtgctgctgacatctntgtgccctgagatggtgatgcgagacgggctctcagcgcatctnctcatctgngagaccgccaggacctggagcagccggaccgggtggacatgctgcaggagccgctgctggaggcgctaaaggtctacgtgcggaagcggaggcccagccgcccccacatgttccccaagatgctaatgaagattactgacctgcgaagcatcagcgccaagggggctgagcgggtgatcacgctgaagatggagatcccgggctccatgccgcctctcatccaggaaatgttggagaactcagagggcctggacactctgagcggacagccggggggtggggggcgggacgggggtggcctggcccccccgccaggcagctgtagccccagcctcagccccagctccaacagaagcagcccggccacccactccccgtgaccgcccacgccacatggacacagccctcgccctccgccccggcttttctctgcctttctaccgaccatgtgaccccgcaccagccctgcccccacctgccctcccgggcagtactggggaccttccctgggggacggggagggaggaggcagcgactccttggacagaggcctgggccctcagtggactgcctgctcccacagcctgggctgacgtcagaggccgaggccaggaactgagtgaggcccctggtcctgggtctcaggatgggtcctgggggcctcgtgttcatcaagacacccctctgcccagctcaccacatcttcatcaccagcaaacgccaggacttggctcccccatcctcagaactcacaagccattgctccccagctggggaacctcaacctcccccctgcctcggttggtgacagagggggtgggacaggggcggggggttccccctgtacataccctgccataccaaccccaggtattaattctcgctggttttgtttttattttaatttttttgttttgatttttttaataagaattttcattttaagcacatttatactgaaggaatttgtgctgtgtattggggggagctggatccagagctggagggggtgggtccgggggagggagtggctcggaaggggcccccactctcctttcatgtccctgtgccccccagttctcctcctcagccttttcctcctcagttttctctttaaaactgtgaagtactaactttccaaggcctgccttcccctccctcccactggagaagccgccagcccctttctccctctgcctgaccactgggtgtggacggtgtggggcagccctgaaaggacaggctcctggccttggcacttgcctgcacccaccatgaggcatggagcagggcagagcaagggccccgggacagagttttcccagacctggctcctcggcagagctgcctcccgtcagggcccacatcatctaggctccccagcccccactgtgaaggggctggccaggggcccgagctgcccccacccccggcctcagccaccagcacccccatagggcccccagacaccacacacatgcgcgtgcgcacacacacaaacacacacacactggacagtagatgggccgacacacacttggcccgagttcctccatttccctggcctgccccccacccccaacctgtcccacccccgtgccccctccttaccccgcaggacgggcctacaggggggtctcccctcacccctgcacccccagctgggggagctggctctgccccgacctccttcaccaggggttggggccccttcccctggagcccgtgggtgcacctgttactgttgggctttccactgagatctactggataaagaataaagttctatttattctaaaaaaaaaaaaaaaaaaacaaaaaaataccaaaaaaataccacacaaacaaactctacttcacctctcctcccttccaacttaacctattaaatccctctttccacctcataaacaaaaaaaaaaactctggggggggccccggacccacatttccctttaggggcgctttaaatatccaggccctcttttaaaacctcggaactggaaaacccctgcgttcaaaacttattccgttggaaccatatccctttccccgtctgccattttccggccccgttattttcgtcaaatccccttaaattctggcaaaccattttttcttacccaaggcgcaaatggccaatcttttaaaccaagataaccgctaagggtaggttttgtcctct

SEQ ID NO: 330976 - DNA, 1881 bp, Homo sapiens
tggaactacactcctttctactctttgcctgattaacttacaaactttctcttatggtaggtctgttttatttgagttcttccctaatttagttaaacctaaattaggtacctatgttaattcttcagagcataatagcatttatctcagtttgcaattgtgtgtgcatacagtgattatttgcttaatggctgttgctccctaaggtctacaagggcaggttccccagggtgtccacatagaaggtgctcagaaaaataccttgaattggcctagcttggtaagaacatgggctttggcagcaggaagttcaaatacctgctctactctttattattagtaatgtgatcttggacaacccacatagccttgctgagacctgttttatttgtaaaacatctcttggagttgctgtgaggataaaatgacaacatatataaagagccaggcttcttctagaagaatgtccttgggtagcatgtacatttccatccttccttttagagagtgggggtaataggataccccctcctccaggggtatcccctctttctagggacctacccaagctaggcctttcttccagtgaaacgtgcatcccgagggcttctaggatgaagtagtccactggaaggcaccagctcttccttttatctctccagagctggacagtgcaccaggggccggtactggttccccagctaggagacaccttgggcggggctttgctcgccggaagcacgcagagcgtggggaggagggccccctctgcctgtgtttgtgccaacagcacccgcgctgccgcgtcgggttccggcggccggagtcacacatgatgtcacagacaatgacacaagccggtgtctcattccgacacagcgtccgagctgcacaatgtcacacccgggtgccaaacacttggccccgcgcgacccggccctacgcctcctgccgccgctctccgcgtctccgggggaggtggcccggttcggccgggcagggggctggcgggcgagccccgcgggcgggctggcgagcgggtgatgtcacgggcagcggtgggtgggtcactcggagccattgagacccagagcagcagttctgaagagatagtgcccagccctccctcgccaccccctctaccccgcatctacaagccttgctttgtctgtcaggacaagtcctcaggctaccactatggggtcagcgcctgtgagggctgcaagggcttcttccgccgcagcatccagaagaacatggtgtacacgtgtcaccgggacaagaactgcatcatcaacaaggtgacccggaaccgctgccagtactgccgactgcagaagtgctttgaagtgggcatgtccaaggagtctgtgagaaacgaccgaaacaagaagaagaaggaggtgcccaagcccgagtgctctgagagctacacgctgacgccggaggtgggggagctcattgagaaggtgcgcaaagcgcaccaggaaaccttccctgccctctgccagctgggcaaatacactacgaacaacagctcagaacaacgtgtctctctggacattgacctctgggacaagttcagtgaactctccaccaagtgcatcattaagactgtggagttcgccaagcagctgcccggcttcaccaccctcaccatccccaacctgtcccacccccgtgccccctccttaccccgcaggacgggcctacaggggggtctcccctcacccctgcacccccagctgggggagctggctctgccccgacctccttcaccaggggttggggccccttcccctggagcccgtgggtgcacctgttactgttgggctttccactgagatctactggataaagaataaagttctatttattcta

SEQ ID NO: 330977 - DNA, 2315 bp, Homo sapiens
agtcggctggagcgcatctggtcctccgcgcggaaagcgctgcttttgcctggccgccctagccgctggctcatccaagtggccttcgccgctctcttgcgtcccaaccagagcgctggccacctcgccgcccagctcacgccgcgcccgcgctcccaggctccgggttttcttaaatgttttcttggagccttaaagatggagatgacagaaatgactggtgtgtcgctgaaacgtggggcactggttgtcgaagataatgacagtggagtcccagttgaagagacaaaaaaacagaagctgtcggaatgcagtctaaccaaaggtcaagatgggctacagaatgactttctgtccatcagtgaagacgtgcctcggcctcctgacactgtcagtactgggaaaggtggaaagaattctgaggctcagttggaagatgaggaagaagaggaggaagatggactttcagaggagtgcgaggaggaggaatcagagagttttgcagacatgatgaagcatggactcactgaggctgacgtaggcatcaccaagtttgtgagttctcatcaagggttctcgggaatcttaaaagaaagatactccgacttcgttgttcatgaaataggaaaagatggacggatcagccatttgaatgacttgtccattccagtggatgaggaggacccttcagaagacatatttacagttttgacagctgaagaaaagcagcgattggaagagctccagctgttcaaaaataaggaaaccagtgttgccattgaggttatcgaggacaccaaagagaaaagaaccatcatccatcaggctatcaaatctctgtttccaggattagagacaaaaacagaggatagggaggggaagaaatacattgtagcctaccacgcagctgggaaaaaggctttggcaaatccaagaaaacattcttggccaaaatctaggggaagttactgccacttcgtactatataaggaaaacaaagacaccatggatgctattaatgtactctccaaatacttaagagtcaagccaaatatattctcctacatgggaaccaaagataaaagggctataacagttcaagaaattgctgttctcaaaataactgcacaaagacttgcccacctgaataagtgcttgatgaactttaagctagggaatttcagctatcaaaaaaacccactgaaattgggagagcttcaaggaaaccacttcactgttgttctcagaaatataacaggaactgatgaccaagtacagcaagctatgaactctctcaaggagattggatttattaactactatggaatgcaaagatttggaaccacagctgtccctacgtatcaggttggaagagctatactacaaaattcctggacagaagtcatggatttaatattgaaaccccgctctggagctgaaaagggctacttggttaaatgcagagaagaatgggcaaagaccaaagacccaactgctgccctcagaaaactacctgtcaaaaggtgtgtggaagggcagctgcttcgaggactttcaaaatatggaatgaagaatatagtctctgcatttggcataatacccagaaataatcgcttaatgtatattcatagctaccaaagctatgtgtggaataacatggtaagcaagaggatagaagactatggactaaaacctgttccaggggacctcgttctcaaaggagccacagccacctatattgaggaagatgatgttaataattactctatccatgatgtggtaatgcccttgcctggtttcgatgttatctacccaaagcataaaattcaagaagcctacagggaaatgctcacagctgacaatcttgatattgacaacatgagacacaaaattcgagattattccttgtcaggggcctaccgaaagatcattattcgtcctcagaatgttagctgggaagtcgttgcatatgatgatcccaaaattccacttttcaacacagatgtggacaacctagaagggaagacaccaccagtttttgcttctgaaggcaaatacagggctctgaaaatggatttttctctacccccttctacttacgccaccatggccattcgagaagtgctaaaaatggataccagtatcaagaaccagacgcagctgaatacaacctggcttcgctgagcagtaccttgtccacagattagaaaacgtacacaagtgtttgcttcctggctccctgtgcatttttgtcttagttcagactcatatatggatttcaaatctttgtaataaaaattatttgtatttttaag

SEQ ID NO: 330978 - DNA, 691 bp, Homo sapiens
ccgttaccagaactgtaaactgccttagtaaaagggttgaacagtaagcagtctatagttgcattttagtctggtttcatcatggtgattcaagagtagcctatgtcagtatttggatatgtataatccaggactccatgcactccagcctgagcaacaaagttaaagttaacaaatgttaaagtttaacccttaagcctaagtcttacttttcctagatgcacaaagaaagcagaattcttgctgcatggaattagttgtcagttcaatcatttaggttctctctttaaccgtggaattatgggagaaaaaagcactgttagcttgaaaattgatgtgtaaattccttaagtttgaagactgtgccattgatgtaaggcaggcttgtccaacctgcagcctgcgggccacatgcagcccaggacagctttgaatgtggccccacacaaatttgtaaacttttcctaaaacattatggccaagcatggtggctcatgcctgtaatcccagcactttgggaggccaaggtgggcagatcacttgaggctaggagttcgagaccaacctggccaatgtggtgaaaccttgtctctactaaaaatacaaaacaggcccgcgcagtggctcacgcctgtaattccaacactttgggaggccaacgcaggtggatctcctgaggtctggagttcaa

SEQ ID NO: 330979 - DNA, 3474 bp, Homo sapiens
  misc_feature (934)..(934): n is a, c, g, or t
  misc_feature (938)..(938): n is a, c, g, or t
agtcggctggagcgcatctggtcctccgcgcggaaagcgctgcttttgcctggccgccctagccgctggctcatccaagtggccttcgccgctctcttgcgtcccaaccagagcgctggccacctcgccgcccagctcacgccgcgcccgcgctcccaggctccgggttttcttaaatgttttcttggagccttaaagatggagatgacagaaatgactggtgtgtcgctgaaacgtggggcactggttgtcgaagataatgacagtggagtcccagttgaagagacaaaaaaacagaagctgtcggaatgcagtctaaccaaaggtcaagatgggctacagaatgactttctgtccatcagtgaagacgtgcctcggcctcctgacactgtcagtactgggaaaggtggaaagaattctgaggctcagttggaagatgaggaagaagaggaggaagatggactttcagaggagtgcgaggaggaggaatcagagagttttgcagacatgatgaagcatggactcactgaggctgacgtaggcatcaccaagtttgtgagttctcatcaagggttctcgggaatcttaaaagaaagatactccgacttcgttgttcatgaaataggaaaagatggacggatcagccatttgaatgacttgtccattccagtggatgaggaggacccttcagaagacatatttacagttttgacagctgaagaaaagcagcgattggaagagctccagctgttcaaaaataaggaaaccagtgttgccattgaggttatcgaggacaccaaagagaaaagaaccatcatccatcaggctatcaaatctctgtttccaggattagagacaaaaacagaggatagggaggggaagaaatacattgtagcctaccacgcagctgggaaaaaggctttggcaaaggtgnctgnagcagatccaagaaaacattcttggccaaaatctaggggaagttactgccacttcgtactatataaggaaaacaaagacaccatggatgctattaatgtactctccaaatacttaagagtcaagccaaatatattctcctacatgggaaccaaagataaaagggctataacagttcaagaaattgctgttctcaaaataactgcacaaagacttgcccacctgaataagtgcttgatgaactttaagctagggaatttcagctatcaaaaaaacccactgaaattgggagagcttcaaggaaaccacttcactgttgttctcagaaatataacaggaactgatgaccaagtacagcaagctatgaactctctcaaggagattggatttattaactactatggaatgcaaagatttggaaccacagctgtccctacgtatcaggttggaagagctatactacaaaattcctggacagaagtcatggatttaatattgaaaccccgctctggagctgaaaagggctacttggttaaatgcagagaagaatgggcaaagaccaaagacccaactgctgccctcagaaaactacctgtcaaaaggtgtgtggaagggcagctgcttcgaggactttcaaaatatggaatgaagaatatagtctctgcatttggcataatacccagaaataatcgcttaatgtatattcatagctaccaaagctatgtgtggaataacatggtaagcaagaggatagaagactatggactaaaacctgttccaggggacctcgttctcaaaggagccacagccacctatattgaggaagatgatgttaataattactctatccatgatgtggtaatgcccttgcctggtttcgatgttatctacccaaagcataaaattcaagaagcctacagggaaatgctcacagctgacaatcttgatattgacaacatgagacacaaaattcgagattattccttgtcaggggcctaccgaaagatcattattcgtcctcagaatgttagctgggaagtcgttgcatatgatgatcccaaaattccacttttcaacacagatgtggacaacctagaagggaagacaccaccagtttttgcttctgaaggcaaatacagggctctgaaaatggatttttctctacccccttctacttacgccaccatggccattcgagaagtgctaaaaatggataccagtatcaagaaccagacgcagctgaatacaacctggcttcgctgagcagtaccttgtccacagattagaaaacgtacacaagtgtttgcttcctggctccctgtgcatttttgtcttagttcagactcatatatggatttcaaatctttgtaataaaaattatttgtatttttaagtttttattagcttaaagaaataatttgcaatatttgtacatgtacacaaatcctgaggttcttaattttagctcagaatataaattagtcaaaatacacttcaggtgcttaaatcagagtaaaatgtcagctttacaataataaaaaaaggactttggtttaaagtagcaggtttaggttttgctacattctcaaaagacagcaggagtatttgacacatctgtgatggagtatacaacaatgcattttaagagcaaatgcaacaaaacaaatctggactatggataaataatttgagagctgccacccacaaatataaatacagtactcatgctgactgaaataataagacatctacaaatttataaacaaaaagtgattgtcattatcctgcttatgtactagattcaggcaagcattatagactttttggttgcggtggcttttgcatttatattatcaatgccttgcaggaacgttgcattgataggcccattttatttttttattttttttttcgagacaggatctcactctgtagcacaggctggattgcagtgcaatcctgcaattctcaatcttgcactgcagcctcgacctcccaggctccagtgactctcccacctcagcctcctaagtagctgggagtacaggcgcgcaccaccacgcctagctgatttttgtatttttttgtagagacgggggtttggccatgttgccgaggctaactcctgggattacaggcatgagctgtgctggccgggtttttttttcttgatgtaaacgtgtacagctgttttattagttaaggtctaatttttactctaggtgccttttatgttcagaactctttccactggactggtatttgctcaaaaataaataatggtagagaagaaaactataaaaatggacaaggctttcttctatcagtagcgtttaccctttgtcaccagtggctttggtatttccatgtctggcattgcataaacttctctggtgtgaaaggataaatatgcctttctaaagttgtatatcaaaattgtatcaatttttattttctatgatttctagaaacaaatgtaataaatatttttaaaatctcctttctactggttatgtaaataaatcaaataaatatatc

SEQ ID NO: 330980 - DNA, 2625 bp, Homo sapiens
gattttccactcaaaggttctatagcgaaaaatgagctcttacatctataacttttattatggtatatataatgttaattcttttgctttcaagatccaagaaaacattcttggccaaaatctaggggaagttactgccacttcgtactatataaggaaaacaaagacaccatggatgctattaatgtactctccaaatacttaagagtcaagccaaatatattctcctacatgggaaccaaagataaaagggctataacagttcaagaaattgctgttctcaaaataactgcacaaagacttgcccacctgaataagtgcttgatgaactttaagctagggaatttcagctatcaaaaaaacccactgaaattgggagagcttcaaggaaaccacttcactgttgttctcagaaatataacaggaactgatgaccaagtacagcaagctatgaactctctcaaggagattggatttattaactactatggaatgcaaagatttggaaccacagctgtccctacgtatcaggttggaagagctatactacaaaattcctggacagaagtcatggatttaatattgaaaccccgctctggagctgaaaagggctacttggttaaatgcagagaagaatgggcaaagaccaaagacccaactgctgccctcagaaaactacctgtcaaaaggtgtgtggaagggcagctgcttcgaggactttcaaaatatggaatgaagaatatagtctctgcatttggcataatacccagaaataatcgcttaatgtatattcatagctaccaaagctatgtgtggaataacatggtaagcaagaggatagaagactatggactaaaacctgttccaggggacctcgttctcaaaggagccacagccacctatattgaggaagatgatgttaataattactctatccatgatgtggtaatgcccttgcctggtttcgatgttatctacccaaagcataaaattcaagaagcctacagggaaatgctcacagctgacaatcttgatattgacaacatgagacacaaaattcgagattattccttgtcaggggcctaccgaaagatcattattcgtcctcagaatgttagctgggaagtcgttgcatatgatgatcccaaaattccacttttcaacacagatgtggacaacctagaagggaagacaccaccagtttttgcttctgaaggcaaatacagggctctgaaaatggatttttctctacccccttctacttacgccaccatggccattcgagaagtgctaaaaatggataccagtatcaagaaccagacgcagctgaatacaacctggcttcgctgagcagtaccttgtccacagattagaaaacgtacacaagtgtttgcttcctggctccctgtgcatttttgtcttagttcagactcatatatggatttcaaatctttgtaataaaaattatttgtatttttaagtttttattagcttaaagaaataatttgcaatatttgtacatgtacacaaatcctgaggttcttaattttagctcagaatataaattagtcaaaatacacttcaggtgcttaaatcagagtaaaatgtcagctttacaataataaaaaaaggactttggtttaaagtagcaggtttaggttttgctacattctcaaaagacagcaggagtatttgacacatctgtgatggagtatacaacaatgcattttaagagcaaatgcaacaaaacaaatctggactatggataaataatttgagagctgccacccacaaatataaatacagtactcatgctgactgaaataataagacatctacaaatttataaacaaaaagtgattgtcattatcctgcttatgtactagattcaggcaagcattatagactttttggttgcggtggcttttgcatttatattatcaatgccttgcaggaacgttgcattgataggcccattttatttttttattttttttttcgagacaggatctcactctgtagcacaggctggattgcagtgcaatcctgcaattctcaatcttgcactgcagcctcgacctcccaggctccagtgactctcccacctcagcctcctaagtagctgggagtacaggcgcgcaccaccacgcctagctgatttttgtatttttttgtagagacgggggtttggccatgttgccgaggctaactcctgggattacaggcatgagctgtgctggccgggtttttttttcttgatgtaaacgtgtacagctgttttattagttaaggtctaatttttactctaggtgccttttatgttcagaactctttccactggactggtatttgctcaaaaataaataatggtagagaagaaaactataaaaatggacaaggctttcttctatcagtagcgtttaccctttgtcaccagtggctttggtatttccatgtctggcattgcataaacttctctggtgtgaaaggataaatatgcctttctaaagttgtatatcaaaattgtatcaatttttattttctatgatttctagaaacaaatgtaataaatatttttaaaatctcctttctactggttatgtaaataaatcaaataaatatatc

SEQ ID NO: 330981 - DNA, 3420 bp, Homo sapiens
agtcggctggagcgcatctggtcctccgcgcggaaagcgctgcttttgcctggccgccctagccgctggctcatccaagtggccttcgccgctctcttgcgtcccaaccagagcgctggccacctcgccgcccagctcacgccgcgcccgcgctcccaggctccgggttttcttaaatgttttcttggagccttaaagatggagatgacagaaatgactggtgtgtcgctgaaacgtggggcactggttgtcgaagataatgacagtggagtcccagttgaagagacaaaaaaacagaagctgtcggaatgcagtctaaccaaaggtcaagatgggctacagaatgactttctgtccatcagtgaagacgtgcctcggcctcctgacactgtcagtactgggaaaggtggaaagaattctgaggctcagttggaagatgaggaagaagaggaggaagatggactttcagaggagtgcgaggaggaggaatcagagagttttgcagacatgatgaagcatggactcactgaggctgacgtaggcatcaccaagtttgtgagttctcatcaagggttctcgggaatcttaaaagaaagatactccgacttcgttgttcatgaaataggaaaagatggacggatcagccatttgaatgacttgtccattccagtggatgaggaggacccttcagaagacatatttacagttttgacagctgaagaaaagcagcgattggaagagctccagctgttcaaaaataaggaaaccagtgttgccattgaggttatcgaggacaccaaagagaaaagaaccatcatccatcaggctatcaaatctctgtttccaggattagagacaaaaacagaggatagggaggggaagaaatacattgtagcctaccacgcagctgggaaaaaggctttggcaaatccaagaaaacattcttggccaaaatctaggggaagttactgccacttcgtactatataaggaaaacaaagacaccatggatgctattaatgtactctccaaatacttaagagtcaagccaaatatattctcctacatgggaaccaaagataaaagggctataacagttcaagaaattgctgttctcaaaataactgcacaaagacttgcccacctgaataagtgcttgatgaactttaagctagggaatttcagctatcaaaaaaacccactgaaattgggagagcttcaaggaaaccacttcactgttgttctcagaaatataacaggaactgatgaccaagtacagcaagctatgaactctctcaaggagattggatttattaactactatggaatgcaaagatttggaaccacagctgtccctacgtatcaggttggaagagctatactacaaaattcctggacagaagtcatggatttaatattgaaaccccgctctggagctgaaaagggctacttggttaaatgcagagaagaatgggcaaagaccaaagacccaactgctgccctcagaaaactacctgtcaaaaggtgtgtggaagggcagctgcttcgaggactttcaaaatatggaatgaagaatatagtctctgcatttggcataatacccagaaataatcgcttaatgtatattcatagctaccaaagctatgtgtggaataacatggtaagcaagaggatagaagactatggactaaaacctgttccaggggacctcgttctcaaaggagccacagccacctatattgaggaagatgatgttaataattactctatccatgatgtggtaatgcccttgcctggtttcgatgttatctacccaaagcataaaattcaagaagcctacagggaaatgctcacagctgacaatcttgatattgacaacatgagacacaaaattcgagattattccttgtcaggggcctaccgaaagatcattattcgtcctcagaatgttagctgggaagtcgttgcatatgatgatcccaaaattccacttttcaacacagatgtggacaacctagaagggaagacaccaccagtttttgcttctgaaggcaaatacagggctctgaaaatggatttttctctacccccttctacttacgccaccatggccattcgagaagtgctaaaaatggataccagtatcaagaaccagacgcagctgaatacaacctggcttcgctgagcagtaccttgtccacagattagaaaacgtacacaagtgtttgcttcctggctccctgtgcatttttgtcttagttcagactcatatatggatttcaaatctttgtaataaaaattatttgtatttttaagtttttattagcttaaagaaataatttgcaatatttgtacatgtacacaaatcctgaggttcttaattttagctcagaatataaattagtcaaaatacacttcaggtgcttaaatcagagtaaaatgtcagctttacaataataaaaaaaggactttggtttaaagtagcaggtttaggttttgctacattctcaaaagacagcaggagtatttgacacatctgtgatggagtatacaacaatgcattttaagagcaaatgcaacaaaacaaatctggactatggataaataatttgagagctgccacccacaaatataaatacagtactcatgctgactgaaataataagacatctacaaatttataaacaaaaagtgattgtcattatcctgcttatgtactagattcaggcaagcattatagactttttggttgcggtggcttttgcatttatattatcaatgccttgcaggaacgttgcattgataggcccattttatttttttattttttttttcgagacaggatctcactctgtagcacaggctggattgcagtgcaatcctgcaattctcaatcttgcactgcagcctcgacctcccaggctccagtgactctcccacctcagcctcctaagtagctgggagtacaggcgcgcaccaccacgcctagctgatttttgtatttttttgtagagacgggggtttggccatgttgccgaggctaactcctgggattacaggcatgagctgtgctggccgggtttttttttcttgatgtaaacgtgtacagctgttttattagttaaggtctaatttttactctaggtgccttttatgttcagaactctttccactggactggtatttgctcaaaaataaataatggtagagaagaaaactataaaaatggacaaggctttcttctatcagtagcgtttaccctttgtcaccagtggctttggtatttccatgtctggcattgcataaacttctctggtgtgaaaggataaatatgcctttctaaagttgtatatcaaaattgtatcaatttttattttctatgatttctagaaacaaatgtaataaatatttttaaaatctc

SEQ ID NO: 330982 - DNA, 570 bp, Homo sapiens
tgtactttaagttatggaagtctgtctattgggtaagtcatttaaccctagctttttccccccgcagctgaaaagggctacttggttaaatgcagagaagaatgggcaaagaccaaagacccaactgctgccctcagaaaactacctgtcaaaaggtgtgtggaagggcagctgcttcgaggactttcaaaatatggaatgaagaatatagtctctgcatttggcatagtgagtgcaatttgtgaagtcaggcaatggctcaaggcgttttaatgctttttaaatttcatcttgaaagattttactaaactttgaaagagcagaaggtaaataaggatcctttggtgatctctgaggtgtttcacctgagtagtctttgttcagaccctgagtggtgatgttgggggtggatgcgggcattacttattgagggcacaagaaaagcgtcaatgtggaaaacataatcttcagtggaaattctgtgtaaattaagtctcttggtatttgagaaatttcgaatctattgtatagtcatttcttgatcattccgttaccagaactgtaaactgc

SEQ ID NO: 330983 - DNA, 483 bp, Homo sapiens
ttaggtataaaatctggccctgctatattattcaagattcctaactataattatttacagtaaacttacttgtttttcttgctaaataaatgatgatgagtggcttagtaccttttatgaaagttcacattcacacttatctttattcatatgttttgaagggaagtcgttgcatatgatgatcccaaaattccacttttcaacacagatgtggacaacctagaagggaagacaccaccagtttttgcttctggtaagtttactcagtcatcagctctgtgttgactttgaaatgttttgttaaacaaaaacataatttttttttgaaaactgctcttacaagcactaccaccacccatgatttcattgttgtgttttatgaccttactttcacaattatggctgaaagttagtgattaaaaccagtaaatcctcctgaaaataagtgcatgttatagatggttgtgatattaggtgatggag

SEQ ID NO: 330984 - DNA, 3459 bp, Homo sapiens
agtcggctggagcgcatctggtcctccgcgcggaaagcgctgcttttgcctggccgccctagccgctggctcatccaagtggccttcgccgctctcttgcgtcccaaccagagcgctggccacctcgccgcccagctcacgccgcgcccgcgctcccaggctccgggttttcttaaatgttttcttggagccttaaagatggagatgacagaaatgactggtgtgtcgctgaaacgtggggcactggttgtcgaagataatgacagtggagtcccagttgaagagacaaaaaaacagaagctgtcggaatgcagtctaaccaaaggtcaagatgggctacagaatgactttctgtccatcagtgaagacgtgcctcggcctcctgacactgtcagtactgggaaaggtggaaagaattctgaggctcagttggaagatgaggaagaagaggaggaagatggactttcagaggagtgcgaggaggaggaatcagagagttttgcagacatgatgaagcatggactcactgaggctgacgtaggcatcaccaagtttgtgagttctcatcaagggttctcgggaatcttaaaagaaagatactccgacttcgttgttcatgaaataggaaaagatggacggatcagccatttgaatgacttgtccattccagtggatgaggaggacccttcagaagacatatttacagttttgacagctgaagaaaagcagcgattggaagagctccagctgttcaaaaataaggaaaccagtgttgccattgaggttatcgaggacaccaaagagaaaagaaccatcatccatcaggctatcaaatctctgtttccaggattagagacaaaaacagaggatagggaggggaagaaatacattgtagcctaccacgcagctgggaaaaaggctttggcaaatccaagaaaacattcttggccaaaatctaggggaagttactgccacttcgtactatataaggaaaacaaagacaccatggatgctattaatgtactctccaaatacttaagagtcaagccaaatatattctcctacatgggaaccaaagataaaagggctataacagttcaagaaattgctgttctcaaaataactgcacaaagacttgcccacctgaataagtgcttgatgaactttaagctagggaatttcagctatcaaaaaaacccactgaaattgggagagcttcaaggaaaccacttcactgttgttctcagaaatataacaggaactgatgaccaagtacagcaagctatgaactctctcaaggagattggatttattaactactatggaatgcaaagatttggaaccacagctgtccctacgtatcaggttggaagagctatactacaaaattcctggacagaagtcatggatttaatattgaaaccccgctctggagctgaaaagggctacttggttaaatgcagagaagaatgggcaaagaccaaagacccaactgctgccctcagaaaactacctgtcaaaaggtgtgtggaagggcagctgcttcgaggactttcaaaatatggaatgaagaatatagtctctgcatttggcataatacccagaaataatcgcttaatgtatattcatagctaccaaagctatgtgtggaataacatggtaagcaagaggatagaagactatggactaaaacctgttccaggggacctcgttctcaaaggagccacagccacctatattgaggaagatgatgttaataattactctatccatgatgtggtaatgcccttgcctggtttcgatgttatctacccaaagcataaaattcaagaagcctacagggaaatgctcacagctgacaatcttgatattgacaacatgagacacaaaattcgagattattccttgtcaggggcctaccgaaagatcattattcgtcctcagaatgttagctgggaagtcgttgcatatgatgatcccaaaattccacttttcaacacagatgtggacaacctagaagggaagacaccaccagtttttgcttctgaaggcaaatacagggctctgaaaatggatttttctctacccccttctacttacgccaccatggccattcgagaagtgctaaaaatggataccagtatcaagaaccagacgcagctgaatacaacctggcttcgctgagcagtaccttgtccacagattagaaaacgtacacaagtgtttgcttcctggctccctgtgcatttttgtcttagttcagactcatatatggatttcaaatctttgtaataaaaattatttgtatttttaagtttttattagcttaaagaaataatttgcaatatttgtacatgtacacaaatcctgaggttcttaattttagctcagaatataaattagtcaaaatacacttcaggtgcttaaatcagagtaaaatgtcagctttacaataataaaaaaaggactttggtttaaagtagcaggtttaggttttgctacattctcaaaagacagcaggagtatttgacacatctgtgatggagtatacaacaatgcattttaagagcaaatgcaacaaaacaaatctggactatggataaataatttgagagctgccacccacaaatataaatacagtactcatgctgactgaaataataagacatctacaaatttataaacaaaaagtgattgtcattatcctgcttatgtactagattcaggcaagcattatagactttttggttgcggtggcttttgcatttatattatcaatgccttgcaggaacgttgcattgataggcccattttatttttttattttttttttcgagacaggatctcactctgtagcacaggctggattgcagtgcaatcctgcaattctcaatcttgcactgcagcctcgacctcccaggctccagtgactctcccacctcagcctcctaagtagctgggagtacaggcgcgcaccaccacgcctagctgatttttgtatttttttgtagagacgggggtttggccatgttgccgaggctaactcctgggattacaggcatgagctgtgctggccgggtttttttttcttgatgtaaacgtgtacagctgttttattagttaaggtctaatttttactctaggtgccttttatgttcagaactctttccactggactggtatttgctcaaaaataaataatggtagagaagaaaactataaaaatggacaaggctttcttctatcagtagcgtttaccctttgtcaccagtggctttggtatttccatgtctggcattgcataaacttctctggtgtgaaaggataaatatgcctttctaaagttgtatatcaaaattgtatcaatttttattttctatgatttctagaaacaaatgtaataaatatttttaaaatctcctttctactggttatgtaaataaatcaaataaatatatc

SEQ ID NO: 330985 - DNA, 3506 bp, Homo sapiens
agtcggctggagcgcatctggtcctccgcgcggaaagcgctgcttttgcctggccgccctagccgctggctcatccaagtggccttcgccgctctcttgcgtcccaaccagagcgctggccacctcgccgcccagctcacgccgcgcccgcgctcccaggctccgggttttcttaaatgttttcttggagccttaaagatggagatgacagaaatgactggtgtgtcgctgaaacgtggggcactggttgtcgaagataatgacagtggagtcccagttgaagagacaaaaaaacagaagctgtcggaatgcagtctaaccaaaggtcaagatgggctacagaatgactttctgtccatcagtgaagacgtgcctcggcctcctgacactgtcagtactgggaaaggtggaaagaattctgaggctcagttggaagatgaggaagaagaggaggaagatggactttcagaggagtgcgaggaggaggaatcagagagttttgcagacatgatgaagcatggactcactgaggctgacgtaggcatcaccaagtttgtgagttctcatcaagggttctcgggaatcttaaaagaaagatactccgacttcgttgttcatgaaataggaaaagatggacggatcagccatttgaatgacttgtccattccagtggatgaggaggacccttcagaagacatatttacagttttgacagctgaagaaaagcagcgattggaagagctccagctgttcaaaaataaggaaaccagtgttgccattgaggttatcgaggacaccaaagagaaaagaaccatcatccatcaggctatcaaatctctgtttccaggattagagacaaaaacagaggatagggaggggaagaaatacattgtagcctaccacgcagctgggaaaaaggctttggcaaatccaagaaaacattcttggccaaaatctaggggaagttactgccacttcgtactatataaggaaaacaaagacaccatggatgctattaatgtactctccaaatacttaagagtcaagccaaatatattctcctacatgggaaccaaagataaaagggctataacagttcaagaaattgctgttctcaaaataactgcacaaagacttgcccacctgaaattccctagcttaaagttcatcaagcacttattcaggtgggcaagtctaagtgcttgatgaactttaagctagggaatttcagctatcaaaaaaacccactgaaattgggagagcttcaaggaaaccacttcactgttgttctcagaaatataacaggaactgatgaccaagtacagcaagctatgaactctctcaaggagattggatttattaactactatggaatgcaaagatttggaaccacagctgtccctacgtatcaggttggaagagctatactacaaaattcctggacagaagtcatggatttaatattgaaaccccgctctggagctgaaaagggctacttggttaaatgcagagaagaatgggcaaagaccaaagacccaactgctgccctcagaaaactacctgtcaaaaggtgtgtggaagggcagctgcttcgaggactttcaaaatatggaatgaagaatatagtctctgcatttggcataatacccagaaataatcgcttaatgtatattcatagctaccaaagctatgtgtggaataacatggtaagcaagaggatagaagactatggactaaaacctgttccaggggacctcgttctcaaaggagccacagccacctatattgaggaagatgatgttaataattactctatccatgatgtggtaatgcccttgcctggtttcgatgttatctacccaaagcataaaattcaagaagcctacagggaaatgctcacagctgacaatcttgatattgacaacatgagacacaaaattcgagattattccttgtcaggggcctaccgaaagatcattattcgtcctcagaatgttagctgggaagtcgttgcatatgatgatcccaaaattccacttttcaacacagatgtggacaacctagaagggaagacaccaccagtttttgcttctgaaggcaaatacagggctctgaaaatggatttttctctacccccttctacttacgccaccatggccattcgagaagtgctaaaaatggataccagtatcaagaaccagacgcagctgaatacaacctggcttcgctgagcagtaccttgtccacagattagaaaacgtacacaagtgtttgcttcctggctccctgtgcatttttgtcttagttcagactcatatatggatttcaaatctttgtaataaaaattatttgtatttttaagtttttattagcttaaagaaataatttgcaatatttgtacatgtacacaaatcctgaggttcttaattttagctcagaatataaattagtcaaaatacacttcaggtgcttaaatcagagtaaaatgtcagctttacaataataaaaaaaggactttggtttaaagtagcaggtttaggttttgctacattctcaaaagacagcaggagtatttgacacatctgtgatggagtatacaacaatgcattttaagagcaaatgcaacaaaacaaatctggactatggataaataatttgagagctgccacccacaaatataaatacagtactcatgctgactgaaataataagacatctacaaatttataaacaaaaagtgattgtcattatcctgcttatgtactagattcaggcaagcattatagactttttggttgcggtggcttttgcatttatattatcaatgccttgcaggaacgttgcattgataggcccattttatttttttattttttttttcgagacaggatctcactctgtagcacaggctggattgcagtgcaatcctgcaattctcaatcttgcactgcagcctcgacctcccaggctccagtgactctcccacctcagcctcctaagtagctgggagtacaggcgcgcaccaccacgcctagctgatttttgtatttttttgtagagacgggggtttggccatgttgccgaggctaactcctgggattacaggcatgagctgtgctggccgggtttttttttcttgatgtaaacgtgtacagctgttttattagttaaggtctaatttttactctaggtgccttttatgttcagaactctttccactggactggtatttgctcaaaaataaataatggtagagaagaaaactataaaaatggacaaggctttcttctatcagtagcgtttaccctttgtcaccagtggctttggtatttccatgtctggcattgcataaacttctctggtgtgaaaggataaatatgcctttctaaagttgtatatcaaaattgtatcaatttttattttctatgatttctagaaacaaatgtaataaatatttttaaaatctcctttctactggttatgtaaataaatcaaataaatatatc

SEQ ID NO: 330986 - DNA, 3682 bp, Homo sapiens
  misc_feature (934)..(934): n is a, c, g, or t
  misc_feature (938)..(938): n is a, c, g, or t
agtcggctggagcgcatctggtcctccgcgcggaaagcgctgcttttgcctggccgccctagccgctggctcatccaagtggccttcgccgctctcttgcgtcccaaccagagcgctggccacctcgccgcccagctcacgccgcgcccgcgctcccaggctccgggttttcttaaatgttttcttggagccttaaagatggagatgacagaaatgactggtgtgtcgctgaaacgtggggcactggttgtcgaagataatgacagtggagtcccagttgaagagacaaaaaaacagaagctgtcggaatgcagtctaaccaaaggtcaagatgggctacagaatgactttctgtccatcagtgaagacgtgcctcggcctcctgacactgtcagtactgggaaaggtggaaagaattctgaggctcagttggaagatgaggaagaagaggaggaagatggactttcagaggagtgcgaggaggaggaatcagagagttttgcagacatgatgaagcatggactcactgaggctgacgtaggcatcaccaagtttgtgagttctcatcaagggttctcgggaatcttaaaagaaagatactccgacttcgttgttcatgaaataggaaaagatggacggatcagccatttgaatgacttgtccattccagtggatgaggaggacccttcagaagacatatttacagttttgacagctgaagaaaagcagcgattggaagagctccagctgttcaaaaataaggaaaccagtgttgccattgaggttatcgaggacaccaaagagaaaagaaccatcatccatcaggctatcaaatctctgtttccaggattagagacaaaaacagaggatagggaggggaagaaatacattgtagcctaccacgcagctgggaaaaaggctttggcaaaggtgnctgnagcagatccaagaaaacattcttggccaaaatctaggggaagttactgccacttcgtactatataaggaaaacaaagacaccatggatgctattaatgtactctccaaatacttaagagtcaagccaaatatattctcctacatgggaaccaaagataaaagggctataacagttcaagaaattgctgttctcaaaataactgcacaaagacttgcccacctgaataagtgcttgatgaactttaagctagggaatttcagctatcaaaaaaacccactgaaattgggagagcttcaaggaaaccacttcactgttgttctcagaaatataacaggaactgatgaccaagtacagcaagctatgaactctctcaaggagattggatttattaactactatggaatgcaaagatttggaaccacagctgtccctacgtatcaggttggaagagctatactacaaaattcctggacagaagtcatggatttaatattgaaaccccgctctggagctgaaaagggctacttggttaaatgcagagaagaatgggcaaagaccaaagacccaactgctgccctcagaaaactacctgtcaaaaggtgtgtggaagggcagctgcttcgaggactttcaaaatatggaatgaagaatatagtctctgcatttggcataatacccagaaataatcgcttaatgtatattcatagctaccaaagctatgtgtggaataacatggtaagcaagaggatagaagactatggactaaaacctgttccaggggacctcgttctcaaaggagccacagccacctatattgaggaagatgatgttaataattactctatccatgatgtggtaatgcccttgcctggtttcgatgttatctacccaaagcataaaattcaagaagcctacagggaaatgctcacagctgacaatcttgatattgacaacatgagacacaaaattcgagattattccttgtcaggggcctaccgaaagatcattattcgtcctcagaatgttagctgggaagtcgttgcatatgatgatcccaaaattccacttttcaacacagatgtggacaacctagaagggaagacaccaccagtttttgcttctgaaggcaaatacagggctctgaaaatggatttttctctacccccttctacttacgccaccatggccattcgagaagtgctaaaaatggataccagtatcaagaaccagacgcagctgaatacaacctggcttcgctgagcagtaccttgtccacagattagaaaacgtacacaagtgtttgcttcctggctccctgtgcatttttgtcttagttcagactcatatatggatttcaaatctttgtaataaaaattatttgtatttttaagtttttattagcttaaagaaataatttgcaatatttgtacatgtacacaaatcctgaggttcttaattttagctcagaatataaattagtcaaaatacacttcaggtgcttaaatcagagtaaaatgtcagctttacaataataaaaaaaggactttggtttaaagtagcaggtttaggttttgctacattctcaaaagacagcaggagtatttgacacatctgtgatggagtatacaacaatgcattttaagagcaaatgcaacaaaacaaatctggactatggataaataatttgagagctgccacccacaaatataaatacagtactcatgctgactgaaataataagacatctacaaatttataaacaaaaagtgattgtcattatcctgcttatgtactagattcaggcaagcattatagactttttggttgcggtggcttttgcatttatattatcaatgccttgcaggaacgttgcattgataggcccattttatttttttattttttttttcgagacaggatctcactctgtagcacaggctggattgcagtgcaatcctgcaattctcaatcttgcactgcagcctcgacctcccaggctccagtgactctcccacctcagcctcctaagtagctgggagtacaggcgcgcaccaccacgcctagctgatttttgtatttttttgtagagacgggggtttggccatgttgccgaggctaactcctgggattacaggcatgagctgtgctggccgggtttttttttcttgatgtaaacgtgtacagctgttttattagttaaggtctaatttttactctaggtgccttttatgttcagaactctttccactggactggtatttgctcaaaaataaataatggtagagaagaaaactataaaaatggacaaggctttcttctatcagtagcgtttaccctttgtcaccagtggctttggtatttccatgtctggcattgcataaacttctctggtgtgaaaggataaatatgcctttctaaagttgtatatcaaaattgtatcaatttttattttctatgatttctagaaacaaatgtaataaatatttttaaaatctcctttctactggttatgtaaataaatcaaataaatatatcaaaatgagtgcagataagaatcttgaccttgactaaaggtaaggaactaaatgaatgtgggatcctcatcagaaatggtggtgacaccaaaatgtgttgtgatcagctgtgaagtatgaggataatctgagtcaaatgctacgaataattgactgtgttggactggactccaggttattggaatcactcactcaccttccaatgtgct

SEQ ID NO: 330987 - DNA, 672 bp, Homo sapiens
gatatttacaatctgaagatcaaaaataattgttgcttgttgctatgtatatccctccacaaatgtgcatttttacaaaactttatagcttttgtttaataatgaactatctgtacagctctttaaagattataaagcactttcatatatatttttatctcattgaatacacagctcttctctgagttttattcattgatagggaaacaggcttagaatgaagtgtcatgcccaacatgatacaattggaaggtggaagatcaaggtcttctatttgagtcttctctcactaattctggtgtactcccagatatatcctattggcctcccaaatccaagttacccagtcagcatcctgctttctctttctttctaccctgtccagcactagaggataaggaataatttgtgtgggtttgtaaatgactgaaataatggccagtggggtgaggagtgagaaggatggcacagaagtaagtgtctgataaagtctgggagtcaacagcaaaaggtagcacagcaaaagagcaaggtcttttccctaagtggcagaaataacactgaactcaggagtcaggacaaatcagctggaaacatctcatgggcagttaaatcactgcttacagcctgcataaggcttcaccgctccaggcctcagcttcctcgtgggta

SEQ ID NO: 330988 - DNA, 519 bp, Homo sapiens
agatactcaggaggctgaggtgaaaggattgcttgagccagggaggtcaaggctgcagtgagccgtgaaaggccactgcaactccagcctgggtgacagaatgagaccttgtctcaaaaaaaaaaaaaaaagtttcttggaacctatacgtttttttttgttttttttttgaaaagccagaccttgtgcccttgttttgaacaccgactgggaagatggggcttaggtaacagccaaacctggctgtcagctgtgtgggagccaccaccctctctgggaagagttcctgcttctgtatggcaagcataaatcaagctcagtctgggttatggagaagttgaaaattgttttgttcctcattagtttataattgtatgaaatacgattttaatgaaaacttttcagaattcacgtttgtgtagatatttcagagaaccatttttactttacatcctaaaactgccttttcctatggttttgtcaataaaacactatgatgttggtctgtttccttttata

SEQ ID NO: 330989 - DNA, 3313 bp, Homo sapiens
tacgccgctgatgtggagtagggccgagcgcggaacgcgaggggctgctggggtgtttgtcgcagcgggttttcctcggcggtttgcggagctgctaggatggagcaggttgcggagggagcaagggtgaccgcagtccctgtgtcagctgccgacagcactgaggagttggccgaagtcgaagaaggagttggagtagtgggcgaagataatgacgcagccgcgagaggagcggaggcctttggcgacagtgaggaggacggagaggatgtgttcgaggtggagaagatcctggacatgaagaccgaggggggtaaagttctttacaaagttcgctggaaaggctatacatcggatgatgatacctgggagcccgagattcacctggaggactgtaaagaagtgcttcttgaatttaggaagaaaattgcagagaacaaagccaaagcagtcaggaaggatattcagagactatccttaaataacgacatatttgaggcgaactctgatagcgatcagcaaagtgagacaaaagaagatacttccccaaagaagaaaaagaaaaaattgaggcagagagaagagaaaagcccagatgatctgaaaaagaaaaaagcaaaggccgggaagctaaaagacaagtccaaaccagacctggagagctccttggaaagtttagtttttgatttaaggacaaagaaaagaatttctgaagccaaagaagaactaaaggagtccaaaaagcccaaaaaagatgaagtaaaagaaacaaaagaattaaagaaagttaaaaagggtgaaataagagatttaaagacgaaaacaagagaagatcccaaagaaaatagaaaaacaaaaaaagaaaaatttgtcgaatcccaggtggaatctgaatcaagtgtacttaatgattctccctttccagaggatgacagtgaagggctacattccgacagcagagaagagaaacaaaacactaaaagtgcaagagagagagcagggcaggacatggggctggagcatggctttgagaagcccctagacagtgccatgagtgctgaggaggataccgatgtcagaggcaggaggaaaaagaagaccccgagaaaggctgaggacactagagagaacaggaagctagagaacaagaacgctttcttagagaagaaaactgtgcctaaaaagcagaggaatcaagacagaagcaaaagtgctgcagagttagagaagctgatgcctgtatctgcccaaacgccaaagggccggaggttgagcggggaagagagaggcctctggtccacggactcagccgaggaggacaaagaaaccaaaagaaatgaatccaaagaaaaatatcagaaaaggcatgattctgacaaggaagaaaaaggcagaaaagagccaaaaggattaaagacacttaaggaaatcagaaatgcatttgatttatttaaattaactccagaagaaaaaaatgatgtttctgagaataatcggaaaagggaagaaataccactggattttaaaaccatagacgatcacaaaaccaaggaaaacaaacagtcacttaaagaaaggagaaacaccagagacgaaacggatacttgggcatacattgctgcagaaggtgatcaggaggttttagacagcgtgtgccaagcagatgagaattcagatggcaggcagcagattctgagtttgggcatggacctgcagttggaatggatgaagttggaagatttccaaaagcaccttgatgggaaagatgagaattttgctgcaacagatgcaattccaagtaatgtgttaagggatgctgtgaaaaatggggattatattactgtaaaagttgcacttaattcaaatgaagaatataacctggaccaagaggattccagtggaatgacactggtgatgcttgccgccgccggagggcaggacgacctcctgcgactcctcatcacaaaaggcgcgaaagtgaacggtcggcagaagaacgggaccaccgccctcattcatgctgcagagaagaactttttaacaacagtggctattcttttggaagcaggagcttttgtaaatgtccagcaaagcaatggtgagactgcactgatgaaggcctgtaaaagaggaaattcagacatcgtacgactcgtaattgaatgtggagctgactgcaatattttgtcaaagcaccagaatagtgccctgcactttgcgaagcagtctaacaatgtgcttgtgtacgacttgctgaagaaccatttagagacactttcaagagtagcagaagagacaataaaggattactttgaagctcgccttgctctgctagaaccagtttttccaatcgcatgtcatcgactctgtgagggtccagatttttcaacagatttcaattacaaacccccacagaacataccagaaggctctggcatcctgctgtttatcttccatgcaaactttttgggtaaagaagttattgctcggctctgtggaccgtgtagtgtacaagctgtagttctgaatgataaatttcagcttcctgtttttctggacagtcattttgtttactcattcagccctgttgcaggtcccaataaactcttcataaggttgacagaagcaccctctgccaaggttaagttgctaataggtgcatacagagtgcagctgcagtgaccaaacagaagggactgggcggagttctcttcagaccgattcctatactctctttgacagcagtttggaattcttctagcacatctatgtaaagttttgtctgtaaacctcttgcagttaagcctgttgtctgttgtagtctgtaagatgcgacatagctgtgtctgtgccagtatgccggaatctcagtgcagtgtccagactgcgtatttcagtttttccacaatgtggatagtacatatgaggattatttaagaaaattaaagacttcactttcttttttctggagacggagtttcgctcttgttgcccaggctggagtgcaatggtgcgatctcggctcactgcaagctctgcctcctgggttcaagtgattctcctgcctcagcctcctgagtagctgggattacagacacccgccatggcacccagctaattttgtatttttagtagagatggggtttatccatgttggtcaggctggtcttgaactcctgacctcaggtgatccgcccgcctcggcctcccaaagtgcttggattacaggcatgagccaccgcacccagcaagagttattttcttaacttgaaattttctactagccctggtgaacttctgtgcttaaaaaaaa

SEQ ID NO: 330990 - DNA, 980 bp, Homo sapiens
tacgccgctgatgtggagtagggccgagcgcggaacgcgaggggctgctggggtgtttgtcgcagcgggttttcctcggcggtttgcggagctgctaggatggagcaggttgcggagggagcaagggtgaccgcagtccctgtgtcagctgccgacagcactgaggagttggccgaagtcgaagaaggagttggagtagtgggcgaagataatgacgcagccgcgagaggagcggaggcctttggcgacagtgaggaggacggagaggatgtgttcgaggtggagaagatcctggacatgaagaccgaggggggtaaagttctttacaaagttcgctggaaaggctatacatcggatgatgatacctgggagcccgagattcacctggaggactgtaaagaagtgcttcttgaatttaggaagaaaattgcagagaacaaagccaaagcagtcaggaaggatattcagagactatccttaaataacgacatatttgaggcgaactctgatagcgatcagcaaagtgagacaaaagaagatacttccccaaagaagaaaaagaaaaaattgaggcagagagaagagaaaagcccagatgatctgaaaaagaaaaaagcaaaggccgggaagctaaaagacaagtccaaaccagacctggagagctccttggaagcgtacagacaagtccaaaccagacctgggagctcctgggaaaggtgtagctctggaatctaaggaccaaggaaagaatctcggtagccatagaagaactaaggggtcaaaaagcccgaaagatgagtaagaacaacgaatcaggacgtcacgcggcatcgcgcctcggcgaaccggagctcccgcacggagcgagaaactgggcccgggacggcggtatggacctcaggacggggcccggaaaacacagcgagcggcggggagcaaccagacaggacggaacggaaagcgccacggaggcgagaagg

SEQ ID NO: 330991 - DNA, 788 bp, Homo sapiens
tacgccgctgatgtggagtagggccgagcgcggaacgcgaggggctgctggggtgtttgtcgcagcgggttttcctcggcggtttgcggagctgctaggatggagcaggttgcggagggagcaagggtgaccgcagtccctgtgtcagctgccgacagcactgaggagttggccgaagtcgaagaaggagttggagtagtgggcgaagataatgacgcagccgcgagaggagcggaggcctttggcgacagtgaggaggacggagaggatgtgttcgaggtggagaagatcctggacatgaagaccgaggggggtaaagttctttacaaagttcgctggaaaggctatacatcggatgatgatacctgggagcccgagattcacctggaggactgtaaagaagtgcttcttgaatttaggaagaaaattgcagagaacaaagccaaagcagtcaggaaggatattcaggtactatgttttgtctcatatttgtttttacatacataaatttattgtaaattttaactctcaaagtatgtgtagtaaatgatttacaaataacaaagtgtaccgtattctttagtgtaaattccatgtagccaattctcacagactgctttcagtgatttttgctgggttcttctttctgtacccaacctacagttgcagttgacaaacaagaatagtttggagatgaatattgatattttcctttaagttaagagtaaggtcaaggtggagattgtatatttattctgcattattaactatgtcttatgcctgctttt

SEQ ID NO: 330992 - DNA, 682 bp, Homo sapiens
ggtgtgctgggtcgatctagagatccccaacgatggtcctcagctctcatggctttgagaagcccctagacagtgccatgagtgctgaggaggataccgatgtcagaggcaggaggaaaaagaagaccccgagaaaggctgaggacactagagagaacaggaagctagagaacaagaacgctttcttagagaagaaaactgtgcctaaaaagcagaggaatcaagacagaagcaaaagtgctgcagagttagagaagctgatgcctgtatctgcccaaacgccaaagggccggaggttgagcggggaagagagaggcctctggtccacggactcagccgaggagccatcgttgccctggaccgccaaacagctactcagctgcttaagctggcccacaagtacagaccagagacaaagcaagagaagaagcagagactgttggcccgggccgagaagaaggctgctggcaaaggggacgtcccaacgaagagaccacctgtccttcgagcaggagttaacaccgtcaccaccttggtggagaacaagaaagctcagctggtggtgattgcacacgacgtggatcccatcgagctggttgtcttattgcttgcctgtgtgtaaaatggggtccttactgatatcatggaaggcagatggacgtagtcaaggagactgccatgt

SEQ ID NO: 330993 - DNA, 512 bp, Homo sapiens
cactgttagaattatttccttggactgaattaagcaaaatttgctagatatagacattttaacacttgtactgtatattgctgggggcattctaatccagtttcccagattgattctgtcatttgtatatttttaataaatcaagggaaaaataaatcactttttttttttttttgaagacagggtctcgctctgttgtccaggctggagtgcagtggcgcggattacagctcactggagtcttgacttcccaggcacaagcaatcctcccacctcagcctcctaactacctgggactaaaaatgcacgccaccacatccggctaattttttgtattttttgtagagatggggtttcaccatgttggccaggctggtctcaaacttctgggctcaagcgattgtccgccttggcctcctccacaacatcttgacttatgaaataaaaaataaaacttatttatgattcttttacatcattggtgttttaagggcttctggtgtaagtttgaa

SEQ ID NO: 330994 - DNA, 3420 bp, Homo sapiens
tacgccgctgatgtggagtagggccgagcgcggaacgcgaggggctgctggggtgtttgtcgcagcgggttttcctcggcggtttgcggagctgctaggatggagcaggttgcggagggagcaagggtgaccgcagtccctgtgtcagctgccgacagcactgaggagttggccgaagtcgaagaaggagttggagtagtgggcgaagataatgacgcagccgcgagaggagcggaggcctttggcgacagtgaggaggacggagaggatgtgttcgaggtggagaagatcctggacatgaagaccgaggggggtaaagttctttacaaagttcgctggaaaggctatacatcggatgatgatacctgggagcccgagattcacctggaggactgtaaagaagtgcttcttgaatttaggaagaaaattgcagagaacaaagccaaagcagtcaggaaggatattcagagactatccttaaataacgacatatttgaggcgaactctgatagcgatcagcaaagtgagacaaaagaagatacttccccaaagaagaaaaagaaaaaattgaggcagagagaagagaaaagcccagatgatctgaaaaagaaaaaagcaaaggccgggaagctaaaagacaagtccaaaccagacctggagagctccttggaaagtttagtttttgatttaaggacaaagaaaagaatttctgaagccaaagaagaactaaaggagtccaaaaagcccaaaaaagatgaagtaaaagaaacaaaagaattaaagaaagttaaaaagggtgaaataagagatttaaagacgaaaacaagagaagatcccaaagaaaatagaaaaacaaaaaaagaaaaatttgtcgaatcccaggtggaatctgaatcaagtgtacttaatgattctccctttccagaggatgacagtgaagggctacattccgacagcagagaagagaaacaaaacactaaaagtgcaagagagagagcagggcaggacatggggctggagcatggctttgagaagcccctagacagtgccatgagtgctgaggaggataccgatgtcagaggcaggaggaaaaagaagaccccgagaaaggctgaggacactagagagaacaggaagctagagaacaagaacgctttcttagagaagaaaactgtgcctaaaaagcagaggaatcaagacagaagcaaaagtgctgcagagttagagaagctgatgcctgtatctgcccaaacgccaaagggccggaggttgagcggggaagagagaggcctctggtccacggactcagccgaggaggacaaagaaaccaaaagaaatgaatccaaagaaaaatatcagaaaaggcatgattctgacaaggaagaaaaaggcagaaaagagccaaaaggattaaagacacttaaggaaatcagaaatgcatttgatttatttaaattaactccagaagaaaaaaatgatgtttctgagaataatcggaaaagggaagaaataccactggattttaaaaccatagacgatcacaaaaccaaggaaaacaaacagtcacttaaagaaaggagaaacaccagagacgaaacggatacttgggcatacattgctgcagaaggtgatcaggaggttttagacagcgtgtgccaagcagatgagaattcagatggcaggcagcagattctgagtttgggcatggacctgcagttggaatggatgaagttggaagatttccaaaagcaccttgatgggaaagatgagaattttgctgcaacagatgcaattccaagtaatgtgttaagggatgctgtgaaaaatggggattatattactgtaaaagttgcacttaattcaaatgaagaatataacctggaccaagaggattccagtggaatgacactggtgatgcttgccgccgccggagggcaggacgacctcctgcgactcctcatcacaaaaggcgcgaaagtgaacggtcggcagaagaacgggaccaccgccctcattcatgctgcagagaagaactttttaacaacagtggctattcttttggaagcaggagcttttgtaaatgtccagcaaagcaatggtgagactgcactgatgaaggcctgtaaaagaggaaattcagacatcgtacgactcgtaattgaatgtggagctgactgcaatattttgtcaaagcaccagaatagtgccctgcactttgcgaagcagtctaacaatgtgcttgtgtacgacttgctgaagaaccatttagagacactttcaagagtagcagaagagacaataaaggattactttgaagctcgccttgctctgctagaaccagtttttccaatcgcatgtcatcgactctgtgagggtccagatttttcaacagatttcaattacaaacccccacagaacataccagaaggctctggcatcctgctgtttatcttccatgcaaactttttgggtaaagaagttattgctcggctctgtggaccgtgtagtgtacaagctgtagttctgaatgataaatttcagcttcctgtttttctggacagtcattttgtttactcattcagccctgttgcaggtcccaataaactcttcataaggttgacagaagcaccctctgccaaggttaagttgctaataggtgcatacagagtgcagctgcagtgaccaaacagaagggactgggcggagttctcttcagaccgattcctatactctctttgacagcagtttggaattcttctagcacatctatgtaaagttttgtctgtaaacctcttgcagttaagcctgttgtctgttgtagtctgtaagatgcgacatagctgtgtctgtgccagtatgccggaatctcagtgcagtgtccagactgcgtatttcagtttttccacaatgtggatagtacatatgaggattatttaagaaaattaaagacttcactttcttttttctggagacggagtttcactccagcctgggtgacagaatgagaccttgtctcaaaaaaaaaaaaaaaagtttcttggaacctatacgtttttttttgttttttttttgaaaagccagaccttgtgcccttgttttgaacaccgactgggaagatggggcttaggtaacagccaaacctggctgtcagctgtgtgggagccaccaccctctctgggaagagttcctgcttctgtatggcaagcataaatcaagctcagtctgggttatggagaagttgaaaattgttttgttcctcattagtttataattgtatgaaatacgattttaatgaaaacttttcagaattcacgtttgtgtagatatttcagagaaccatttttactttacatcctaaaactgccttttcctatggttttgtcaataaaacactatgatgttggtctgtttccttttata

SEQ ID NO: 330995 - DNA, 4089 bp, Homo sapiens
tacgccgctgatgtggagtagggccgagcgcggaacgcgaggggctgctggggtgtttgtcgcagcgggttttcctcggcggtttgcggagctgctaggatggagcaggttgcggagggagcaagggtgaccgcagtccctgtgtcagctgccgacagcactgaggagttggccgaagtcgaagaaggagttggagtagtgggcgaagataatgacgcagccgcgagaggagcggaggcctttggcgacagtgaggaggacggagaggatgtgttcgaggtggagaagatcctggacatgaagaccgaggggggtaaagttctttacaaagttcgctggaaaggctatacatcggatgatgatacctgggagcccgagattcacctggaggactgtaaagaagtgcttcttgaatttaggaagaaaattgcagagaacaaagccaaagcagtcaggaaggatattcagagactatccttaaataacgacatatttgaggcgaactctgatagcgatcagcaaagtgagacaaaagaagatacttccccaaagaagaaaaagaaaaaattgaggcagagagaagagaaaagcccagatgatctgaaaaagaaaaaagcaaaggccgggaagctaaaagacaagtccaaaccagacctggagagctccttggaaagtttagtttttgatttaaggacaaagaaaagaatttctgaagccaaagaagaactaaaggagtccaaaaagcccaaaaaagatgaagtaaaagaaacaaaagaattaaagaaagttaaaaagggtgaaataagagatttaaagacgaaaacaagagaagatcccaaagaaaatagaaaaacaaaaaaagaaaaatttgtcgaatcccaggtggaatctgaatcaagtgtacttaatgattctccctttccagaggatgacagtgaagggctacattccgacagcagagaagagaaacaaaacactaaaagtgcaagagagagagcagggcaggacatggggctggagcatggctttgagaagcccctagacagtgccatgagtgctgaggaggataccgatgtcagaggcaggaggaaaaagaagaccccgagaaaggctgaggacactagagagaacaggaagctagagaacaagaacgctttcttagagaagaaaactgtgcctaaaaagcagaggaatcaagacagaagcaaaagtgctgcagagttagagaagctgatgcctgtatctgcccaaacgccaaagggccggaggttgagcggggaagagagaggcctctggtccacggactcagccgaggaggacaaagaaaccaaaagaaatgaatccaaagaaaaatatcagaaaaggcatgattctgacaaggaagaaaaaggcagaaaagagccaaaaggattaaagacacttaaggaaatcagaaatgcatttgatttatttaaattaactccagaagaaaaaaatgatgtttctgagaataatcggaaaagggaagaaataccactggattttaaaaccatagacgatcacaaaaccaaggaaaacaaacagtcacttaaagaaaggagaaacaccagagacgaaacggatacttgggcatacattgctgcagaaggtgatcaggaggttttagacagcgtgtgccaagcagatgagaattcagatggcaggcagcagattctgagtttgggcatggacctgcagttggaatggatgaagttggaagatttccaaaagcaccttgatgggaaagatgagaattttgctgcaacagatgcaattccaagtaatgtgttaagggatgctgtgaaaaatggggattatattactgtaaaagttgcacttaattcaaatgaagaatataacctggaccaagaggattccagtggaatgacactggtgatgcttgccgccgccggagggcaggacgacctcctgcgactcctcatcacaaaaggcgcgaaagtgaacggtcggcagaagaacgggaccaccgccctcattcatgctgcagagaagaactttttaacaacagtggctattcttttggaagcaggagcttttgtaaatgtccagcaaagcaatggtgagactgcactgatgaaggcctgtaaaagaggaaattcagacatcgtacgactcgtaattgaatgtggagctgactgcaatattttgtcaaagcaccagaatagtgccctgcactttgcgaagcagtctaacaatgtgcttgtgtacgacttgctgaagaaccatttagagacactttcaagagtagcagaagagacaataaaggattactttgaagctcgccttgctctgctagaaccagtttttccaatcgcatgtcatcgactctgtgagggtccagatttttcaacagatttcaattacaaacccccacagaacataccagaaggctctggcatcctgctgtttatcttccatgcaaactttttgggtaaagaagttattgctcggctctgtggaccgtgtagtgtacaagctgtagttctgaatgataaatttcagcttcctgtttttctgacagggtctcgctctgttgtccaggctggagtgcagtggcgcggattacagctcactggagtcttgacttcccaggcacaagcaatcctcccacctcagcctcctaactacctgggactaaaaatgacagtcattttgtttactcattcagccctgttgcaggtcccaataaactcttcataaggttgacagaagcaccctctgccaaggtgacagtcctttcttcacatttagtgtcactactcaagttgttgctccagattactttatcaacattagaaaaaaaattccaagaatcctggtgtacctgtcctagagacaggcactccctggggtagtgatgctaggtgcaccctctctcagtttacaatgtgttagacataataatgcggcaggaaaagaactaggttgcagctgagaaagatgcctctctagaggatggagccatctgaatcatgatctaggccttggtatggagttgccaaatgtatgtctttaggccggtccctaacctctcttgtatgaaaggaagctggacaaaatagtctctctaataaaacagtaatataaaattataagcacttggaattatttcttgaattaaaatggcaatgatctaacaatgtaaattgataagcaacttgaaaatattgccaaataatagaagcaaatcttggccatttgtgggttttttcttgtaagaaaggggaaatctggatctgtactgacacctgcgttcttttctttcaacaggttaagttgctaataggtgcatacagagtgcagctgcagtgaccaaacagaagggactgggcggagttctcttcagaccgattcctatactctctttgacagcagtttggaattcttctagcacatctatgtaaagttttgtctgtaaacctcttgcagttaagcctgttgtctgttgtagtctgtaagatgcgacatagctgtgtctgtgccagtatgccggaatctcagtgcagtgtccagactgcgtatttcagtttttccacaatgtggatagtacatatgaggattatttaagaaaattaaagacttcactttcttttttctggagacggagtttcactccagcctgggtgacagaatgagaccttgtctcaaaaaaaaaaaaaaaagtttcttggaacctatacgtttttttttgttttttttttgaaaagccagaccttgtgcccttgttttgaacaccgactgggaagatggggcttaggtaacagccaaacctggctgtcagctgtgtgggagccaccaccctctctgggaagagttcctgcttctgtatggcaagcataaatcaagctcagtctgggttatggagaagttgaaaattgttttgttcctcattagtttataattgtatgaaatacgattttaatgaaaacttttcagaattcacgtttgtgtagatatttcagagaaccatttttactttacatcctaaaactgccttttcctatggttttgtcaataaaacactatgatgttggtctgtttccttttata

SEQ ID NO: 330996 - DNA, 4551 bp, Homo sapiens
tacgccgctgatgtggagtagggccgagcgcggaacgcgaggggctgctggggtgtttgtcgcagcgggttttcctcggcggtttgcggagctgctaggatggagcaggttgcggagggagcaagggtgaccgcagtccctgtgtcagctgccgacagcactgaggagttggccgaagtcgaagaaggagttggagtagtgggcgaagataatgacgcagccgcgagaggagcggaggcctttggcgacagtgaggaggacggagaggatgtgttcgaggtggagaagatcctggacatgaagaccgaggggggtaaagttctttacaaagttcgctggaaaggctatacatcggatgatgatacctgggagcccgagattcacctggaggactgtaaagaagtgcttcttgaatttaggaagaaaattgcagagaacaaagccaaagcagtcaggaaggatattcagagactatccttaaataacgacatatttgaggcgaactctgatagcgatcagcaaagtgagacaaaagaagatacttccccaaagaagaaaaagaaaaaattgaggcagagagaagagaaaagcccagatgatctgaaaaagaaaaaagcaaaggccgggaagctaaaagacaagtccaaaccagacctggagagctccttggaaagtttagtttttgatttaaggacaaagaaaagaatttctgaagccaaagaagaactaaaggagtccaaaaagcccaaaaaagatgaagtaaaagaaacaaaagaattaaagaaagttaaaaagggtgaaataagagatttaaagacgaaaacaagagaagatcccaaagaaaatagaaaaacaaaaaaagaaaaatttgtcgaatcccaggtggaatctgaatcaagtgtacttaatgattctccctttccagaggatgacagtgaagggctacattccgacagcagagaagagaaacaaaacactaaaagtgcaagagagagagcagggcaggacatggggctggagcatggctttgagaagcccctagacagtgccatgagtgctgaggaggataccgatgtcagaggcaggaggaaaaagaagaccccgagaaaggctgaggacactagagagaacaggaagctagagaacaagaacgctttcttagagaagaaaactgtgcctaaaaagcagaggaatcaagacagaagcaaaagtgctgcagagttagagaagctgatgcctgtatctgcccaaacgccaaagggccggaggttgagcggggaagagagaggcctctggtccacggactcagccgaggagggtaagggccacgggaggcagcagaaaacccatgttgagtggtcaagacatttcacaagcaaggaaagggaaacagtcaagctataagaaagtgtttatgaccatgggcggtcataaatgaagatcctccagcttttggacaccgcagcttatctcttagtctctggtttgtttctcttagaatgattatgactagaaaattaaaggctaatttgtgaacaaaaatcaggatggtttttagaggtactcagatgatatatggagcattgtatactcaggtttatagcttcatcagcttattttattaacttttcacatcctgcttggtcatttcccctgttgtcttgagtataccactattaaataataggacacaaactacattaaccagtattttaatgctttttaaaatgtatttaatagggaatttgtcccattataaaaattatttttatatggctttgcaaaatggatatattttccaaattatgagagtatttatatatgcaatatttatcaagggctataaaaaacatcatttttttcatccattatttccagttttgggaatgtattttaaggaaatcattttaaagaaggaaaagctgtgcatacatagttatttatggcagtattatcttcattagtgctacagcaaaatagaacaacttagaaaatgcagtggagaagaaaaccctacataaatgtgaacacagtcatgtaaaaatatgtgtgtaatgtaaacaaaaatgaattttaaaaaagattatccatgtaaaagtacgaggaccagaagggggaacatggagaagtacaatagtcatggttggttaagactatgggtggaaaactttcttataattttctttttttttttttaataataaaattcctaaaagagggttggaaaactgatgttgggtttggaatttgatattttgtgaattattatatggttgactgaggaagcaaaattcttttgtgtgaagaggatttaatgatcagttatcatgtaccacagtatacaagggtgattccctgaagccacaaacctgtattttccggttctcaaataaatttacagtgtcaactctttatccattcttgttttggatatcatgtcattttcaggacaaagaaaccaaaagaaatgaatccaaagaaaaatatcagaaaaggcatgattctgacaaggaagaaaaaggcagaaaagagccaaaaggattaaagacacttaaggaaatcagaaatgcatttgatttatttaaattaactccagaagaaaaaaatgatgtttctgagaataatcggaaaagggaagaaataccactggattttaaaaccatagacgatcacaaaaccaaggaaaacaaacagtcacttaaagaaaggagaaacaccagagacgaaacggatacttgggcatacattgctgcagaaggtgatcaggaggttttagacagcgtgtgccaagcagatgagaattcagatggcaggcagcagattctgagtttgggcatggacctgcagttggaatggatgaagttggaagatttccaaaagcaccttgatgggaaagatgagaattttgctgcaacagatgcaattccaagtaatgtgttaagggatgctgtgaaaaatggggattatattactgtaaaagttgcacttaattcaaatgaagaatataacctggaccaagaggattccagtggaatgacactggtgatgcttgccgccgccggagggcaggacgacctcctgcgactcctcatcacaaaaggcgcgaaagtgaacggtcggcagaagaacgggaccaccgccctcattcatgctgcagagaagaactttttaacaacagtggctattcttttggaagcaggagcttttgtaaatgtccagcaaagcaatggtgagactgcactgatgaaggcctgtaaaagaggaaattcagacatcgtacgactcgtaattgaatgtggagctgactgcaatattttgtcaaagcaccagaatagtgccctgcactttgcgaagcagtctaacaatgtgcttgtgtacgacttgctgaagaaccatttagagacactttcaagagtagcagaagagacaataaaggattactttgaagctcgccttgctctgctagaaccagtttttccaatcgcatgtcatcgactctgtgagggtccagatttttcaacagatttcaattacaaacccccacagaacataccagaaggctctggcatcctgctgtttatcttccatgcaaactttttgggtaaagaagttattgctcggctctgtggaccgtgtagtgtacaagctgtagttctgaatgataaatttcagcttcctgtttttctggacagtcattttgtttactcattcagccctgttgcaggtcccaataaactcttcataaggttgacagaagcaccctctgccaaggttaagttgctaataggtgcatacagagtgcagctgcagtgaccaaacagaagggactgggcggagttctcttcagaccgattcctatactctctttgacagcagtttggaattcttctagcacatctatgtaaagttttgtctgtaaacctcttgcagttaagcctgttgtctgttgtagtctgtaagatgcgacatagctgtgtctgtgccagtatgccggaatctcagtgcagtgtccagactgcgtatttcagtttttccacaatgtggatagtacatatgaggattatttaagaaaattaaagacttcactttcttttttctggagacggagtttcactccagcctgggtgacagaatgagaccttgtctcaaaaaaaaaaaaaaaagtttcttggaacctatacgtttttttttgttttttttttgaaaagccagaccttgtgcccttgttttgaacaccgactgggaagatggggcttaggtaacagccaaacctggctgtcagctgtgtgggagccaccaccctctctgggaagagttcctgcttctgtatggcaagcataaatcaagctcagtctgggttatggagaagttgaaaattgttttgttcctcattagtttataattgtatgaaatacgattttaatgaaaacttttcagaattcacgtttgtgtagatatttcagagaaccatttttactttacatcctaaaactgccttttcctatggttttgtcaataaaacactatgatgttggtctgtttccttttata

SEQ ID NO: 330997 - DNA, 2077 bp, Homo sapiens
tacgccgctgatgtggagtagggccgagcgcggaacgcgaggggctgctggggtgtttgtcgcagcgggttttcctcggcggtttgcggagctgctaggatggagcaggttgcggagggagcaagggtgaccgcagtccctgtgtcagctgccgacagcactgaggagttggccgaagtcgaagaaggagttggagtagtgggcgaagataatgacgcagccgcgagaggagcggaggcctttggcgacagtgaggaggacggagaggatgtgttcgaggtggagaagatcctggacatgaagaccgaggggggtaaagttctttacaaagttcgctggaaaggctatacatcggatgatgatacctgggagcccgagattcacctggaggactgtaaagaagtgcttcttgaatttaggaagaaaattgcagagaacaaagccaaagcagtcaggaaggatattcagagactatccttaaataacgacatatttgaggcgaactctgatagcgatcagcaaagtgagacaaaagaagatacttccccaaagaagaaaaagaaaaaattgaggcagagagaagagaaaagcccagatgatctgaaaaagaaaaaagcaaaggccgggaagctaaaagacaagtccaaaccagacctggagagctccttggaaagtttagtttttgatttaaggacaaagaaaagaatttctgaagccaaagaagaactaaaggagtccaaaaagcccaaaaaagatgaagtaaaagaaacaaaagaattaaagaaagttaaaaagggtgaaataagagatttaaagacgaaaacaagagaagatcccaaagaaaatagaaaaacaaaaaaagaaaaatttgtcgaatcccaggtggaatctgaatcaagtgtacttaatgattctccctttccagaggatgacagtgaagggctacattccgacagcagagaagagaaacaaaacactaaaagtgcaagagagagagcagggcaggacatggggctggagcatggctttgagaagcccctagacagtgccatgagtgctgaggaggataccgatgtcagaggcaggaggaaaaagaagaccccgagaaaggctgaggacactagagagaacaggaagctagagaacaagaacgctttcttagagaagaaaactgtgcctaaaaagcagaggaatcaagacagaagcaaaagtgctgcagagttagagaagctgatgcctgtatctgcccaaacgccaaagggccggaggttgagcggggaagagagaggcctctggtccacggactcagccgaggaggacaaagaaaccaaaagaaatgaatccaaagaaaaatatcagaaaaggcatgattctgacaaggaagaaaaaggcagaaaagagccaaaaggattaaagacacttaaggaaatcagaaatgcatttgatttatttaaattaactccagaagaaaaaaatgatgtttctgagaataatcggaaaagggaagaaataccactggattttaaaaccatagacgatcacaaaaccaaggaaaacaaacagtcacttaaagaaaggagaaacaccagagacgaaacggatacttgggcatacattgctgcagaaggtgatcaggagactccagcctgggtgacagaatgagaccttgtctcaaaaaaaaaaaaaaaagtttcttggaacctatacgtttttttttgttttttttttgaaaagccagaccttgtgcccttgttttgaacaccgactgggaagatggggcttaggtaacagccaaacctggctgtcagctgtgtgggagccaccaccctctctgggaagagttcctgcttctgtatggcaagcataaatcaagctcagtctgggttatggagaagttgaaaattgttttgttcctcattagtttataattgtatgaaatacgattttaatgaaaacttttcagaattcacgtttgtgtagatatttcagagaaccatttttactttacatcctaaaactgccttttcctatggttttgtcaataaaacactatgatgttggtctgtttccttttata

SEQ ID NO: 330998 - DNA, 2576 bp, Homo sapiens
tacgccgctgatgtggagtagggccgagcgcggaacgcgaggggctgctggggtgtttgtcgcagcgggttttcctcggcggtttgcggagctgctaggatggagcaggttgcggagggagcaagggtgaccgcagtccctgtgtcagctgccgacagcactgaggagttggccgaagtcgaagaaggagttggagtagtgggcgaagataatgacgcagccgcgagaggagcggaggcctttggcgacagtgaggaggacggagaggatgtgttcgaggtggagaagatcctggacatgaagaccgaggggggtaaagttctttacaaagttcgctggaaaggctatacatcggatgatgatacctgggagcccgagattcacctggaggactgtaaagaagtgcttcttgaatttaggaagaaaattgcagagaacaaagccaaagcagtcaggaaggatattcagagactatccttaaataacgacatatttgaggcgaactctgatagcgatcagcaaagtgagacaaaagaagatacttccccaaagaagaaaaagaaaaaattgaggcagagagaagagaaaagcccagatgatctgaaaaagaaaaaagcaaaggccgggaagctaaaagacaagtccaaaccagacctggagagctccttggaaagtttagtttttgatttaaggacaaagaaaagaatttctgaagccaaagaagaactaaaggagtccaaaaagcccaaaaaagatgaagtaaaagaaacaaaagaattaaagaaagttaaaaagggtgaaataagagatttaaagacgaaaacaagagaagatcccaaagaaaatagaaaaacaaaaaaagaaaaatttgtcgaatcccaggtggaatctgaatcaagtgtacttaatgattctccctttccagaggatgacagtgaagggctacattccgacagcagagaagagaaacaaaacactaaaagtgcaagagagagagcagggcaggacatggggctggagcatggctttgagaagcccctagacagtgccatgagtgctgaggaggataccgatgtcagaggcaggaggaaaaagaagaccccgagaaaggctgaggacactagagagaacaggaagctagagaacaagaacgctttcttagagaagaaaactgtgcctaaaaagcagaggaatcaagacagaagcaaaagtgctgcagagttagagaagctgatgcctgtatctgcccaaacgccaaagggccggaggttgagcggggaagagagaggcctctggtccacggactcagccgaggaggacaaagaaaccaaaagaaatgaatccaaagaaaaatatcagaaaaggcatgattctgacaaggaagaaaaaggcagaaaagagccaaaaggattaaagacacttaaggaaatcagaaatgcatttgatttatttaaattaactccagaagaaaaaaatgatgtttctgagaataatcggaaaagggaagaaataccactggattttaaaaccatagacgatcacaaaaccaaggaaaacaaacagtcacttaaagaaaggagaaacaccagagacgaaacggatacttgggcatacattgctgcagaaggtgatcaggaggttttagacagcgtgtgccaagcagatgagaattcaggtgagtttggaatcattttgcagaatttttcaaggtagtgcaccatattattttactgtactcttctctgtatttctgatctcaacgatcaaaaaataatggagtcgaagagtttatttggatctcctgaataaataacattttatattgaagacgggtcattctgtgacttctcaatggatcaaacaatttttctgagttcctataatgttctcagcacgtatagaaattaaaagatttctgattttctaccttacctactcttacctggcagccccattttatatcttactatttaatagatttctttcaggaaattatcaaatataaacttatttgtattttacccttttaatgttgtagcaagtaacactaaataagattatattataaatgctgtcctgaggacattggagctggtcaagaagaagaatacagactacagtagtggtggggaggaggagtgctaaaaagtgtacatacatgtttataactaggacctaatcagagaggttagtctaataaaactttgtataatttgtgaatcttgagaaacagttgagaattgaaaaattcggaatatatgacagactagatcgcctgggaaacccttatactacaaaaatgactatatcttggataccgagggaaaatgtgcttttggatatattgctgagcttgcaggaaattagggtaatttctggtaccagtgggcaaggaggaagaggtatgtcgcccagagggcagatgccaaatagtaacactgctgttgagataccaggcagtaaaaaacagatacagtaggggaacatcagtaaagccagaagtggattcctggttttctataaaataagcctctgacacagtttgttgagaacaaaagaaacacatgaaaaagagg

SEQ ID NO: 330999 - DNA, 2663 bp, Homo sapiens
tacgccgctgatgtggagtagggccgagcgcggaacgcgaggggctgctggggtgtttgtcgcagcgggttttcctcggcggtttgcggagctgctaggatggagcaggttgcggagggagcaagggtgaccgcagtccctgtgtcagctgccgacagcactgaggagttggccgaagtcgaagaaggagttggagtagtgggcgaagataatgacgcagccgcgagaggagcggaggcctttggcgacagtgaggaggacggagaggatgtgttcgaggtggagaagatcctggacatgaagaccgaggggggtaaagttctttacaaagttcgctggaaaggctatacatcggatgatgatacctgggagcccgagattcacctggaggactgtaaagaagtgcttcttgaatttaggaagaaaattgcagagaacaaagccaaagcagtcaggaaggatattcagagactatccttaaataacgacatatttgaggcgaactctgatagcgatcagcaaagtgagacaaaagaagatacttccccaaagaagaaaaagaaaaaattgaggcagagagaagagaaaagcccagatgatctgaaaaagaaaaaagcaaaggccgggaagctaaaagacaagtccaaaccagacctggagagctccttggaaagtttagtttttgatttaaggacaaagaaaagaatttctgaagccaaagaagaactaaaggagtccaaaaagcccaaaaaagatgaagtaaaagaaacaaaagaattaaagaaagttaaaaagggtgaaataagagatttaaagacgaaaacaagagaagatcccaaagaaaatagaaaaacaaaaaaagaaaaatttgtcgaatcccaggtggaatctgaatcaagtgtacttaatgattctccctttccagaggatgacagtgaagggctacattccgacagcagagaagagaaacaaaacactaaaagtgcaagagagagagcagggcaggacatggggctggagcatggctttgagaagcccctagacagtgccatgagtgctgaggaggataccgatgtcagaggcaggaggaaaaagaagaccccgagaaaggctgaggacactagagagaacaggaagctagagaacaagaacgctttcttagagaagaaaactgtgcctaaaaagcagaggaatcaagacagaagcaaaagtgctgcagagttagagaagctgatgcctgtatctgcccaaacgccaaagggccggaggttgagcggggaagagagaggcctctggtccacggactcagccgaggaggacaaagaaaccaaaagaaatgaatccaaagaaaaatatcagaaaaggcatgattctgacaaggaagaaaaaggcagaaaagagccaaaaggattaaagacacttaaggaaatcagaaatgcatttgatttatttaaattaactccagaagaaaaaaatgatgtttctgagaataatcggaaaagggaagaaataccactggattttaaaaccatagacgatcacaaaaccaaggaaaacaaacagtcacttaaagaaaggagaaacaccagagacgaaacggatacttgggcatacattgctgcagaaggtgatcaggaggttttagacagcgtgtgccaagcagatgagaattcagatggcaggcagcagattctgagtttgggcatggacctgcagttggaatggatgaagttggaagatttccaaaagcaccttgatgggaaagatgagaattttgctgcaacagatgcaattccaagtaatgtgttaagggatgctgtgaaaaatggggattatattactgtaaaagttgcacttaattcaaatgaagaatataacctggaccaagaggattccagtggaatgacactggtgatgcttgccgccgccggagggcaggacgacctcctgcgactcctcatcacaaaaggcgcgaaagtgaacggtcggcagaagaacgggaccaccgccctcattcatgctgcagagaagaactttttaacaacagtggctattcttttggaagcaggagcttttgtaaatgtccagcaaagcaatggtgagactgcactgatgaaggcctgtaaaagaggaaattcagacatcgtacgactcgtaattgaatgtggagctgactgcaatattttgtcaaagcaccagaatagtgccctgcactttgcgaagcagtctaacaatgtgcttgtgtacgacttgctgaagaaccatttagagacactttcaagagtagcagaagagacaataaaggattactttgaagctcgccttgctctgctagaaccagtttttccaatcgcatgtcatcgactctgtgagggtccagatttttcaacagatttcaattacaaacccccacagaacataccagaaggctctggcatcctgctgtttatcttccatgcaaactttttgggtaaagaagttattgctcggctctgtggaccgtgtagtgtacaagctgtagttctgaatgataaatttcagcttcctgtttttctggtaagatactctgtatttcactactgaaaagtacattcttctaatcaaaagcacagatgacttaattttaaattcctgtgtcttaataaaatataagcattcagaaa

SEQ ID NO: 331000 - DNA, 2044 bp, Homo sapiens
tacgccgctgatgtggagtagggccgagcgcggaacgcgaggggctgctggggtgtttgtcgcagcgggttttcctcggcggtttgcggagctgctaggatggagcaggttgcggagggagcaagggtgaccgcagtccctgtgtcagctgccgacagcactgaggagttggccgaagtcgaagaaggagttggagtagtgggcgaagataatgacgcagccgcgagaggagcggaggcctttggcgacagtgaggaggacggagaggatgtgttcgaggtggagaagatcctggacatgaagaccgaggggggtaaagttctttacaaagttcgctggaaaggctatacatcggatgatgatacctgggagcccgagattcacctggaggactgtaaagaagtgcttcttgaatttaggaagaaaattgcagagaacaaagccaaagcagtcaggaaggatattcagagactatccttaaataacgacatatttgaggcgaactctgatagcgatcagcaaagtgagacaaaagaagatacttccccaaagaagaaaaagaaaaaattgaggcagagagaagagaaaagcccagatgatctgaaaaagaaaaaagcaaaggccgggaagctaaaagacaagtccaaaccagacctggagagctccttggaaagtttagtttttgatttaaggacaaagaaaagaatttctgaagccaaagaagaactaaaggagtccaaaaagcccaaaaaagatgaagtaaaagaaacaaaagaattaaagaaagttaaaaagggtgaaataagagatttaaagacgaaaacaagagaagatcccaaagaaaatagaaaaacaaaaaaagaaaaatttgtcgaatcccaggtggaatctgaatcaagtgtacttaatgattctccctttccagaggatgacagtgaagggctacattccgacagcagagaagagaaacaaaacactaaaagtgcaagagagagagcagggcaggacatggggctggagcatggctttgagaagcccctagacagtgccatgagtgctgaggaggataccgatgtcagaggcaggaggaaaaagaagaccccgagaaaggctgaggacactagagagaacaggaagctagagaacaagaacgctttcttagagaagaaaactgtgcctaaaaagcagaggaatcaagacagaagcaaaagtgctgcagagttagagaagctgatgcctgtatctgcccaaacgccaaagggccggaggttgagcggggaagagagaggcctctggtccacggactcagccgaggaggacaaagaaaccaaaagaaatgaatccaaagaaaaatatcagaaaaggcatgattctgacaaggaagaaaaaggcagaaaagagccaaaaggattaaagacacttaaggaaatcagaaatgcatttgatttatttaaattaactccagaagaaaaaaatgatgtttctgagaataatcggaaaagggaagaaataccactggattttaaaaccatagacgatcacaaaaccaaggaaaacaaacagtcacttaaagaaaggagaaacaccagagacgaaacggatacttgggcatacattgctgcagaaggtgatcaggaggttttagacagcgtgtgccaagcagatgagaattcagatggcaggcagcagattctgagtttgggcatggacctgcagttggaatggatgaagttggaagatttccaaaagcaccttgatgggaaagatgagaattttgctgcaacagatgcaattccaagtaatgtgttaagggatgctgtgaaaaatggggattatattactgtaaaagttgcacttaattcaaatgaagaatataacctggaccaagaggatttaatacacaaaacaaaaagaagatacaaaaatgagagctgggcgtggtggcatgcacctgtaatcccatctacttgaggctgtggcaggaggaatgcttgagcccaggagtttgagaccagcctgggctgacatagcaacaccgtctcaa

SEQ ID NO: 331001 - DNA, 1956 bp, Homo sapiens
tacgccgctgatgtggagtagggccgagcgcggaacgcgaggggctgctggggtgtttgtcgcagcgggttttcctcggcggtttgcggagctgctaggatggagcaggttgcggagggagcaagggtgaccgcagtccctgtgtcagctgccgacagcactgaggagttggccgaagtcgaagaaggagttggagtagtgggcgaagataatgacgcagccgcgagaggagcggaggcctttggcgacagtgaggaggacggagaggatgtgttcgaggtggagaagatcctggacatgaagaccgaggggggtaaagttctttacaaagttcgctggaaaggctatacatcggatgatgatacctgggagcccgagattcacctggaggactgtaaagaagtgcttcttgaatttaggaagaaaattgcagagaacaaagccaaagcagtcaggaaggatattcagagactatccttaaataacgacatatttgaggcgaactctgatagcgatcagcaaagtgagacaaaagaagatacttccccaaagaagaaaaagaaaaaattgaggcagagagaagagaaaagcccagatgatctgaaaaagaaaaaagcaaaggccgggaagctaaaagacaagtccaaaccagacctggagagctccttggaaagtttagtttttgatttaaggacaaagaaaagaatttctgaagccaaagaagaactaaaggagtccaaaaagcccaaaaaagatgaagtaaaagaaacaaaagaattaaagaaagttaaaaagggtgaaataagagatttaaagacgaaaacaagagaagatcccaaagaaaatagaaaaacaaaaaaagaaaaatttgtcgaatcccaggtggaatctgaatcaagtgtacttaatgattctccctttccagaggatgacagtgaagggctacattccgacagcagagaagagaaacaaaacactaaaagtgcaagagagagagcagggcaggacatggggctggagcatggctttgagaagcccctagacagtgccatgagtgctgaggaggataccgatgtcagaggcaggaggaaaaagaagaccccgagaaaggctgaggacactagagagaacaggaagctagagaacaagaacgctttcttagagaagaaaactgtgcctaaaaagcagaggaatcaagacagaagcaaaagtgctgcagagttagagaagctgatgcctgtatctgcccaaacgccaaagggccggaggttgagcggggaagagagaggcctctggtccacggactcagccgaggaggacaaagaaaccaaaagaaatgaatccaaagaaaaatatcagaaaaggcatgattctgacaaggaagaaaaaggcagaaaagagccaaaaggattaaagacacttaaggaaatcagaaatgcatttgatttatttaaattaactccagaagaaaaaaatgatgtttctgagaataatcggaaaagggaagaaataccactggattttaaaaccatagacgatcacaaaaccaaggaaaacaaacagtcacttaaagaaaggagaaacaccagagacgaaacggatacttgggcatacattgctgcagaaggtgatcaggaggttttagacagcgtgtgccaagcagatgagaattcagggtaaagttctttacaaagttcgctggaaaggctatacatcggatgatgatacctgggagcccgagattcacctggaggactgtaaagaagtgcttcttgaatttaggaagaaaatgcagagaacaaagccaaagcagtcaggaaggatattcagagactatccttaaataacgacatatttgaggcgaactctgatagcgatcaggcaaagtgagacaaaagaagatacttccgcaaagaagaaaaagaaaaaattgaggcagagagaaggagaaaagcc

SEQ ID NO: 331002 - DNA, 2715 bp, Homo sapiens
gcgaatagcttcgccctgattggctgcactggcgtcgtatgtagatcggcggtgcttagaagtggccgtcgtattacagcaggcgtcgtgggtgactggcgagatttaaagacgaaaacaagagaagatcccaaagaaaatagaaaaacaaaaaaagaaaaatttgtcgaatcccaggtggaatctgaatcaagtgtacttaatgattctccctttccagaggatgacagtgaagggctacattccgacagcagagaagagaaacaaaacactaaaagtgcaagagagagagcagggcaggacatggggctggagcatggctttgagaagcccctagacagtgccatgagtgctgaggaggataccgatgtcagaggcaggaggaaaaagaagaccccgagaaaggctgaggacactagagagaacaggaagctagagaacaagaacgctttcttagagaagaaaactgtgcctaaaaagcagaggaatcaagacagaagcaaaagtgctgcagagttagagaagctgatgcctgtatctgcccaaacgccaaagggccggaggttgagcggggaagagagaggcctctggtccacggactcagccgaggaggacaaagaaaccaaaagaaatgaatccaaagaaaaatatcagaaaaggcatgattctgacaaggaagaaaaaggcagaaaagagccaaaaggattaaagacacttaaggaaatcagaaatgcatttgatttatttaaattaactccagaagaaaaaaatgatgtttctgagaataatcggaaaagggaagaaataccactggattttaaaaccatagacgatcacaaaaccaaggaaaacaaacagtcacttaaagaaaggagaaacaccagagacgaaacggatacttgggcatacattgctgcagaaggtgatcaggaggttttagacagcgtgtgccaagcagatgagaattcagatggcaggcagcagattctgagtttgggcatggacctgcagttggaatggatgaagttggaagatttccaaaagcaccttgatgggaaagatgagaattttgctgcaacagatgcaattccaagtaatgtgttaagggatgctgtgaaaaatggggattatattactgtaaaagttgcacttaattcaaatgaagaatataacctggaccaagaggattccagtggaatgacactggtgatgcttgccgccgccggagggcaggacgacctcctgcgactcctcatcacaaaaggcgcgaaagtgaacggtcggcagaagaacgggaccaccgccctcattcatgctgcagagaagaactttttaacaacagtggctattcttttggaagcaggagcttttgtaaatgtccagcaaagcaatggtgagactgcactgatgaaggcctgtaaaagaggaaattcagacatcgtacgactcgtaattgaatgtggagctgactgcaatattttgtcaaagcaccagaatagtgccctgcactttgcgaagcagtctaacaatgtgcttgtgtacgacttgctgaagaaccatttagagacactttcaagagtagcagaagagacaataaaggattactttgaagctcgccttgctctgctagaaccagtttttccaatcgcatgtcatcgactctgtgagggtccagatttttcaacagatttcaattacaaacccccacagaacataccagaaggctctggcatcctgctgtttatcttccatgcaaactttttgggtaaagaagttattgctcggctctgtggaccgtgtagtgtacaagctgtagttctgaatgataaatttcagcttcctgtttttctggacagtcattttgtttactcattcagccctgttgcaggtcccaataaactcttcataaggttgacagaagcaccctctgccaaggttaagttgctaataggtgcatacagagtgcagctgcagtgaccaaacagaagggactgggcggagttctcttcagaccgattcctatactctctttgacagcagtttggaattcttctagcacatctatgtaaagttttgtctgtaaacctcttgcagttaagcctgttgtctgttgtagtctgtaagatgcgacatagctgtgtctgtgccagtatgccggaatctcagtgcagtgtccagactgcgtatttcagtttttccacaatgtggatagtacatatgaggattatttaagaaaattaaagacttcactttcttttttctggagacggagtttcactccagcctgggtgacagaatgagaccttgtctcaaaaaaaaaaaaaaaagtttcttggaacctatacgtttttttttgttttttttttgaaaagccagaccttgtgcccttgttttgaacaccgactgggaagatggggcttaggtaacagccaaacctggctgtcagctgtgtgggagccaccaccctctctgggaagagttcctgcttctgtatggcaagcataaatcaagctcagtctgggttatggagaagttgaaaattgttttgttcctcattagtttataattgtatgaaatacgattttaatgaaaacttttcagaattcacgtttgtgtagatatttcagagaaccatttttactttacatcctaaaactgccttttcctatggttttgtcaataaaacactatgatgttggtctgtttccttttata

SEQ ID NO: 331003 - DNA, 1535 bp, Homo sapiens
tacgccgctgatgtggagtagggccgagcgcggaacgcgaggggctgctggggtgtttgtcgcagcgggttttcctcggcggtttgcggagctgctaggatggagcaggttgcggagggagcaagggtgaccgcagtccctgtgtcagctgccgacagcactgaggagttggccgaagtcgaagaaggagttggagtagtgggcgaagataatgacgcagccgcgagaggagcggaggcctttggcgacagtgaggaggacggagaggatgtgttcgaggtggagaagatcctggacatgaagaccgaggggggtaaagttctttacaaagttcgctggaaaggctatacatcggatgatgatacctgggagcccgagattcacctggaggactgtaaagaagtgcttcttgaatttaggaagaaaattgcagagaacaaagccaaagcagtcaggaaggatattcagagactatccttaaataacgacatatttgaggcgaactctgatagcgatcagcaaagtgagacaaaagaagatacttccccaaagaagaaaaagaaaaaattgaggcagagagaagagaaaagcccagatgatctgaaaaagaaaaaagcaaaggccgggaagctaaaagacaagtccaaaccagacctggagagctccttggaaagtttagtttttgatttaaggacaaagaaaagaatttctgaagccaaagaagaactaaaggagtccaaaaagcccaaaaaagatgaagtaaaagaaacaaaagaattaaagaaagttaaaaagggtgaaataagagatttaaagacgaaaacaagagaagatcccaaagaaaatagaaaaacaaaaaaagaaaaatttgtcgaatcccaggtggaatctgaatcaagtgtacttaatgattctccctttccagaggatgacagtgaagggctacattccgacagcagagaagagaaacaaaacactaaaagtgcaagagagagagcagggcaggacatggggctggagcatggctttgagaagcccctagacagtgccatgagtgctgaggaggataccgatgtcagaggcaggaggaaaaagaagaccccgagaaaggctgaggacactagagagaacaggaagctagagaacaagaacgctttcttagagaagaaaactgtgcctaaaaagcagaggaatcaagacagaagcaaaagtgctgcagagttagagaagctgatgcctgtatctgcccaaacgccaaagggccggaggttgagcggggaagagagaggcctctggtccacggactcagccgaggaggacaaagaaaccaaaagaaatgaatccaaagaaaaatatcagaaaaggcatgattctgacaaggaagaaaaaggcagaaaagagccaaaaggattaaagacactaagcggatcagcgctgatccgcttaagatattcattttctttttccaagttgtcatttttcattgtacatatttcctgtctgagtatagcaatatctgccttcaaaatgcaatt

SEQ ID NO: 331004 - DNA, 2432 bp, Homo sapiens
agctcggtacccccacgatggtcctcagctctcatggctttgagaagcccctagacagtgccatgagtgctgaggaggataccgatgtcagaggcaggaggaaaaagaagaccccgagaaaggctgaggacactagagagaacaggaagctagagaacaagaacgctttcttagagaagaaaactgtgcctaaaaagcagaggaatcaagacagaagcaaaagtgctgcagagttagagaagctgatgcctgtatctgcccaaacgccaaagggccggaggttgagcggggaagagagaggcctctggtccacggactcagccgaggaggacaaagaaaccaaaagaaatgaatccaaagaaaaatatcagaaaaggcatgattctgacaaggaagaaaaaggcagaaaagagccaaaaggattaaagacacttaaggaaatcagaaatgcatttgatttatttaaattaactccagaagaaaaaaatgatgtttctgagaataatcggaaaagggaagaaataccactggattttaaaaccatagacgatcacaaaaccaaggaaaacaaacagtcacttaaagaaaggagaaacaccagagacgaaacggatacttgggcatacattgctgcagaaggtgatcaggaggttttagacagcgtgtgccaagcagatgagaattcagatggcaggcagcagattctgagtttgggcatggacctgcagttggaatggatgaagttggaagatttccaaaagcaccttgatgggaaagatgagaattttgctgcaacagatgcaattccaagtaatgtgttaagggatgctgtgaaaaatggggattatattactgtaaaagttgcacttaattcaaatgaagaatataacctggaccaagaggattccagtggaatgacactggtgatgcttgccgccgccggagggcaggacgacctcctgcgactcctcatcacaaaaggcgcgaaagtgaacggtcggcagaagaacgggaccaccgccctcattcatgctgcagagaagaactttttaacaacagtggctattcttttggaagcaggagcttttgtaaatgtccagcaaagcaatggtgagactgcactgatgaaggcctgtaaaagaggaaattcagacatcgtacgactcgtaattgaatgtggagctgactgcaatattttgtcaaagcaccagaatagtgccctgcactttgcgaagcagtctaacaatgtgcttgtgtacgacttgctgaagaaccatttagagacactttcaagagtagcagaagagacaataaaggattactttgaagctcgccttgctctgctagaaccagtttttccaatcgcatgtcatcgactctgtgagggtccagatttttcaacagatttcaattacaaacccccacagaacataccagaaggctctggcatcctgctgtttatcttccatgcaaactttttgggtaaagaagttattgctcggctctgtggaccgtgtagtgtacaagctgtagttctgaatgataaatttcagcttcctgtttttctggacagtcattttgtttactcattcagccctgttgcaggtcccaataaactcttcataaggttgacagaagcaccctctgccaaggttaagttgctaataggtgcatacagagtgcagctgcagtgaccaaacagaagggactgggcggagttctcttcagaccgattcctatactctctttgacagcagtttggaattcttctagcacatctatgtaaagttttgtctgtaaacctcttgcagttaagcctgttgtctgttgtagtctgtaagatgcgacatagctgtgtctgtgccagtatgccggaatctcagtgcagtgtccagactgcgtatttcagtttttccacaatgtggatagtacatatgaggattatttaagaaaattaaagacttcactttcttttttctggagacggagtttcactccagcctgggtgacagaatgagaccttgtctcaaaaaaaaaaaaaaaagtttcttggaacctatacgtttttttttgttttttttttgaaaagccagaccttgtgcccttgttttgaacaccgactgggaagatggggcttaggtaacagccaaacctggctgtcagctgtgtgggagccaccaccctctctgggaagagttcctgcttctgtatggcaagcataaatcaagctcagtctgggttatggagaagttgaaaattgttttgttcctcattagtttataattgtatgaaatacgattttaatgaaaacttttcagaattcacgtttgtgtagatatttcagagaaccatttttactttacatcctaaaactgccttttcctatggttttgtcaataaaacactatgatgttggtctgtttccttttata

SEQ ID NO: 331005 - DNA, 2628 bp, Homo sapiens
aacgatggtcctcagctggaagacggcttcgtcccttcccctctttatctagttaactcctacttctccttcaatactcactcagctaaagtctgctgctcttgatttctggcaccaattttacaaggttttgtagagattaggtaaagtaatgtgggtctaacatggtaataatcaaatctgcagactttagctgaggaccatcgttgcaacgatggtctcagctctcatggctttgagaagcccctagacagtgccatgagtgctgaggaggataccgatgtcagaggcaggaggaaaaagaagaccccgagaaaggctgaggacactagagagaacaggaagctagagaacaagaacgctttcttagagaagaaaactgtgcctaaaaagcagaggaatcaagacagaagcaaaagtgctgcagagttagagaagctgatgcctgtatctgcccaaacgccaaagggccggaggttgagcggggaagagagaggcctctggtccacggactcagccgaggaggacaaagaaaccaaaagaaatgaatccaaagaaaaatatcagaaaaggcatgattctgacaaggaagaaaaaggcagaaaagagccaaaaggattaaagacacttaaggaaatcagaaatgcatttgatttatttaaattaactccagaagaaaaaaatgatgtttctgagaataatcggaaaagggaagaaataccactggattttaaaaccatagacgatcacaaaaccaaggaaaacaaacagtcacttaaagaaaggagaaacaccagagacgaaacggatacttgggcatacattgctgcagaaggtgatcaggaggttttagacagcgtgtgccaagcagatgagaattcagatggcaggcagcagattctgagtttgggcatggacctgcagttggaatggatgaagttggaagatttccaaaagcaccttgatgggaaagatgagaattttgctgcaacagatgcaattccaagtaatgtgttaagggatgctgtgaaaaatggggattatattactgtaaaagttgcacttaattcaaatgaagaatataacctggaccaagaggattccagtggaatgacactggtgatgcttgccgccgccggagggcaggacgacctcctgcgactcctcatcacaaaaggcgcgaaagtgaacggtcggcagaagaacgggaccaccgccctcattcatgctgcagagaagaactttttaacaacagtggctattcttttggaagcaggagcttttgtaaatgtccagcaaagcaatggtgagactgcactgatgaaggcctgtaaaagaggaaattcagacatcgtacgactcgtaattgaatgtggagctgactgcaatattttgtcaaagcaccagaatagtgccctgcactttgcgaagcagtctaacaatgtgcttgtgtacgacttgctgaagaaccatttagagacactttcaagagtagcagaagagacaataaaggattactttgaagctcgccttgctctgctagaaccagtttttccaatcgcatgtcatcgactctgtgagggtccagatttttcaacagatttcaattacaaacccccacagaacataccagaaggctctggcatcctgctgtttatcttccatgcaaactttttgggtaaagaagttattgctcggctctgtggaccgtgtagtgtacaagctgtagttctgaatgataaatttcagcttcctgtttttctggacagtcattttgtttactcattcagccctgttgcaggtcccaataaactcttcataaggttgacagaagcaccctctgccaaggttaagttgctaataggtgcatacagagtgcagctgcagtgaccaaacagaagggactgggcggagttctcttcagaccgattcctatactctctttgacagcagtttggaattcttctagcacatctatgtaaagttttgtctgtaaacctcttgcagttaagcctgttgtctgttgtagtctgtaagatgcgacatagctgtgtctgtgccagtatgccggaatctcagtgcagtgtccagactgcgtatttcagtttttccacaatgtggatagtacatatgaggattatttaagaaaattaaagacttcactttcttttttctggagacggagtttcactccagcctgggtgacagaatgagaccttgtctcaaaaaaaaaaaaaaaagtttcttggaacctatacgtttttttttgttttttttttgaaaagccagaccttgtgcccttgttttgaacaccgactgggaagatggggcttaggtaacagccaaacctggctgtcagctgtgtgggagccaccaccctctctgggaagagttcctgcttctgtatggcaagcataaatcaagctcagtctgggttatggagaagttgaaaattgttttgttcctcattagtttataattgtatgaaatacgattttaatgaaaacttttcagaattcacgtttgtgtagatatttcagagaaccatttttactttacatcctaaaactgccttttcctatggttttgtcaataaaacactatgatgttggtctgtttccttttata

SEQ ID NO: 331006 - DNA, 3457 bp, Homo sapiens
aaagtaagtgtgaaaacagatggttatcacacattaatttcaagggaagggattactcagctatgctgatatgggaacgtgcatcctaaggacctgataaccaagactaaactaaaatgctgcagagttagagaagctgatgcctgtatctgcccaaacgccaaagggccggaggttgagcggggaagagagaggcctctggtccacggactcagccgaggagggtaagggccacgggaggcagcagaaaacccatgttgagtggtcaagacatttcacaagcaaggaaagggaaacagtcaagctataagaaagtgtttatgaccatgggcggtcataaatgaagatcctccagcttttggacaccgcagcttatctcttagtctctggtttgtttctcttagaatgattatgactagaaaattaaaggctaatttgtgaacaaaaatcaggatggtttttagaggtactcagatgatatatggagcattgtatactcaggtttatagcttcatcagcttattttattaacttttcacatcctgcttggtcatttcccctgttgtcttgagtataccactattaaataataggacacaaactacattaaccagtattttaatgctttttaaaatgtatttaatagggaatttgtcccattataaaaattatttttatatggctttgcaaaatggatatattttccaaattatgagagtatttatatatgcaatatttatcaagggctataaaaaacatcatttttttcatccattatttccagttttgggaatgtattttaaggaaatcattttaaagaaggaaaagctgtgcatacatagttatttatggcagtattatcttcattagtgctacagcaaaatagaacaacttagaaaatgcagtggagaagaaaaccctacataaatgtgaacacagtcatgtaaaaatatgtgtgtaatgtaaacaaaaatgaattttaaaaaagattatccatgtaaaagtacgaggaccagaagggggaacatggagaagtacaatagtcatggttggttaagactatgggtggaaaactttcttataattttctttttttttttttaataataaaattcctaaaagagggttggaaaactgatgttgggtttggaatttgatattttgtgaattattatatggttgactgaggaagcaaaattcttttgtgtgaagaggatttaatgatcagttatcatgtaccacagtatacaagggtgattccctgaagccacaaacctgtattttccggttctcaaataaatttacagtgtcaactctttatccattcttgttttggatatcatgtcattttcaggacaaagaaaccaaaagaaatgaatccaaagaaaaatatcagaaaaggcatgattctgacaaggaagaaaaaggcagaaaagagccaaaaggattaaagacacttaaggaaatcagaaatgcatttgatttatttaaattaactccagaagaaaaaaatgatgtttctgagaataatcggaaaagggaagaaataccactggattttaaaaccatagacgatcacaaaaccaaggaaaacaaacagtcacttaaagaaaggagaaacaccagagacgaaacggatacttgggcatacattgctgcagaaggtgatcaggaggttttagacagcgtgtgccaagcagatgagaattcagatggcaggcagcagattctgagtttgggcatggacctgcagttggaatggatgaagttggaagatttccaaaagcaccttgatgggaaagatgagaattttgctgcaacagatgcaattccaagtaatgtgttaagggatgctgtgaaaaatggggattatattactgtaaaagttgcacttaattcaaatgaagaatataacctggaccaagaggattccagtggaatgacactggtgatgcttgccgccgccggagggcaggacgacctcctgcgactcctcatcacaaaaggcgcgaaagtgaacggtcggcagaagaacgggaccaccgccctcattcatgctgcagagaagaactttttaacaacagtggctattcttttggaagcaggagcttttgtaaatgtccagcaaagcaatggtgagactgcactgatgaaggcctgtaaaagaggaaattcagacatcgtacgactcgtaattgaatgtggagctgactgcaatattttgtcaaagcaccagaatagtgccctgcactttgcgaagcagtctaacaatgtgcttgtgtacgacttgctgaagaaccatttagagacactttcaagagtagcagaagagacaataaaggattactttgaagctcgccttgctctgctagaaccagtttttccaatcgcatgtcatcgactctgtgagggtccagatttttcaacagatttcaattacaaacccccacagaacataccagaaggctctggcatcctgctgtttatcttccatgcaaactttttgggtaaagaagttattgctcggctctgtggaccgtgtagtgtacaagctgtagttctgaatgataaatttcagcttcctgtttttctggacagtcattttgtttactcattcagccctgttgcaggtcccaataaactcttcataaggttgacagaagcaccctctgccaaggttaagttgctaataggtgcatacagagtgcagctgcagtgaccaaacagaagggactgggcggagttctcttcagaccgattcctatactctctttgacagcagtttggaattcttctagcacatctatgtaaagttttgtctgtaaacctcttgcagttaagcctgttgtctgttgtagtctgtaagatgcgacatagctgtgtctgtgccagtatgccggaatctcagtgcagtgtccagactgcgtatttcagtttttccacaatgtggatagtacatatgaggattatttaagaaaattaaagacttcactttcttttttctggagacggagtttcactccagcctgggtgacagaatgagaccttgtctcaaaaaaaaaaaaaaaagtttcttggaacctatacgtttttttttgttttttttttgaaaagccagaccttgtgcccttgttttgaacaccgactgggaagatggggcttaggtaacagccaaacctggctgtcagctgtgtgggagccaccaccctctctgggaagagttcctgcttctgtatggcaagcataaatcaagctcagtctgggttatggagaagttgaaaattgttttgttcctcattagtttataattgtatgaaatacgattttaatgaaaacttttcagaattcacgtttgtgtagatatttcagagaaccatttttactttacatcctaaaactgccttttcctatggttttgtcaataaaacactatgatgttggtctgtttccttttata

SEQ ID NO: 331007 - DNA, 2064 bp, Homo sapiens
ggagtgccaccgctcctggaggctgctctgcaaagtgacgctgctgccccagcatctgcctcacagggtagggaggcacaggcacccttatcctcttttcgcaaatggaaacgtgccactcagaagaattaagggacttatctgaagtcacgtggctaataagtgacagagacaaggagacagtctgtcagctgtgccacagctccatcgtacatttgcaggttcagattcggatctgtgcttgggttgtctcctttaaagcggcagctggggacatttcgagggtgttttgtggtcctgagaggtgtttttgagattcctgagacaaagttgtctacagtgaaggccaggcttacgtatctctgcgcctcgctgaggggctggctcacgggggacagcgtggcatggacagagggcagcagcaggggactgcttagcaaggcctggtgtctgttctgtcttgggactgaagcatcctttttgaagttgcccatttcctgaaaactcagtgctaagatattaactgaatgtagcacacagatttttatgttggcccctgagtcaaagatactccccacttgcatttaagcaatgctgtgtgactcctaacgctgtggcctgacgggccccaaaagttctctatccttcttccatggcctgtgccctctcttcacagaaccgctaagcatgtatggagaagggaccagcacccatgccacagtttacagctaagtaattgttactcctttttacctgacgtaggcctgtaaaagaggaaattcagacatcgtacgactcgtaattgaatgtggagctgactgcaatattttgtcaaagcaccagaatagtgccctgcactttgcgaagcagtctaacaatgtgcttgtgtacgacttgctgaagaaccatttagagacactttcaagagtagcagaagagacaataaaggattactttgaagctcgccttgctctgctagaaccagtttttccaatcgcatgtcatcgactctgtgagggtccagatttttcaacagatttcaattacaaacccccacagaacataccagaaggctctggcatcctgctgtttatcttccatgcaaactttttgggtaaagaagttattgctcggctctgtggaccgtgtagtgtacaagctgtagttctgaatgataaatttcagcttcctgtttttctggacagtcattttgtttactcattcagccctgttgcaggtcccaataaactcttcataaggttgacagaagcaccctctgccaaggttaagttgctaataggtgcatacagagtgcagctgcagtgaccaaacagaagggactgggcggagttctcttcagaccgattcctatactctctttgacagcagtttggaattcttctagcacatctatgtaaagttttgtctgtaaacctcttgcagttaagcctgttgtctgttgtagtctgtaagatgcgacatagctgtgtctgtgccagtatgccggaatctcagtgcagtgtccagactgcgtatttcagtttttccacaatgtggatagtacatatgaggattatttaagaaaattaaagacttcactttcttttttctggagacggagtttcactccagcctgggtgacagaatgagaccttgtctcaaaaaaaaaaaaaaaagtttcttggaacctatacgtttttttttgttttttttttgaaaagccagaccttgtgcccttgttttgaacaccgactgggaagatggggcttaggtaacagccaaacctggctgtcagctgtgtgggagccaccaccctctctgggaagagttcctgcttctgtatggcaagcataaatcaagctcagtctgggttatggagaagttgaaaattgttttgttcctcattagtttataattgtatgaaatacgattttaatgaaaacttttcagaattcacgtttgtgtagatatttcagagaaccatttttactttacatcctaaaactgccttttcctatggttttgtcaataaaacactatgatgttggtctgtttccttttata

SEQ ID NO: 331008 - DNA, 791 bp, Homo sapiens
  misc_feature (185)..(185): n is a, c, g, or t
caacgatggtcctcagctaccacagccccagagttaatgattgtgacctgctgggcaccatcctgagtgatcagagccacctggggggccccatcttcttcagtcaccatcgccacctgggctgggatgtcatctctctcgtccttcacctccgaaaggtaagctatccgggttcttttggttgncggactctcaacgatggtcctcagctctcatggctttgagaagcccctagacagtgccatgagtgctgaggaggataccgatgtcagaggcaggaggaaaaagaagaccccgagaaaggctgaggacactagagagaacaggaagctagagaacaagaacgctttcttagagaagaaaactgtgcctaaaaagcagaggaatcaagacagaagcaaaagtgctgcagagttagagaagctgatgcctgtatctgcccaaacgccaaagggccggaggttgagcggggaagagagaggcctctggtccacggactcagccgaggagccatcgttgcaacgatggtcctcagcttttgatatgtgttcctcactaagcttaatcacttctggcttttgatttaaagtgagaggctgtgactcttcctttcacttgaacactcagaggacactgtagggttaattggcttaatttcaatattgttgtgtctcagggaatagggaggcctgaggtgagggagagagatggtggaacacatgcaacagtgatattctctgttttatatgggtgcagttagtgggacccccaaacaattacaatagatgact

SEQ ID NO: 331009 - DNA, 565 bp, Homo sapiens
  misc_feature (81)..(81): n is a, c, g, or t
  misc_feature (96)..(96): n is a, c, g, or t
  misc_feature (102)..(102): n is a, c, g, or t
  misc_feature (109)..(109): n is a, c, g, or t
  misc_feature (118)..(118): n is a, c, g, or t
  misc_feature (127)..(127): n is a, c, g, or t
  misc_feature (129)..(129): n is a, c, g, or t
  misc_feature (139)..(139): n is a, c, g, or t
  misc_feature (149)..(149): n is a, c, g, or t
  misc_feature (156)..(156): n is a, c, g, or t
  misc_feature (159)..(159): n is a, c, g, or t
  misc_feature (161)..(162): n is a, c, g, or t
  misc_feature (170)..(170): n is a, c, g, or t
  misc_feature (197)..(197): n is a, c, g, or t
tacagcaaaatatacaaaggactgccatttgcaccctttgtgcctgggggaaatgtggcaactgtctaataggaaaagatnaggccttccaaaccntttaangggagcnaaaccacanttaattggngnctggggaaantggaaaaaanaagggtnccntnntgtaaacncaaagtgtttgagaggtggatattttnctttttttgttttttttttgaaaagccagaccttgtgcccttgttttgaacaccgactgggaagatggggcttaggtaacagccaaacctggctgtcagctgtgtgggagccaccaccctctctgggaagagttcctgcttctgtatggcaagcataaatcaagctcagtctgggttatggagaagttgaaaattgttttgttcctcattagtttataattgtatgaaatacgattttaatgaaaacttttcagaattcacgtttgtgtagatatttcagagaaccatttttactttacatcctaaaactgccttttcctatggttttgtcaataaaacactatgatgttggtctgtttccttttata

SEQ ID NO: 331010 - DNA, 1865 bp, Homo sapiens
tctaaaggctggggagatggaaatggcagtggagggaagagacttgccttcttagaacttcaattccactgagatggacaacaagacagacacatgggtgtcaggtgcttggtggaagtagagctggaaagcggaggcaggcagagctgcaggtctttgtttggaaggttggcctgggaagccctcactggtattcgacaggcttgtggttcttttctacattaacgttaacacgtactatttttttttcttagactttcaagagtagcagaagagacaataaaggattactttgaagctcgccttgctctgctagaaccagtttttccaatcgcatgtcatcgactctgtgagggtccagatttttcaacagatttcaattacaaacccccacagaacataccagaaggtaagccgatgcctcccttcacacttttctatgtgaagtgtgacactatattaacagatttttagacagaatcctttcttggaacaaaactttaaggaaattccattacgtgtaataattctgcagaccggttaacagtagagccactctggtggaagagacatccagctgacaccccatccctgttttaacacccatatagagcatggaagttaggtcttaataatcacactagttctcaatgagttttattaaaattcagcgtcaagattctaagcctagaatgttttttccctgaattttgttgtttgtaatagtctttgccctttgaaaaagaaaaaaatagtcttgctccatagtaaagctgagtggaaagagatggagaagccactttcctctctagcctctgctcgacagaccctctccaggcagggctgcggctggccctctctacacgtggcgccaggtagacgtggaggcagtgcagtctgccgaggggaggaagccgggctctggctttttttgcttagaaactcctgttccccattttgtaaatggtttgtattcattcctggaaaatgtatttaagaacatatagccctgcccctgaaagagccgtttgtaatatcttagtgttgagagaacttatcaggtggttgctgttgttttgagatggagtctccctgtgtcacccaggctgcagtgcatggcatgatcttggctcactgcaacctctgccttctggcttcaagtgatccgcctgcctcagcctcccaaagtgctgggattacaggcgtgagccaccgtgcgcgttcagtaatttatagttttgattattcgggtggaccatctgcattgccaggtatgagtaccagagaacgatgccctgagctggccctggtgaacctgagcccccactgacacctacaactgctgggcctgcagttttctcagcatgtgtacaatgtctgcatccaccaacttttttttttttttttcaggagtctcacactgttccccaggctggagtgcagtggtgcgatctcggctcactgcaacctccgcctcctgggttcaagcaattctcctgcctcaacctcccgagtagctggaattacaggtgcccaccatgatacccagctaaattttgtgttcttagtagagatgggggtttcaccatattggccaggctgatcttgaactcctggcctcaagtgatctgcctgcctctgcctcccaaagtgctgggattacagacatgagccaccatgcctggccaatttttggttatgtattaatcagaaaaattggaaggggcaaaagggtatgtggaagaaaatggaaaaccactcagacccacacccaaagatgcccaccacaggaatgtccctgggacgtgtgcacattcagcagcagtgtttaaataccagttaaataacttcagtgtagaaaatca

SEQ ID NO: 331011 - DNA, 658 bp, Homo sapiens
  misc_feature (185)..(185): n is a, c, g, or t
caacgatggtcctcagctaccacagccccagagttaatgattgtgacctgctgggcaccatcctgagtgatcagagccacctggggggccccatcttcttcagtcaccatcgccacctgggctgggatgtcatctctctcgtccttcacctccgaaaggtaagctatccgggttcttttggttgncggactctcaacgatggtcctcagctctcatggctttgagaagcccctagacagtgccatgagtgctgaggaggataccgatgtcagaggcaggaggaaaaagaagaccccgagaaaggctgaggacactagagagaacaggaagctagagaacaagaacgctttcttagagaagaaaactgtgcctaaaaagcagaggaatcaagacagaagcaaaagtgctgcagagttagagaagctgatgcctgtatctgcccaaacgccaaagggccggaggttgagcggggaagagagaggcctctggtccacggactcagccgaggagccatcgttgcaacgatggtcctcagctcaaacgagagatacattacagatggttgtattataaacctaatcttaagaaaacttaccaagcaaatggttaaagactgattttttggtgatctgataaaaaggctggaaatcgtgaatca

SEQ ID NO: 331012 - DNA, 1205 bp, Homo sapiens
  misc_feature (1158)..(1158): n is a, c, g, or t
ggagtgccaccgctcctggaggctgctctgcaaagtgacgctgctgccccagcatctgcctcacagggtagggaggcacaggcacccttatcctcttttcgcaaatggaaacgtgccactcagaagaattaagggacttatctgaagtcacgtggctaataagtgacagagacaaggagacagtctgtcagctgtgccacagctccatcgtacatttgcaggttcagattcggatctgtgcttgggttgtctcctttaaagcggcagctggggacatttcgagggtgttttgtggtcctgagaggtgtttttgagattcctgagacaaagttgtctacagtgaaggccaggcttacgtatctctgcgcctcgctgaggggctggctcacgggggacagcgtggcatggacagagggcagcagcaggggactgcttagcaaggcctggtgtctgttctgtcttgggactgaagcatcctttttgaagttgcccatttcctgaaaactcagtgctaagatattaactgaatgtagcacacagatttttatgttggcccctgagtcaaagatactccccacttgcatttaagcaatgctgtgtgactcctaacgctgtggcctgacgggccccaaaagttctctatccttcttccatggcctgtgccctctcttcacagaaccgctaagcatgtatggagaagggaccagcacccatgccacagtttacagctaagtaattgttactcctttttacctgacgtaggcctgtaaaagaggaaattcagacatcgtacgactcgtaattgaatgtggagctgactgcaatattttgtcaaagcaccagaatagtgccctgcactttgcgaagcagtctaacaatgtgcttgtgtacgacttgctgaagaaccatttagagacgtaagtgagaagcgactgtgccacagttaagtcacatatcatacatctgtttatgtagacatattataattggagtggcctgtgtgtaactgctcagaaaaacatccagcacaagtcctgatggttttgtttccagtagatcacagatttaataaatggcatatgaattatttttctgcaagttatttaactctcagaaaatttcaaacttaacactggcctatctgggagtattttcctntaaatattaagtatgctctaatttggttagcaaatgtcgctggctta

SEQ ID NO: 331013 - DNA, 836 bp, Homo sapiens
aacgatggtcctcagctggaagacggcttcgtcccttcccctctttatctagttaactcctacttctccttcaatactcactcagctaaagtctgctgctcttgatttctggcaccaattttacaaggttttgtagagattaggtaaagtaatgtgggtctaacatggtaataatcaaatctgcagactttagctgaggaccatcgttgcaacgatggtctcagctctcatggctttgagaagcccctagacagtgccatgagtgctgaggaggataccgatgtcagaggcaggaggaaaaagaagaccccgagaaaggctgaggacactagagagaacaggaagctagagaacaagaacgctttcttagagaagaaaactgtgcctaaaaagcagaggaatcaagacagaagcaaaagtgctgcagagttagagaagctgatgcctgtatctgcccaaacgccaaagggccggaggttgagcggggaagagagaggcctctggtccacggactcagccgaggagtgattctcctgcctcagcctcctgagtagctgggattacagacacccgccatggcacccagctaattttgtatttttagtagagatggggtttatccatgttggtcaggctggtcttgaactcctgacctcaggtgatccgcccgcctcggcctcccaaagtgcttggattacaggcatgagccaccgtgcccggcctcaaaatagttttcttgtgggatttcagggggaaaatcacttgtaccagataccacatgatttggttgggtggcgtgggaaggcgggtcttggcccttctcaggttcatccatg

SEQ ID NO: 331014 - DNA, 3545 bp, Homo sapiens
tacgccgctgatgtggagtagggccgagcgcggaacgcgaggggctgctggggtgtttgtcgcagcgggttttcctcggcggtttgcggagctgctaggatggagcaggttgcggagggagcaagggtgaccgcagtccctgtgtcagctgccgacagcactgaggagttggccgaagtcgaagaaggagttggagtagtgggcgaagataatgacgcagccgcgagaggagcggaggcctttggcgacagtgaggaggacggagaggatgtgttcgaggtggagaagatcctggacatgaagaccgaggggggtaaagttctttacaaagttcgctggaaaggctatacatcggatgatgatacctgggagcccgagattcacctggaggactgtaaagaagtgcttcttgaatttaggaagaaaattgcagagaacaaagccaaagcagtcaggaaggatattcagagactatccttaaataacgacatatttgaggcgaactctgatagcgatcagcaaagtgagacaaaagaagatacttccccaaagaagaaaaagaaaaaattgaggcagagagaagagaaaagcccagatgatctgaaaaagaaaaaagcaaaggccgggaagctaaaagacaagtccaaaccagacctggagagctccttggaaagtttagtttttgatttaaggacaaagaaaagaatttctgaagccaaagaagaactaaaggagtccaaaaagcccaaaaaagatgaagtaaaagaaacaaaagaattaaagaaagttaaaaagggtgaaataagagatttaaagacgaaaacaagagaagatcccaaagaaaatagaaaaacaaaaaaagaaaaatttgtcgaatcccaggtggaatctgaatcaagtgtacttaatgattctccctttccagaggatgacagtgaagggctacattccgacagcagagaagagaaacaaaacactaaaagtgcaagagagagagcagggcaggacatggggctggagcatggctttgagaagcccctagacagtgccatgagtgctgaggaggataccgatgtcagaggcaggaggaaaaagaagaccccgagaaaggctgaggacactagagagaacaggaagctagagaacaagaacgctttcttagagaagaaaactgtgcctaaaaagcagaggaatcaagacagaagcaaaagtgctgcagagttagagaagctgatgcctgtatctgcccaaacgccaaagggccggaggttgagcggggaagagagaggcctctggtccacggactcagccgaggaggacaaagaaaccaaaagaaatgaatccaaagaaaaatatcagaaaaggcatgattctgacaaggaagaaaaaggcagaaaagagccaaaaggattaaagacacttaaggaaatcagaaatgcatttgatttatttaaattaactccagaagaaaaaaatgatgtttctgagaataatcggaaaagggaagaaataccactggattttaaaaccatagacgatcacaaaaccaaggaaaacaaacagtcacttaaagaaaggagaaacaccagagacgaaacggatacttgggcatacattgctgcagaaggtgatcaggaggttttagacagcgtgtgccaagcagatgagaattcagatggcaggcagcagattctgagtttgggcatggacctgcagttggaatggatgaagttggaagatttccaaaagcaccttgatgggaaagatgagaattttgctgcaacagatgcaattccaagtaatgtgttaagggatgctgtgaaaaatggggattatattactgtaaaagttgcacttaattcaaatgaagaatataacctggaccaagaggattccagtggaatgacactggtgatgcttgccgccgccggagggcaggacgacctcctgcgactcctcatcacaaaaggcgcgaaagtgaacggtcggcagaagaacgggaccaccgccctcattcatgctgcagagaagaactttttaacaacagtggctattcttttggaagcaggagcttttgtaaatgtccagcaaagcaatggtgagactgcactgatgaaggcctgtaaaagaggaaattcagacatcgtacgactcgtaattgaatgtggagctgactgcaatattttgtcaaagcaccagaatagtgccctgcactttgcgaagcagtctaacaatgtgcttgtgtacgacttgctgaagaaccatttagagacactttcaagagtagcagaagagacaataaaggattactttgaagctcgccttgctctgctagaaccagtttttccaatcgcatgtcatcgactctgtgagggtccagatttttcaacagatttcaattacaaacccccacagaacataccagaaggctctggcatcctgctgtttatcttccatgcaaactttttgggtaaagaagttattgctcggctctgtggaccgtgtagtgtacaagctgtagttctgaatgataaatttcagcttcctgtttttctgacagggtctcgctctgttgtccaggctggagtgcagtggcgcggattacagctcactggagtcttgacttcccaggcacaagcaatcctcccacctcagcctcctaactacctgggactaaaaatgacagtcattttgtttactcattcagccctgttgcaggtcccaataaactcttcataaggttgacagaagcaccctctgccaaggttaagttgctaataggtgcatacagagtgcagctgcagtgaccaaacagaagggactgggcggagttctcttcagaccgattcctatactctctttgacagcagtttggaattcttctagcacatctatgtaaagttttgtctgtaaacctcttgcagttaagcctgttgtctgttgtagtctgtaagatgcgacatagctgtgtctgtgccagtatgccggaatctcagtgcagtgtccagactgcgtatttcagtttttccacaatgtggatagtacatatgaggattatttaagaaaattaaagacttcactttcttttttctggagacggagtttcactccagcctgggtgacagaatgagaccttgtctcaaaaaaaaaaaaaaaagtttcttggaacctatacgtttttttttgttttttttttgaaaagccagaccttgtgcccttgttttgaacaccgactgggaagatggggcttaggtaacagccaaacctggctgtcagctgtgtgggagccaccaccctctctgggaagagttcctgcttctgtatggcaagcataaatcaagctcagtctgggttatggagaagttgaaaattgttttgttcctcattagtttataattgtatgaaatacgattttaatgaaaacttttcagaattcacgtttgtgtagatatttcagagaaccatttttactttacatcctaaaactgccttttcctatggttttgtcaataaaacactatgatgttggtctgtttccttttata

SEQ ID NO: 331015 - DNA, 3801 bp, Homo sapiens
tacgccgctgatgtggagtagggccgagcgcggaacgcgaggggctgctggggtgtttgtcgcagcgggttttcctcggcggtttgcggagctgctaggatggagcaggttgcggagggagcaagggtgaccgcagtccctgtgtcagctgccgacagcactgaggagttggccgaagtcgaagaaggagttggagtagtgggcgaagataatgacgcagccgcgagaggagcggaggcctttggcgacagtgaggaggacggagaggatgtgttcgaggtggagaagatcctggacatgaagaccgaggggggtaaagttctttacaaagttcgctggaaaggctatacatcggatgatgatacctgggagcccgagattcacctggaggactgtaaagaagtgcttcttgaatttaggaagaaaattgcagagaacaaagccaaagcagtcaggaaggatattcagagactatccttaaataacgacatatttgaggcgaactctgatagcgatcagcaaagtgagacaaaagaagatacttccccaaagaagaaaaagaaaaaattgaggcagagagaagagaaaagcccagatgatctgaaaaagaaaaaagcaaaggccgggaagctaaaagacaagtccaaaccagacctggagagctccttggaaagtttagtttttgatttaaggacaaagaaaagaatttctgaagccaaagaagaactaaaggagtccaaaaagcccaaaaaagatgaagtaaaagaaacaaaagaattaaagaaagttaaaaagggtgaaataagagatttaaagacgaaaacaagagaagatcccaaagaaaatagaaaaacaaaaaaagaaaaatttgtcgaatcccaggtggaatctgaatcaagtgtacttaatgattctccctttccagaggatgacagtgaagggctacattccgacagcagagaagagaaacaaaacactaaaagtgcaagagagagagcagggcaggacatggggctggagcatggctttgagaagcccctagacagtgccatgagtgctgaggaggataccgatgtcagaggcaggaggaaaaagaagaccccgagaaaggctgaggacactagagagaacaggaagctagagaacaagaacgctttcttagagaagaaaactgtgcctaaaaagcagaggaatcaagacagaagcaaaagtgctgcagagttagagaagctgatgcctgtatctgcccaaacgccaaagggccggaggttgagcggggaagagagaggcctctggtccacggactcagccgaggaggacaaagaaaccaaaagaaatgaatccaaagaaaaatatcagaaaaggcatgattctgacaaggaagaaaaaggcagaaaagagccaaaaggattaaagacacttaaggaaatcagaaatgcatttgatttatttaaattaactccagaagaaaaaaatgatgtttctgagaataatcggaaaagggaagaaataccactggattttaaaaccatagacgatcacaaaaccaaggaaaacaaacagtcacttaaagaaaggagaaacaccagagacgaaacggatacttgggcatacattgctgcagaaggtgatcaggaggttttagacagcgtgtgccaagcagatgagaattcagatggcaggcagcagattctgagtttgggcatggacctgcagttggaatggatgaagttggaagatttccaaaagcaccttgatgggaaagatgagaattttgctgcaacagatgcaattccaagtaatgtgttaagggatgctgtgaaaaatggggattatattactgtaaaagttgcacttaattcaaatgaagaatataacctggaccaagaggattccagtggaatgacactggtgatgcttgccgccgccggagggcaggacgacctcctgcgactcctcatcacaaaaggcgcgaaagtgaacggtcggcagaagaacgggaccaccgccctcattcatgctgcagagaagaactttttaacaacagtggctattcttttggaagcaggagcttttgtaaatgtccagcaaagcaatggtgagactgcactgatgaaggcctgtaaaagaggaaattcagacatcgtacgactcgtaattgaatgtggagctgactgcaatattttgtcaaagcaccagaatagtgccctgcactttgcgaagcagtctaacaatgtgcttgtgtacgacttgctgaagaaccatttagagacactttcaagagtagcagaagagacaataaaggattactttgaagctcgccttgctctgctagaaccagtttttccaatcgcatgtcatcgactctgtgagggtccagatttttcaacagatttcaattacaaacccccacagaacataccagaaggctctggcatcctgctgtttatcttccatgcaaactttttgggtaaagaagttattgctcggctctgtggaccgtgtagtgtacaagctgtagttctgaatgataaatttcagcttcctgtttttctggacagtcattttgtttactcattcagccctgttgcaggtcccaataaactcttcataaggttgacagaagcaccctctgccaaggttaagttgctaataggtgcatacagagtgcagctgcagtgaccaaacagaagggactgggcggagttctcttcagaccgattcctatactctctttgacagcagtttggaattcttctagcacatctatgtaaagttttgtctgtaaacctcttgcagttaagcctgttgtctgttgtagtctgtaagatgcgacatagctgtgtctgtgccagtatgccggaatctcagtgcagtgtccagactgcgtatttcagtttttccacaatgtggatagtacatatgaggattatttaagaaaattaaagacttcactttcttttttctggagacggagtttcactccagcctgggtgacagaatgagaccttgtctcaaaaaaaaaaaaaaaagtttcttggaacctatacgtttttttttgttttttttttgaaaagccagaccttgtgcccttgttttgaacaccgactgggaagatggggcttaggtaacagccaaacctggctgtcagctgtgtgggagccaccaccctctctgggaagagttcctgcttctgtatggcaagcataaatcaagctcagtctgggttatggagaagttgaaaattgttttgttcctcattagtttataattgtatgaaatacgattttaatgaaaacttttcagaattcacgtttgtgtagatatttcagagaaccatttttactttacatcctaaaactgccttttcctatggttttgtcaataaaacactatgatgttggtctgtttccttttatatctcaagtctcaaaactttaaaagacagtagatatttgtggttttctagctaaatgagggccaagattggactttttcaactaaattgaatcatgtagtatatctgatttcatagctttctgggggaaaagggaggatttgaattagcagcagtgcaggtcaggagcagtaaagaagacagtaggaggagtccaactatagatgtgaatgaacagcctcagaggaacacatgagaaggtgacctgctgtttatcaggaaggcggggctttctctctaagatacaaaccaaataggaatcgtcaaatagttcaaattatccgggggaaaaagcctgagcaatgatccctctggaaaacaaagcagttctcaggcagcacctt

SEQ ID NO: 331016 - DNA, 3884 bp, Homo sapiens
tacgccgctgatgtggagtagggccgagcgcggaacgcgaggggctgctggggtgtttgtcgcagcgggttttcctcggcggtttgcggagctgctaggatggagcaggttgcggagggagcaagggtgaccgcagtccctgtgtcagctgccgacagcactgaggagttggccgaagtcgaagaaggagttggagtagtgggcgaagataatgacgcagccgcgagaggagcggaggcctttggcgacagtgaggaggacggagaggatgtgttcgaggtggagaagatcctggacatgaagaccgaggggggtaaagttctttacaaagttcgctggaaaggctatacatcggatgatgatacctgggagcccgagattcacctggaggactgtaaagaagtgcttcttgaatttaggaagaaaattgcagagaacaaagccaaagcagtcaggaaggatattcagagactatccttaaataacgacatatttgaggcgaactctgatagcgatcagcaaagtgagacaaaagaagatacttccccaaagaagaaaaagaaaaaattgaggcagagagaagagaaaagcccagatgatctgaaaaagaaaaaagcaaaggccgggaagctaaaagacaagtccaaaccagacctggagagctccttggaaagtttagtttttgatttaaggacaaagaaaagaatttctgaagccaaagaagaactaaaggagtccaaaaagcccaaaaaagatgaagtaaaagaaacaaaagaattaaagaaagttaaaaagggtgaaataagagatttaaagacgaaaacaagagaagatcccaaagaaaatagaaaaacaaaaaaagaaaaatttgtcgaatcccaggtggaatctgaatcaagtgtacttaatgattctccctttccagaggatgacagtgaagggctacattccgacagcagagaagagaaacaaaacactaaaagtgcaagagagagagcagggcaggacatggggctggagcatggctttgagaagcccctagacagtgccatgagtgctgaggaggataccgatgtcagaggcaggaggaaaaagaagaccccgagaaaggctgaggacactagagagaacaggaagctagagaacaagaacgctttcttagagaagaaaactgtgcctaaaaagcagaggaatcaagacagaagcaaaagtgctgcagagttagagaagctgatgcctgtatctgcccaaacgccaaagggccggaggttgagcggggaagagagaggcctctggtccacggactcagccgaggaggacaaagaaaccaaaagaaatgaatccaaagaaaaatatcagaaaaggcatgattctgacaaggaagaaaaaggcagaaaagagccaaaaggattaaagacacttaaggaaatcagaaatgcatttgatttatttaaattaactccagaagaaaaaaatgatgtttctgagaataatcggaaaagggaagaaataccactggattttaaaaccatagacgatcacaaaaccaaggaaaacaaacagtcacttaaagaaaggagaaacaccagagacgaaacggatacttgggcatacattgctgcagaaggtgatcaggaggttttagacagcgtgtgccaagcagatgagaattcagatggcaggcagcagattctgagtttgggcatggacctgcagttggaatggatgaagttggaagatttccaaaagcaccttgatgggaaagatgagaattttgctgcaacagatgcaattccaagtaatgtgttaagggatgctgtgaaaaatggggattatattactgtaaaagttgcacttaattcaaatgaagaatataacctggaccaagaggattccagtggaatgacactggtgatgcttgccgccgccggagggcaggacgacctcctgcgactcctcatcacaaaaggcgcgaaagtgaacggtcggcagaagaacgggaccaccgccctcattcatgctgcagagaagaactttttaacaacagtggctattcttttggaagcaggagcttttgtaaatgtccagcaaagcaatggtgagactgcactgatgaaggcctgtaaaagaggaaattcagacatcgtacgactcgtaattgaatgtggagctgactgcaatattttgtcaaagcaccagaatagtgccctgcactttgcgaagcagtctaacaatgtgcttgtgtacgacttgctgaagaaccatttagagacactttcaagagtagcagaagagacaataaaggattactttgaagctcgccttgctctgctagaaccagtttttccaatcgcatgtcatcgactctgtgagggtccagatttttcaacagatttcaattacaaacccccacagaacataccagaaggtaagccgatgcctcccttcacacttttctatgtgaagtgtgacactatattaacagatttttagacagaatcctttcttggaacaaaactttaaggaaattccattacgtgtaataattctgcagaccggttaacagtagagccactctggtggaagagacatccagctgacaccccatccctgttttaacacccatatagagcatggaagttaggtcttaataatcacactagttctcaatgagttttattaaaattcagcgtcaagattctaagcctagaatgttttttccctgaattttgttgtttgtaatagtctttgccctttgaaaaagaaaaaaatagtcttgctccatagtaaagctgagtggaaagagatggagaagccactttcctctctagcctctgctcgacagaccctctccaggcagggctgcggctggccctctctacacgtggcgccaggtagacgtggaggcagtgcagtctgccgaggggaggaagccgggctctggctttttttgcttagaaactcctgttccccattttgtaaatggtttgtattcattcctggaaaatgtatttaagaacatatagccctgcccctgaaagagccgtttgtaatatcttagtgttgagagaacttatcaggtggttgctgttgttttgagatggagtctccctgtgtcacccaggctgcagtgcatggcatgatcttggctcactgcaacctctgccttctggcttcaagtgatccgcctgcctcagcctcccaaagtgctgggattacaggcgtgagccaccgtgcgcgttcagtaatttatagttttgattattcgggtggaccatctgcattgccaggtatgagtaccagagaacgatgccctgagctggccctggtgaacctgagcccccactgacacctacaactgctgggcctgcagttttctcagcatgtgtacaatgtctgcatccaccaacttttttttttttttttcaggagtctcacactgttccccaggctggagtgcagtggtgcgatctcggctcactgcaacctccgcctcctgggttcaagcaattctcctgcctcaacctcccgagtagctggaattacaggtgcccaccatgatacccagctaaattttgtgttcttagtagagatgggggtttcaccatattggccaggctgatcttgaactcctggcctcaagtgatctgcctgcctctgcctcccaaagtgctgggattacagacatgagccaccatgcctggccaatttttggttatgtattaatcagaaaaattggaaggggcaaaagggtatgtggaagaaaatggaaaaccactcagacccacacccaaagatgcccaccacaggaatgtccctgggacgtgtgcacattcagcagcagtgtttaaataccagttaaataacttcagtgtagaaaatca

SEQ ID NO: 331017 - DNA, 2889 bp, Homo sapiens
tacgccgctgatgtggagtagggccgagcgcggaacgcgaggggctgctggggtgtttgtcgcagcgggttttcctcggcggtttgcggagctgctaggatggagcaggttgcggagggagcaagggtgaccgcagtccctgtgtcagctgccgacagcactgaggagttggccgaagtcgaagaaggagttggagtagtgggcgaagataatgacgcagccgcgagaggagcggaggcctttggcgacagtgaggaggacggagaggatgtgttcgaggtggagaagatcctggacatgaagaccgaggggggtaaagttctttacaaagttcgctggaaaggctatacatcggatgatgatacctgggagcccgagattcacctggaggactgtaaagaagtgcttcttgaatttaggaagaaaattgcagagaacaaagccaaagcagtcaggaaggatattcagagactatccttaaataacgacatatttgaggcgaactctgatagcgatcagcaaagtgagacaaaagaagatacttccccaaagaagaaaaagaaaaaattgaggcagagagaagagaaaagcccagatgatctgaaaaagaaaaaagcaaaggccgggaagctaaaagacaagtccaaaccagacctggagagctccttggaaagtttagtttttgatttaaggacaaagaaaagaatttctgaagccaaagaagaactaaaggagtccaaaaagcccaaaaaagatgaagtaaaagaaacaaaagaattaaagaaagttaaaaagggtgaaataagagatttaaagacgaaaacaagagaagatcccaaagaaaatagaaaaacaaaaaaagaaaaatttgtcgaatcccaggtggaatctgaatcaagtgtacttaatgattctccctttccagaggatgacagtgaagggctacattccgacagcagagaagagaaacaaaacactaaaagtgcaagagagagagcagggcaggacatggggctggagcatggctttgagaagcccctagacagtgccatgagtgctgaggaggataccgatgtcagaggcaggaggaaaaagaagaccccgagaaaggctgaggacactagagagaacaggaagctagagaacaagaacgctttcttagagaagaaaactgtgcctaaaaagcagaggaatcaagacagaagcaaaagtgctgcagagttagagaagctgatgcctgtatctgcccaaacgccaaagggccggaggttgagcggggaagagagaggcctctggtccacggactcagccgaggaggacaaagaaaccaaaagaaatgaatccaaagaaaaatatcagaaaaggcatgattctgacaaggaagaaaaaggcagaaaagagccaaaaggattaaagacacttaaggaaatcagaaatgcatttgatttatttaaattaactccagaagaaaaaaatgatgtttctgagaataatcggaaaagggaagaaataccactggattttaaaaccatagacgatcacaaaaccaaggaaaacaaacagtcacttaaagaaaggagaaacaccagagacgaaacggatacttgggcatacattgctgcagaaggtgatcaggaggttttagacagcgtgtgccaagcagatgagaattcagatggcaggcagcagattctgagtttgggcatggacctgcagttggaatggatgaagttggaagatttccaaaagcaccttgatgggaaagatgagaattttgctgcaacagatgcaattccaagtaatgtgttaagggatgctgtgaaaaatggggattatattactgtaaaagttgcacttaattcaaatgaagaatataacctggaccaagaggattccagtggaatgacactggtgatgcttgccgccgccggagggcaggacgacctcctgcgactcctcatcacaaaaggcgcgaaagtgaacggtcggcagaagaacgggaccaccgccctcattcatgctgcagagaagaactttttaacaacagtggctattcttttggaagcaggagcttttgtaaatgtccagcaaagcaatggtgagactgcactgatgaaggcctgtaaaagaggaaattcagacatcgtacgactcgtaattgaatgtggagctgactgcaatattttgtcaaagcaccagaatagtgccctgcactttgcgaagcagtctaacaatgtgcttgtgtacgacttgctgaagaaccatttagagacactttcaagagtagcagaagagacaataaaggattactttgaagctcgccttgctctgctagaaccagtttttccaatcgcatgtcatcgactctgtgagggtccagatttttcaacagatttcaattacaaacccccacagaacataccagaaggctctggcatcctgctgtttatcttccatgcaaactttttgggtaaagaagttattgctcggctctgtggaccgtgtagtgtacaagctgtagttctgaatgataaatttcagcttcctgtttttctgacagggtctcgctctgttgtccaggctggagtgcagtggcgcggattacagctcactggagtcttgacttcccaggcacaagcaatcctcccacctcagcctcctaactacctgggactaaaaatgcacgccaccacatccggctaattttttgtattttttgtagagatggggtttcaccatgttggccaggctggtctcaaacttctgggctcaagcgattgtccgccttggcctcctccacaacatcttgacttatgaaataaaaaataaaacttatttatgattcttttacatcattggtgttttaagggcttctggtgtaagtttgaa

SEQ ID NO: 331018 - DNA, 3035 bp, Homo sapiens
tacgccgctgatgtggagtagggccgagcgcggaacgcgaggggctgctggggtgtttgtcgcagcgggttttcctcggcggtttgcggagctgctaggatggagcaggttgcggagggagcaagggtgaccgcagtccctgtgtcagctgccgacagcactgaggagttggccgaagtcgaagaaggagttggagtagtgggcgaagataatgacgcagccgcgagaggagcggaggcctttggcgacagtgaggaggacggagaggatgtgttcgaggtggagaagatcctggacatgaagaccgaggggggtaaagttctttacaaagttcgctggaaaggctatacatcggatgatgatacctgggagcccgagattcacctggaggactgtaaagaagtgcttcttgaatttaggaagaaaattgcagagaacaaagccaaagcagtcaggaaggatattcagagactatccttaaataacgacatatttgaggcgaactctgatagcgatcagcaaagtgagacaaaagaagatacttccccaaagaagaaaaagaaaaaattgaggcagagagaagagaaaagcccagatgatctgaaaaagaaaaaagcaaaggccgggaagctaaaagacaagtccaaaccagacctggagagctccttggaaagtttagtttttgatttaaggacaaagaaaagaatttctgaagccaaagaagaactaaaggagtccaaaaagcccaaaaaagatgaagtaaaagaaacaaaagaattaaagaaagttaaaaagggtgaaataagagatttaaagacgaaaacaagagaagatcccaaagaaaatagaaaaacaaaaaaagaaaaatttgtcgaatcccaggtggaatctgaatcaagtgtacttaatgattctccctttccagaggatgacagtgaagggctacattccgacagcagagaagagaaacaaaacactaaaagtgcaagagagagagcagggcaggacatggggctggagcatggctttgagaagcccctagacagtgccatgagtgctgaggaggataccgatgtcagaggcaggaggaaaaagaagaccccgagaaaggctgaggacactagagagaacaggaagctagagaacaagaacgctttcttagagaagaaaactgtgcctaaaaagcagaggaatcaagacagaagcaaaagtgctgcagagttagagaagctgatgcctgtatctgcccaaacgccaaagggccggaggttgagcggggaagagagaggcctctggtccacggactcagccgaggagggtaagggccacgggaggcagcagaaaacccatgttgagtggtcaagacatttcacaagcaaggaaagggaaacagtcaagctataagaaagtgtttatgaccatgggcggtcataaatgaagatcctccagcttttggacaccgcagcttatctcttagtctctggtttgtttctcttagaatgattatgactagaaaattaaaggctaatttgtgaacaaaaatcaggatggtttttagaggtactcagatgatatatggagcattgtatactcaggtttatagcttcatcagcttattttattaacttttcacatcctgcttggtcatttcccctgttgtcttgagtataccactattaaataataggacacaaactacattaaccagtattttaatgctttttaaaatgtatttaatagggaatttgtcccattataaaaattatttttatatggctttgcaaaatggatatattttccaaattatgagagtatttatatatgcaatatttatcaagggctataaaaaacatcatttttttcatccattatttccagttttgggaatgtattttaaggaaatcattttaaagaaggaaaagctgtgcatacatagttatttatggcagtattatcttcattagtgctacagcaaaatagaacaacttagaaaatgcagtggagaagaaaaccctacataaatgtgaacacagtcatgtaaaaatatgtgtgtaatgtaaacaaaaatgaattttaaaaaagattatccatgtaaaagtacgaggaccagaagggggaacatggagaagtacaatagtcatggttggttaagactatgggtggaaaactttcttataattttctttttttttttttaataataaaattcctaaaagagggttggaaaactgatgttgggtttggaatttgatattttgtgaattattatatggttgactgaggaagcaaaattcttttgtgtgaagaggatttaatgatcagttatcatgtaccacagtatacaagggtgattccctgaagccacaaacctgtattttccggttctcaaataaatttacagtgtcaactctttatccattcttgttttggatatcatgtcattttcaggacaaagaaaccaaaagaaatgaatccaaagaaaaatatcagaaaaggcatgattctgacaaggaagaaaaaggcagaaaagagccaaaaggattaaagacacttaaggaaatcagaaatgcatttgatttatttaaattaactccagactccagcctgggtgacagaatgagaccttgtctcaaaaaaaaaaaaaaaagtttcttggaacctatacgtttttttttgttttttttttgaaaagccagaccttgtgcccttgttttgaacaccgactgggaagatggggcttaggtaacagccaaacctggctgtcagctgtgtgggagccaccaccctctctgggaagagttcctgcttctgtatggcaagcataaatcaagctcagtctgggttatggagaagttgaaaattgttttgttcctcattagtttataattgtatgaaatacgattttaatgaaaacttttcagaattcacgtttgtgtagatatttcagagaaccatttttactttacatcctaaaactgccttttcctatggttttgtcaataaaacactatgatgttggtctgtttccttttata

SEQ ID NO: 331019 - DNA, 2867 bp, Homo sapiens
tagagaagaaaactgtgcctaaaaagcagaggaatcaagacagaagcaaaagtgctgcagagttagagaagctgatgcctgtatctgcccaaacgccaaagggccggaggttgagcggggaagagagaggcctctggtccacggactcacccgaggaggacaaagaaaccaaaagaaatgaatccaaaaagcccaaaaaagatgaagtaaaagaaacaaaagaattaaagaaagttaaaaagggtgaaataagagatttaaagacgaaaacaagagaagatcccaaagaaaatagaaaaacaaaaaaagaaaaatttgtcgaatcccaggtggaatctgaatcaagtgtacttaatgattctccctttccagaggatgacagtgaagggctacattccgacagcagagaagagaaacaaaacactaaaagtgcaagagagagagcagggcaggacatggggctggagcatggctttgagaagcccctagacagtgccatgagtgctgaggaggataccgatgtcagaggcaggaggaaaaagaagaccccgagaaaggctgaggacactagagagaacaggaagctagagaacaagaacgctttcttagagaagaaaactgtgcctaaaaagcagaggaatcaagacagaagcaaaagtgctgcagagttagagaagctgatgcctgtatctgcccaaacgccaaagggccggaggttgagcggggaagagagaggcctctggtccacggactcagccgaggaggacaaagaaaccaaaagaaatgaatccaaagaaaaatatcagaaaaggcatgattctgacaaggaagaaaaaggcagaaaagagccaaaaggattaaagacacttaaggaaatcagaaatgcatttgatttatttaaattaactccagaagaaaaaaatgatgtttctgagaataatcggaaaagggaagaaataccactggattttaaaaccatagacgatcacaaaaccaaggaaaacaaacagtcacttaaagaaaggagaaacaccagagacgaaacggatacttgggcatacattgctgcagaaggtgatcaggaggttttagacagcgtgtgccaagcagatgagaattcagatggcaggcagcagattctgagtttgggcatggacctgcagttggaatggatgaagttggaagatttccaaaagcaccttgatgggaaagatgagaattttgctgcaacagatgcaattccaagtaatgtgttaagggatgctgtgaaaaatggggattatattactgtaaaagttgcacttaattcaaatgaagaatataacctggaccaagaggattccagtggaatgacactggtgatgcttgccgccgccggagggcaggacgacctcctgcgactcctcatcacaaaaggcgcgaaagtgaacggtcggcagaagaacgggaccaccgccctcattcatgctgcagagaagaactttttaacaacagtggctattcttttggaagcaggagcttttgtaaatgtccagcaaagcaatggtgagactgcactgatgaaggcctgtaaaagaggaaattcagacatcgtacgactcgtaattgaatgtggagctgactgcaatattttgtcaaagcaccagaatagtgccctgcactttgcgaagcagtctaacaatgtgcttgtgtacgacttgctgaagaaccatttagagacactttcaagagtagcagaagagacaataaaggattactttgaagctcgccttgctctgctagaaccagtttttccaatcgcatgtcatcgactctgtgagggtccagatttttcaacagatttcaattacaaacccccacagaacataccagaaggctctggcatcctgctgtttatcttccatgcaaactttttgggtaaagaagttattgctcggctctgtggaccgtgtagtgtacaagctgtagttctgaatgataaatttcagcttcctgtttttctggacagtcattttgtttactcattcagccctgttgcaggtcccaataaactcttcataaggttgacagaagcaccctctgccaaggttaagttgctaataggtgcatacagagtgcagctgcagtgaccaaacagaagggactgggcggagttctcttcagaccgattcctatactctctttgacagcagtttggaattcttctagcacatctatgtaaagttttgtctgtaaacctcttgcagttaagcctgttgtctgttgtagtctgtaagatgcgacatagctgtgtctgtgccagtatgccggaatctcagtgcagtgtccagactgcgtatttcagtttttccacaatgtggatagtacatatgaggattatttaagaaaattaaagacttcactttcttttttctggagacggagtttcactccagcctgggtgacagaatgagaccttgtctcaaaaaaaaaaaaaaaagtttcttggaacctatacgtttttttttgttttttttttgaaaagccagaccttgtgcccttgttttgaacaccgactgggaagatggggcttaggtaacagccaaacctggctgtcagctgtgtgggagccaccaccctctctgggaagagttcctgcttctgtatggcaagcataaatcaagctcagtctgggttatggagaagttgaaaattgttttgttcctcattagtttataattgtatgaaatacgattttaatgaaaacttttcagaattcacgtttgtgtagatatttcagagaaccatttttactttacatcctaaaactgccttttcctatggttttgtcaataaaacactatgatgttggtctgtttccttttata

SEQ ID NO: 331020 - DNA, 2511 bp, Homo sapiens
gggtgatgctgcaggcactctaccggatctatgcaccattccgacagcagagaagagaaacaaaacactaaaagtgcaagagagagagcagggcaggacatggggctggagcatggctttgagaagcccctagacagtgccatgagtgctgaggaggataccgatgtcagaggcaggaggaaaaagaagaccccgagaaaggctgaggacactagagagaacaggaagctagagaacaagaacgctttcttagagaagaaaactgtgcctaaaaagcagaggaatcaagacagaagcaaaagtgctgcagagttagagaagctgatgcctgtatctgcccaaacgccaaagggccggaggttgagcggggaagagagaggcctctggtccacggactcagccgaggaggacaaagaaaccaaaagaaatgaatccaaagaaaaatatcagaaaaggcatgattctgacaaggaagaaaaaggcagaaaagagccaaaaggattaaagacacttaaggaaatcagaaatgcatttgatttatttaaattaactccagaagaaaaaaatgatgtttctgagaataatcggaaaagggaagaaataccactggattttaaaaccatagacgatcacaaaaccaaggaaaacaaacagtcacttaaagaaaggagaaacaccagagacgaaacggatacttgggcatacattgctgcagaaggtgatcaggaggttttagacagcgtgtgccaagcagatgagaattcagatggcaggcagcagattctgagtttgggcatggacctgcagttggaatggatgaagttggaagatttccaaaagcaccttgatgggaaagatgagaattttgctgcaacagatgcaattccaagtaatgtgttaagggatgctgtgaaaaatggggattatattactgtaaaagttgcacttaattcaaatgaagaatataacctggaccaagaggattccagtggaatgacactggtgatgcttgccgccgccggagggcaggacgacctcctgcgactcctcatcacaaaaggcgcgaaagtgaacggtcggcagaagaacgggaccaccgccctcattcatgctgcagagaagaactttttaacaacagtggctattcttttggaagcaggagcttttgtaaatgtccagcaaagcaatggtgagactgcactgatgaaggcctgtaaaagaggaaattcagacatcgtacgactcgtaattgaatgtggagctgactgcaatattttgtcaaagcaccagaatagtgccctgcactttgcgaagcagtctaacaatgtgcttgtgtacgacttgctgaagaaccatttagagacactttcaagagtagcagaagagacaataaaggattactttgaagctcgccttgctctgctagaaccagtttttccaatcgcatgtcatcgactctgtgagggtccagatttttcaacagatttcaattacaaacccccacagaacataccagaaggctctggcatcctgctgtttatcttccatgcaaactttttgggtaaagaagttattgctcggctctgtggaccgtgtagtgtacaagctgtagttctgaatgataaatttcagcttcctgtttttctggacagtcattttgtttactcattcagccctgttgcaggtcccaataaactcttcataaggttgacagaagcaccctctgccaaggttaagttgctaataggtgcatacagagtgcagctgcagtgaccaaacagaagggactgggcggagttctcttcagaccgattcctatactctctttgacagcagtttggaattcttctagcacatctatgtaaagttttgtctgtaaacctcttgcagttaagcctgttgtctgttgtagtctgtaagatgcgacatagctgtgtctgtgccagtatgccggaatctcagtgcagtgtccagactgcgtatttcagtttttccacaatgtggatagtacatatgaggattatttaagaaaattaaagacttcactttcttttttctggagacggagtttcactccagcctgggtgacagaatgagaccttgtctcaaaaaaaaaaaaaaaagtttcttggaacctatacgtttttttttgttttttttttgaaaagccagaccttgtgcccttgttttgaacaccgactgggaagatggggcttaggtaacagccaaacctggctgtcagctgtgtgggagccaccaccctctctgggaagagttcctgcttctgtatggcaagcataaatcaagctcagtctgggttatggagaagttgaaaattgttttgttcctcattagtttataattgtatgaaatacgattttaatgaaaacttttcagaattcacgtttgtgtagatatttcagagaaccatttttactttacatcctaaaactgccttttcctatggttttgtcaataaaacactatgatgttggtctgtttccttttata

SEQ ID NO: 331021 - DNA, 1598 bp, Homo sapiens
tacgccgctgatgtggagtagggccgagcgcggaacgcgaggggctgctggggtgtttgtcgcagcgggttttcctcggcggtttgcggagctgctaggatggagcaggttgcggagggagcaagggtgaccgcagtccctgtgtcagctgccgacagcactgaggagttggccgaagtcgaagaaggagttggagtagtgggcgaagataatgacgcagccgcgagaggagcggaggcctttggcgacagtgaggaggacggagaggatgtgttcgaggtggagaagatcctggacatgaagaccgaggggggtaaagttctttacaaagttcgctggaaaggctatacatcggatgatgatacctgggagcccgagattcacctggaggactgtaaagaagtgcttcttgaatttaggaagaaaattgcagagaacaaagccaaagcagtcaggaaggatattcagagactatccttaaataacgacatatttgaggcgaactctgatagcgatcagcaaagtgagacaaaagaagatacttccccaaagaagaaaaagaaaaaattgaggcagagagaagagaaaagcccagatgatctgaaaaagaaaaaagcaaaggccgggaagctaaaagacaagtccaaaccagacctggagagctccttggaaagtttagtttttgatttaaggacaaagaaaagaatttctgaagccaaagaagaactaaaggagtccaaaaagcccaaaaaagatgaagtaaaagaaacaaaagaattaaagaaagttaaaaagggtgaaataagagatttaaagacgaaaacaagagaagatcccaaagaaaatagaaaaacaaaaaaagaaaaatttgtcgaatcccaggtggaatctgaatcaagtgtacttaatgattctccctttccagaggatgacagtgaagggctacattccgacagcagagaagagaaacaaaacactaaaagtgcaagagagagagcagggcaggacatggggctggagcatggctttgagaagcccctagacagtgccatgagtgctgaggaggataccgatgtcagaggcaggaggaaaaagaagaccccgagaaaggctgaggacactagagagaacaggaagctagagaacaagaacgctttcttagagaagaaaactgtgcctaaaaagcagaggaatcaagacagaagcaaaagtgctgcagagttagagaagctgatgcctgtatctgcccaaacgccaaagggccggaggttgagcggggaagagagaggcctctggtccacggactcagccgaggagccatcgttgcaacgatggtcctcagcttttgatatgtgttcctcactaagcttaatcacttctggcttttgatttaaagtgagaggctgtgactcttcctttcacttgaacactcagaggacactgtagggttaattggcttaatttcaatattgttgtgtctcagggaatagggaggcctgaggtgagggagagagatggtggaacacatgcaacagtgatattctctgttttatatgggtgcagttagtgggacccccaaacaattacaatagatgact

SEQ ID NO: 331022 - DNA, 2811 bp, Homo sapiens
  misc_feature (185)..(185): n is a, c, g, or t
  misc_feature (322)..(322): n is a, c, g, or t
caacgatggtcctcagctaccacagccccagagttaatgattgtgacctgctgggcaccatcctgagtgatcagagccacctggggggccccatcttcttcagtcaccatcgccacctgggctgggatgtcatctctctcgtccttcacctccgaaaggtaagctatccgggttcttttggttgncggactctcaacgatggtcctcagctctacgatggtcctcagctcaacgatggtcctcagctcaacgatggtcctcagctcaacgatgctcctcagctcaacgatggtcctcagctcaacgatggtcctcagctcancgatggtcctcagctcaacgatggtcctcagctcaacgatggtcctcagctcaacgatggtcctcagctcaacgatggtcctcagctctcatggctttgagaagcccctagacagtgccatgagtgctgaggaggataccgatgtcagaggcaggaggaaaaagaagaccccgagaaaggctgaggacactagagagaacaggaagctagagaacaagaacgctttcttagagaagaaaactgtgcctaaaaagcagaggaatcaagacagaagcaaaagtgctgcagagttagagaagctgatgcctgtatctgcccaaacgccaaagggccggaggttgagcggggaagagagaggcctctggtccacggactcagccgaggaggacaaagaaaccaaaagaaatgaatccaaagaaaaatatcagaaaaggcatgattctgacaaggaagaaaaaggcagaaaagagccaaaaggattaaagacacttaaggaaatcagaaatgcatttgatttatttaaattaactccagaagaaaaaaatgatgtttctgagaataatcggaaaagggaagaaataccactggattttaaaaccatagacgatcacaaaaccaaggaaaacaaacagtcacttaaagaaaggagaaacaccagagacgaaacggatacttgggcatacattgctgcagaaggtgatcaggaggttttagacagcgtgtgccaagcagatgagaattcagatggcaggcagcagattctgagtttgggcatggacctgcagttggaatggatgaagttggaagatttccaaaagcaccttgatgggaaagatgagaattttgctgcaacagatgcaattccaagtaatgtgttaagggatgctgtgaaaaatggggattatattactgtaaaagttgcacttaattcaaatgaagaatataacctggaccaagaggattccagtggaatgacactggtgatgcttgccgccgccggagggcaggacgacctcctgcgactcctcatcacaaaaggcgcgaaagtgaacggtcggcagaagaacgggaccaccgccctcattcatgctgcagagaagaactttttaacaacagtggctattcttttggaagcaggagcttttgtaaatgtccagcaaagcaatggtgagactgcactgatgaaggcctgtaaaagaggaaattcagacatcgtacgactcgtaattgaatgtggagctgactgcaatattttgtcaaagcaccagaatagtgccctgcactttgcgaagcagtctaacaatgtgcttgtgtacgacttgctgaagaaccatttagagacactttcaagagtagcagaagagacaataaaggattactttgaagctcgccttgctctgctagaaccagtttttccaatcgcatgtcatcgactctgtgagggtccagatttttcaacagatttcaattacaaacccccacagaacataccagaaggctctggcatcctgctgtttatcttccatgcaaactttttgggtaaagaagttattgctcggctctgtggaccgtgtagtgtacaagctgtagttctgaatgataaatttcagcttcctgtttttctggacagtcattttgtttactcattcagccctgttgcaggtcccaataaactcttcataaggttgacagaagcaccctctgccaaggttaagttgctaataggtgcatacagagtgcagctgcagtgaccaaacagaagggactgggcggagttctcttcagaccgattcctatactctctttgacagcagtttggaattcttctagcacatctatgtaaagttttgtctgtaaacctcttgcagttaagcctgttgtctgttgtagtctgtaagatgcgacatagctgtgtctgtgccagtatgccggaatctcagtgcagtgtccagactgcgtatttcagtttttccacaatgtggatagtacatatgaggattatttaagaaaattaaagacttcactttcttttttctggagacggagtttcactccagcctgggtgacagaatgagaccttgtctcaaaaaaaaaaaaaaaagtttcttggaacctatacgtttttttttgttttttttttgaaaagccagaccttgtgcccttgttttgaacaccgactgggaagatggggcttaggtaacagccaaacctggctgtcagctgtgtgggagccaccaccctctctgggaagagttcctgcttctgtatggcaagcataaatcaagctcagtctgggttatggagaagttgaaaattgttttgttcctcattagtttataattgtatgaaatacgattttaatgaaaacttttcagaattcacgtttgtgtagatatttcagagaaccatttttactttacatcctaaaactgccttttcctatggttttgtcaataaaacactatgatgttggtctgtttccttttata

SEQ ID NO: 331023 - DNA, 1330 bp, Homo sapiens
agatctggtgcctctcgtcgtttgggcgccctttacggggcttttttccgtgggccctcgtccagtgtttccgtgttttctcccctggggtagcccgaatctggggcacttcctgggccgcactccctggggtagtgatgctaggtgcaccctctctcagtttacaatgtgttagacataataatgcggcaggaaaagaactaggttgcagctgagaaagatgcctctctagaggatggagccatctgaatcatgatctaggccttggtatggagttgccaaatgtatgtctttaggccggtccctaacctctcttgtatgaaaggaagctggacaaaatagtctctctaataaaacagtaatataaaattataagcacttggaattatttcttgaattaaaatggcaatgatctaacaatgtaaattgataagcaacttgaaaatattgccaaataatagaagcaaatcttggccatttgtgggttttttcttgtaagaaaggggaaatctggatctgtactgacacctgcgttcttttctttcaacaggttaagttgctaataggtgcatacagagtgcagctgcagtgaccaaacagaagggactgggcggagttctcttcagaccgattcctatactctctttgacagcagtttggaattcttctagcacatctatgtaaagttttgtctgtaaacctcttgcagttaagcctgttgtctgttgtagtctgtaagatgcgacatagctgtgtctgtgccagtatgccggaatctcagtgcagtgtccagactgcgtatttcagtttttccacaatgtggatagtacatatgaggattatttaagaaaattaaagacttcactttcttttttctggagacggagtttcactccagcctgggtgacagaatgagaccttgtctcaaaaaaaaaaaaaaaagtttcttggaacctatacgtttttttttgttttttttttgaaaagccagaccttgtgcccttgttttgaacaccgactgggaagatggggcttaggtaacagccaaacctggctgtcagctgtgtgggagccaccaccctctctgggaagagttcctgcttctgtatggcaagcataaatcaagctcagtctgggttatggagaagttgaaaattgttttgttcctcattagtttataattgtatgaaatacgattttaatgaaaacttttcagaattcacgtttgtgtagatatttcagagaaccatttttactttacatcctaaaactgccttttcctatggttttgtcaataaaacactatgatgttggtctgtttccttttata

SEQ ID NO: 331024 - DNA, 807 bp, Homo sapiens
  misc_feature (185)..(185): n is a, c, g, or t
  misc_feature (322)..(322): n is a, c, g, or t
caacgatggtcctcagctaccacagccccagagttaatgattgtgacctgctgggcaccatcctgagtgatcagagccacctggggggccccatcttcttcagtcaccatcgccacctgggctgggatgtcatctctctcgtccttcacctccgaaaggtaagctatccgggttcttttggttgncggactctcaacgatggtcctcagctctacgatggtcctcagctcaacgatggtcctcagctcaacgatggtcctcagctcaacgatgctcctcagctcaacgatggtcctcagctcaacgatggtcctcagctcancgatggtcctcagctcaacgatggtcctcagctcaacgatggtcctcagctcaacgatggtcctcagctcaacgatggtcctcagctctcatggctttgagaagcccctagacagtgccatgagtgctgaggaggataccgatgtcagaggcaggaggaaaaagaagaccccgagaaaggctgaggacactagagagaacaggaagctagagaacaagaacgctttcttagagaagaaaactgtgcctaaaaagcagaggaatcaagacagaagcaaaagtgctgcagagttagagaagctgatgcctgtatctgcccaaacgccaaagggccggaggttgagcggggaagagagaggcctctggtccacggactcagccgaggagccatcgttgagctgaggaccatcgttgagctgaggaccatcgttgagctgaggaccatcgttgagctgaggaccatcgttgagctgaggaccatcgttg

SEQ ID NO: 331025 - DNA, 357 bp, Homo sapiens
tgtgtatattttacaacaataaaaaaaatttatatatgtagaaaaaaaatctaggatttacatctaactattattagtattagtagttatgaataaagaaataagaatctcttttggtagaaaaaggttggccaggcgtggtgtctcatacctgtaatcacagcactttgggaggctgaggcgggcagatcacctgaggtcaggagttcgagaccagcctggccaacatggtgaaaccccatctctactaaaaatacaaaaaaattagccaggcgtggttgtgggtgcctgtaatcccagctactagggaggcttaggcaggagaatcacttgaacctgagaggcggaggttgccgt

SEQ ID NO: 331026 - DNA, 529 bp, Homo sapiens
gcgcacttcctgaagctgaaggtcagcatagacaaagggcctcagaatcgcgcaggcgcaattgtgccctggttcgccaagatgtcgttcccaaagtataagccgtcgagcctgcgcactctgcctgagaccctcgacccagccgaatacaacatatctccggaaacccggcgggcgcaagccgagcggttggccataagagcccagctgaaacgagagtacctgcttcagtacaacgatcccaaccgccgagggctcatcgaaaatcctgccttgcttcgttgggcctatgcaagaacaataaatgtctatcctaatttcagacccactcctaaaaactcactcatgggagctctgtgtggatttgggcccctcatcttcatttattatattatcaaaactgagagggataggaaagaaaaacttatccaggaaggaaaattggatcgaacatttcacctctcatattaagtctggcaatgatgactatatgtattcctgcctaaataaatcatctattaatcattaa

SEQ ID NO: 331027 - DNA, 771 bp, Homo sapiens
  misc_feature (581)..(581): n is a, c, g, or t
gcgcacttcctgaagctgaaggtcagcatagacaaagggcctcagaatcgcgcaggcgcaattgtgccctggttcgccaagatgtcgttcccaaagtataagccgtcgagcctgcgcactctgcctgagaccctcgacccagccgaatacaacatatctccggaaacccggcgggcgcaagccgagcggttggccataagagcccagctgaaacgagagtacctgcttcagtacaacgatcccaaccgccgagggctcatcgaaaatcctgccttgcttcgttgggcctatgcaagaacaataaatgtctatcctaatttcagacccactcctaaaaactcactcatgggagctctgtgtggatttgggcccctcatcttcatttattatattatcaaaactgagagggataggaaagaaaaacttatccaggaaggaaaattggatcgaacatttcacctctcatattaagtctggcaatgatgactatatgtattcctgcctaaataaatcatctattaatcattaaaaaaaaaaaaaaacaaaaaaaacaaaaaacttgtgtgggccgctccgccccnagaaaaagtctttcacaccatttcgtttgggccgccgccgcatgggtaggtgacctgggccatcactgttcgcaggagactcgggtccggcactgggccggggtttccccataaacaagcccgccgcaacccctgtctgacatccagagggttcgagcctacggtttcacgggtccaggaccgatatcgg

SEQ ID NO: 331028 - DNA, 893 bp, Homo sapiens
aacaactttgacctttctacaaaacttctaatagtgtgaaatgtctgaattaatgcttttcacactaggtcagcttaaaaaacttacagttcagctagcctaccccctccttcatcttcctacagcttatttgtagcctggaaagactattttggtgatagcattagaaagggtcctggaaacaaaatacaaagcatgatagagcatatgaaatctgtttctcttcattgggaatactgcatggttctgatggtcacacttgacaatgaagctaaaaacagtccagagaagaatagatgaaaatgacaaaggagaaaaagtggcttctctgacagttagattaggttagattagttagattaagattaggattcttaaataaacagaaagctaattagtgatatgagccttctacattctgaaggatttgaacaagatcattagaattcaaaaaacaccagaaatgaaagatctttcctgaagctgtttaggaatattcatgatatacccttaactgttctagagaacaaaatgcgtctgtgctccttcacaaaagtccctatgaatttgtttctcaatgtgatccttcttaagttctataactttttgttttcattaattttaggaaaatcctgccttgcttcgttgggcctatgcaagaacaataaatgtctatcctaatttcagacccactcctaaaaactcactcatgggagctctgtgtggatttgggcccctcatcttcatttattatattatcaaaactgagagggataggaaagaaaaacttatccaggaaggaaaattggatcgaacatttcacctctcatattaagtctggcaatgatgactatatgtattcctgcctaaataaatcatctattaatcattaa

SEQ ID NO: 331029 - DNA, 829 bp, Homo sapiens
gataaatccatccggcgtcgcgcgtgccctgcattcggctaaagtatgatcagtgcgctcaatatgtattgatatgtccagtacgaagcacttgctgcgatctacttgaccttaggatggacctctcgtgcagtatcctccagcccagaataataacaagacagtcactccgtgccgggaaaaaaccgcagggcggtgtgcctggcataacgacacagtacgccagggatttgggagcttcatagaaggctcccatccatcgtaggaactcataatctaccatggtgttcagtagcagaagcatccgcatatcgaccggtagcggcctccagtcgcaatggaaaatcctgccttgcttcgttgggcctatgcaagaacaataaatgtctatcctaatttcagacccactcctaaaaactcactcatgggagctctgtgtggatttgggcccctcatcttcatttattatattatcaaaactgagagggataggaaagaaaaacttatccaggaaggaaaattggatcgaacatttcacctctcatattaagtctggcaatggtggaactattagtggtattccctgggcctaaaattaaccctcatcttatttaaatcattacacatagaaaaaaagaacaggagagaaagacaaagacaaaaacagtgtgcaagggcgcgatcgaggcacccagcgaaaaagctcgttacaaaagcacatgacgtagggcgcgcgagggccccacaggggaaaggggaaagagtgggcaaaggagggtacccaggagaagaaccggggagaaaaaaggaagggggaaacagcacaaag

SEQ ID NO: 331030 - DNA, 214 bp, Homo sapiens
  misc_feature (42)..(42): n is a, c, g, or t
  misc_feature (86)..(86): n is a, c, g, or t
caagttctactgagatatttgtgaaaaaaatctatgtttacnattcaattgttgtatattactacccctttagttttcaagttcanaattattgataggaaagaaaaacttatccaggaaggaaaattggatcgaacatttcacctctcatattaagtctggcaatgatgactatatgtattcctgcctaaataaatcatctattaatcattaa

SEQ ID NO: 331031 - DNA, 698 bp, Homo sapiens
  misc_feature (569)..(569): n is a, c, g, or t
  misc_feature (572)..(572): n is a, c, g, or t
  misc_feature (574)..(574): n is a, c, g, or t
  misc_feature (581)..(582): n is a, c, g, or t
  misc_feature (586)..(586): n is a, c, g, or t
  misc_feature (589)..(589): n is a, c, g, or t
gcgcacttcctgaagctgaaggtcagcatagacaaagggcctcagaatcgcgcaggcgcaattgtgccctggttcgccaagatgtcgttcccaaagtataagccgtcgagcctgcgcactctgcctgagaccctcgacccagccgaatacaacatatctccggaaacccggcgggcgcaagccgagcggttggccataagagcccagctgaaacgagagtacctgcttcagtacaacgatcccaaccgccgagggctcatcgaaaatcctgccttgcttcgttgggcctatgcaagaacaataaatgtctatcctaatttcagacccactcctaaaaactcactcatgggagctctgtgtggatttgggcccctcatcttcatttattatattatcaaaactgagagggataggaaagaaaaacttatccaggaaggaaaattggatcgaacatttcacctctcatattaagtctggcaatgatgactatatgtattcctgcctaaataaatcatctattaatcattaaaaacacacaaaaaaacaaacaaacaaaaaaaattttgggnggncngggcccnngaanaantttttttaaaccctttggttgggcgggcggggccccgggggtgtgaccctgggccaaacgggtcccaggaaatccggggtcgcctgggttggtttcccccaataaaaac

SEQ ID NO: 331032 - DNA, 780 bp, Homo sapiens
gcgcacttcctgaagctgaaggtcagcatagacaaagggcctcagaatcgcgcaggcgcaattgtgccctggttcgccaagatgtcgttcccaaagtataagccgtcgagcctgcgcactctgcctgagaccctcgacccagccgaatacaacatatctccggaaacccggcgggcgcaagccgagcggttggccataagagcccagctgaaacgagagtacctgcttcagtacaacgatcccaaccgccgagggctcatcgaaaatcctgccttgcttcgttgggcctatgcaagaacaataaatgtctatcctaatttcagacccactcctaaaaactcactcatgggagctctgtgtggatttgggcccctcatcttcatttattatattatcaaaactgagagggataggaaagaaaaacttatccaggaaggaaaattggatcgaacatttcacctctcatattaagtctggcaatgatgactatatgtattcctgcctaaataaatcatctattaatcattaaaaaaaaaaaaaaaaaaaaaaaaaaaaaaaaaaaaaaaaaaaaaaaaaaacaaaaaaaaaaaaaaaaaaaaagaaccttgtgggccgcttggcccaagtgaattttagattggagaaggtttatgctggcggccgaatttggggctaattggccaatttccccttatggggggcggtttacaattcatggcccgcggtttaacaacggcggaactggaaaaccttggcggtcccaacttaaatcgcttggaa

SEQ ID NO: 331033 - DNA, 1479 bp, Homo sapiens
gcgcacttcctgaagctgaaggtcagcatagacaaagggcctcagaatcgcgcaggcgcaattgtgccctggttcgccaagatgtcgttcccaaagtataagccgtcgagcctgcgcactctgcctgagaccctcgacccagccgaatacaacatatctccggaaacccggcgggcgcaagccgagcggttggccataagagcccagctgaaacgagagtacctgcttcagtacaacgatcccaaccgccgagggctcatcgaaaatcctgccttgcttcgttgggcctatgcaagaacaataaatgtctatcctaatttcagacccactcctaaaaactcactcatgggagctctgtgtggatttgggcccctcatcttcatttattatattatcaaaactgagagggtaagtattcagaccagatgtttagtatttgagtgataggttcactttctagggaccagctgcagctccttctcttgaagattgccaccagtgcccctcccaccttggggctgtcctctgccttcccttcctctcttcttttatctttattcctttccagcaggagttaaaacagaaagttttcagtcacctttgtctatttttgttagttcatttgttttttaaaaagatgatgtttattgggttaagtattagcagaatacataaatcatttagtacgtttcctgtttgcgtgaattctatttatgttggtcacattttgcaaattaatgttaaaacctattaatactctacggacagagaagcacaagctgcctgtgtggggaatagctgccgtcagcagcctgggtatatgattggagagaaagtcaagctgatctttggcaccaaaccattccacatctggtactaaaccctgagctgcagcccccaggcttgtgttgccactggagcccactcgtctagctttgtctttaactggcccatctgcattcccattagagttcgtgtattttgattatctggtgaatgatctacttaacagaaaggtagtccacattttcccagaaagtgtttgcattttgctttcaatgtatggttttatgggataatatatttctaatgactaaaatgtgagtaagatgtttttgaataggagcattttcttactgtgtctttagttcctcggattactgtttcttcgcacactccctgggctttagacagtgggattgcaattaggtttggagtgtttcattctgtttgtcagttgtacggtgggttgtgccaaaatgcagtttttcttaccttttttatttatttatttttatctaatatagccaactggcagaatatattgtctttaatgtactttttttctgtctttacaggataggaaagaaaaacttatccaggaaggaaaattggatcgaacatttcacctctcatattaagtctggcaatgatgactatatgtattcctgcctaaataaatcatctattaatcattaa

SEQ ID NO: 331034 - DNA, 1843 bp, Homo sapiens
aacaactttgacctttctacaaaacttctaatagtgtgaaatgtctgaattaatgcttttcacactaggtcagcttaaaaaacttacagttcagctagcctaccccctccttcatcttcctacagcttatttgtagcctggaaagactattttggtgatagcattagaaagggtcctggaaacaaaatacaaagcatgatagagcatatgaaatctgtttctcttcattgggaatactgcatggttctgatggtcacacttgacaatgaagctaaaaacagtccagagaagaatagatgaaaatgacaaaggagaaaaagtggcttctctgacagttagattaggttagattagttagattaagattaggattcttaaataaacagaaagctaattagtgatatgagccttctacattctgaaggatttgaacaagatcattagaattcaaaaaacaccagaaatgaaagatctttcctgaagctgtttaggaatattcatgatatacccttaactgttctagagaacaaaatgcgtctgtgctccttcacaaaagtccctatgaatttgtttctcaatgtgatccttcttaagttctataactttttgttttcattaattttaggaaaatcctgccttgcttcgttgggcctatgcaagaacaataaatgtctatcctaatttcagacccactcctaaaaactcactcatgggagctctgtgtggatttgggcccctcatcttcatttattatattatcaaaactgagagggtaagtattcagaccagatgtttagtatttgagtgataggttcactttctagggaccagctgcagctccttctcttgaagattgccaccagtgcccctcccaccttggggctgtcctctgccttcccttcctctcttcttttatctttattcctttccagcaggagttaaaacagaaagttttcagtcacctttgtctatttttgttagttcatttgttttttaaaaagatgatgtttattgggttaagtattagcagaatacataaatcatttagtacgtttcctgtttgcgtgaattctatttatgttggtcacattttgcaaattaatgttaaaacctattaatactctacggacagagaagcacaagctgcctgtgtggggaatagctgccgtcagcagcctgggtatatgattggagagaaagtcaagctgatctttggcaccaaaccattccacatctggtactaaaccctgagctgcagcccccaggcttgtgttgccactggagcccactcgtctagctttgtctttaactggcccatctgcattcccattagagttcgtgtattttgattatctggtgaatgatctacttaacagaaaggtagtccacattttcccagaaagtgtttgcattttgctttcaatgtatggttttatgggataatatatttctaatgactaaaatgtgagtaagatgtttttgaataggagcattttcttactgtgtctttagttcctcggattactgtttcttcgcacactccctgggctttagacagtgggattgcaattaggtttggagtgtttcattctgtttgtcagttgtacggtgggttgtgccaaaatgcagtttttcttaccttttttatttatttatttttatctaatatagccaactggcagaatatattgtctttaatgtactttttttctgtctttacaggataggaaagaaaaacttatccaggaaggaaaattggatcgaacatttcacctctcatattaagtctggcaatgatgactatatgtattcctgcctaaataaatcatctattaatcattaa

SEQ ID NO: 331035 - DNA, 1586 bp, Homo sapiens
gcgcacttcctgaagctgaaggtcagcatagacaaagggcctcagaatcgcgcaggcgcaattgtgccctggttcgccaagatgtcgttcccaaagtataagccgtcgagcctgcgcactctgcctgagaccctcgacccagccgaatacaacatatctccggaaacccggcgggcgcaagccgagcggttggccataagagcccagctgaaacgagagtacctgcttcagtacaacgatcccaaccgccgagggctcatcgtgagtgtggggcctcccaggcgggaatagggcccgagtcctgggagagaccgagagagaccacgcaaagggtcggccaccgctcccgatcagtatctcagacgcaggaaaatcctgccttgcttcgttgggcctatgcaagaacaataaatgtctatcctaatttcagacccactcctaaaaactcactcatgggagctctgtgtggatttgggcccctcatcttcatttattatattatcaaaactgagagggtaagtattcagaccagatgtttagtatttgagtgataggttcactttctagggaccagctgcagctccttctcttgaagattgccaccagtgcccctcccaccttggggctgtcctctgccttcccttcctctcttcttttatctttattcctttccagcaggagttaaaacagaaagttttcagtcacctttgtctatttttgttagttcatttgttttttaaaaagatgatgtttattgggttaagtattagcagaatacataaatcatttagtacgtttcctgtttgcgtgaattctatttatgttggtcacattttgcaaattaatgttaaaacctattaatactctacggacagagaagcacaagctgcctgtgtggggaatagctgccgtcagcagcctgggtatatgattggagagaaagtcaagctgatctttggcaccaaaccattccacatctggtactaaaccctgagctgcagcccccaggcttgtgttgccactggagcccactcgtctagctttgtctttaactggcccatctgcattcccattagagttcgtgtattttgattatctggtgaatgatctacttaacagaaaggtagtccacattttcccagaaagtgtttgcattttgctttcaatgtatggttttatgggataatatatttctaatgactaaaatgtgagtaagatgtttttgaataggagcattttcttactgtgtctttagttcctcggattactgtttcttcgcacactccctgggctttagacagtgggattgcaattaggtttggagtgtttcattctgtttgtcagttgtacggtgggttgtgccaaaatgcagtttttcttaccttttttatttatttatttttatctaatatagccaactggcagaatatattgtctttaatgtactttttttctgtctttacaggataggaaagaaaaacttatccaggaaggaaaattggatcgaacatttcacctctcatattaagtctggcaatgatgactatatgtattcctgcctaaataaatcatctattaatcattaa

SEQ ID NO: 331036 - DNA, 636 bp, Homo sapiens
gcgcacttcctgaagctgaaggtcagcatagacaaagggcctcagaatcgcgcaggcgcaattgtgccctggttcgccaagatgtcgttcccaaagtataagccgtcgagcctgcgcactctgcctgagaccctcgacccagccgaatacaacatatctccggaaacccggcgggcgcaagccgagcggttggccataagagcccagctgaaacgagagtacctgcttcagtacaacgatcccaaccgccgagggctcatcgtgagtgtggggcctcccaggcgggaatagggcccgagtcctgggagagaccgagagagaccacgcaaagggtcggccaccgctcccgatcagtatctcagacgcaggaaaatcctgccttgcttcgttgggcctatgcaagaacaataaatgtctatcctaatttcagacccactcctaaaaactcactcatgggagctctgtgtggatttgggcccctcatcttcatttattatattatcaaaactgagagggataggaaagaaaaacttatccaggaaggaaaattggatcgaacatttcacctctcatattaagtctggcaatgatgactatatgtattcctgcctaaataaatcatctattaatcattaa

SEQ ID NO: 331037 - DNA, 492 bp, Homo sapiens
gcggccgcctactactactaaattcgcggccgcgtcgacccaagatgtcgttcccaaagtataagccgtcgagcctgcgcactctgcctgagaccctcgacccagccgaatacaacatatctccggaaacccggcgggcgcaagccgagcggttggccataagagcccagctgaaacgagagtacctgcttcagtacaacgatcccaaccgccgagggctcatcgaaaatcctgccttgcttcgttgggcctatgcaagaacaataaatgtctatcctaatttcagacccactcctaaaaactcactcatgggagctctgtgtggatttgggcccctcatcttcatttattatattatcaaaactgagagggataggaaagaaaaacttatccaggaaggaaaattggatcgaacatttcacctctcatattaagtctggcaatgatgactatatgtattcctgcctaaataaatcatctattaatcattaa

SEQ ID NO: 331038 - DNA, 1086 bp, Homo sapiens
  misc_feature (628)..(628): n is a, c, g, or t
  misc_feature (631)..(631): n is a, c, g, or t
  misc_feature (634)..(634): n is a, c, g, or t
  misc_feature (640)..(640): n is a, c, g, or t
gcgcacttcctgaagctgaaggtcagcatagacaaagggcctcagaatcgcgcaggcgcaattgtgccctggttcgccaagatgtcgttcccaaagtataagccgtcgagcctgcgcactctgcctgagaccctcgacccagccgaatacaacatatctccggaaacccggcgggcgcaagccgagcggttggccataagagcccagctgaaacgagagtacctgcttcagtacaacgatcccaaccgccgagggctcatcgaaaatcctgccttgcttcgttgggcctatgcaagaacaataaatgtctatcctaatttcagacccactcctaaaaactcactcatgggagctctgtgtggatttgggcccctcatcttcatttattatattatcaaaactgagagggataggaaagaaaaacttatccaggaaggaaaattggatcgaacatttcacctctcatattaagtctggcaatgatgactatatgtattcctgcctaaataaatcatctattaatcattaaaaaaaaaaaaaaaaaaaaaaaaaaaaaaaaaaaaaaaaaaaaaaaaaaacaaaaaaaaaaaaaaaaaaaaagaaaaaaaaaaaaaaacaaaaaaaaagnganaanaaaganaaacacaacgaaatcacaggcgagaacaacgagaccagaaggagagagcggaccacacacgcgacgcgcgcgcgcgccagacagaccgccgacgggtgcggggcggacgggcggagagcgagggagcgagaagagagggcgaaggtcaagagagagcggcgaagagaagcgaggagacacgaccaacggcctaggagagagaaggagacagggagcgacgccgcgaagcgacgaaggcgagcggacagagcaagaacgcgatacatatcacgcactaagatttgatgtcataggaggaggggtgagagaggaaaggcggcggggggcggaggtcacaggcgagagggctgaagtaagaaggcgcgggaggacacgaacgccaacagaaaggagggggcgggcgcgcaacgcacggagggcgtggaggagcggggggggggtagggg

SEQ ID NO: 331039 - DNA, 705 bp, Homo sapiens
gcgcacttcctgaagctgaaggtcagcatagacaaagggcctcagaatcgcgcaggcgcaattgtgccctggttcgccaagatgtcgttcccaaagtataagccgtcgagcctgcgcactctgcctgagaccctcgacccagccgaatacaacatatctccggaaacccggcgggcgcaagccgagcggttggccataagagcccagctgaaacgagagtacctgcttcagtacaacgatcccaaccgccgagggctcatcgaaaatcctgccttgcttcgttgggcctatgcaagaacaataaatgtctatcctaatttcagacccactcctaaaaactcactcatgggagctctgtgtggatttgggcccctcatcttcatttattatattatcaaaactgagagggataggaaagaaaaacttatccaggaaggaaaattggatcgaacatttcacctctcatattaagtctggcaatgatgactatatgtattcctgcctaaataaatcatctattaatcattaaagtagtagtttctctttcttagtattaccttgattcaatgttaaaaactattaacaccctaacaacacagaagcagacgcagcccgtgttgggaatctgctgtcagagtgacagcaaacatttgctgtacattgaatgaatgaacataaacttcattaaactgtgagctcttagaa

SEQ ID NO: 331040 - DNA, 1425 bp, Homo sapiens
gcgcacttcctgaagctgaaggtcagcatagacaaagggcctcagaatcgcgcaggcgcaattgtgccctggttcgccaagatgtcgttcccaaagtataagccgtcgagcctgcgcactctgcctgagaccctcgacccagccgaatacaacatatctccggaaacccggcgggcgcaagccgagcggttggccataagagcccagctgaaacgagagtacctgcttcagtacaacgatcccaaccgccgagggctcatcgaaaatcctgccttgcttcgttgggcctatgcaagaacaataaatgtctatcctaatttcagacccactcctaaaaactcactcatgggagctctgtgtggatttgggcccctcatcttcatttattatattatcaaaactgagagggtaagtattcagaccagatgtttagtatttgagtgataggttcactttctagggaccagctgcagctccttctcttgaagattgccaccagtgcccctcccaccttggggctgtcctctgccttcccttcctctcttcttttatctttattcctttccagcaggagttaaaacagaaagttttcagtcacctttgtctatttttgttagttcatttgttttttaaaaagatgatgtttattgggttaagtattagcagaatacataaatcatttagtacgtttcctgtttgcgtgaattctatttatgttggtcacattttgcaaattaatgttaactgccgtcagcagcctgggtatatgattggagagaaagtcaagctgatctttggcaccaaaccattccacatctggtactaaaccctgagctgcagcccccaggcttgtgttgccactggagcccactcgtctagctttgtctttaactggcccatctgcattcccattagagttcgtgtattttgattatctggtgaatgatctacttaacagaaaggtagtccacattttcccagaaagtgtttgcattttgctttcaatgtatggttttatgggataatatatttctaatgactaaaatgtgagtaagatgtttttgaataggagcattttcttactgtgtctttagttcctcggattactgtttcttcgcacactccctgggctttagacagtgggattgcaattaggtttggagtgtttcattctgtttgtcagttgtacggtgggttgtgccaaaatgcagtttttcttaccttttttatttatttatttttatctaatatagccaactggcagaatatattgtctttaatgtactttttttctgtctttacaggataggaaagaaaaacttatccaggaaggaaaattggatcgaacatttcacctctcatattaagtctggcaatgatgactatatgtattcctgcctaaataaatcatctattaatcattaa

SEQ ID NO: 331041 - DNA, 1193 bp, Homo sapiens
  misc_feature (735)..(735): n is a, c, g, or t
  misc_feature (738)..(738): n is a, c, g, or t
  misc_feature (741)..(741): n is a, c, g, or t
  misc_feature (747)..(747): n is a, c, g, or t
gcgcacttcctgaagctgaaggtcagcatagacaaagggcctcagaatcgcgcaggcgcaattgtgccctggttcgccaagatgtcgttcccaaagtataagccgtcgagcctgcgcactctgcctgagaccctcgacccagccgaatacaacatatctccggaaacccggcgggcgcaagccgagcggttggccataagagcccagctgaaacgagagtacctgcttcagtacaacgatcccaaccgccgagggctcatcgtgagtgtggggcctcccaggcgggaatagggcccgagtcctgggagagaccgagagagaccacgcaaagggtcggccaccgctcccgatcagtatctcagacgcaggaaaatcctgccttgcttcgttgggcctatgcaagaacaataaatgtctatcctaatttcagacccactcctaaaaactcactcatgggagctctgtgtggatttgggcccctcatcttcatttattatattatcaaaactgagagggataggaaagaaaaacttatccaggaaggaaaattggatcgaacatttcacctctcatattaagtctggcaatgatgactatatgtattcctgcctaaataaatcatctattaatcattaaaaaaaaaaaaaaaaaaaaaaaaaaaaaaaaaaaaaaaaaaaaaaaaaaacaaaaaaaaaaaaaaaaaaaaagaaaaaaaaaaaaaaacaaaaaaaaagnganaanaaaganaaacacaacgaaatcacaggcgagaacaacgagaccagaaggagagagcggaccacacacgcgacgcgcgcgcgcgccagacagaccgccgacgggtgcggggcggacgggcggagagcgagggagcgagaagagagggcgaaggtcaagagagagcggcgaagagaagcgaggagacacgaccaacggcctaggagagagaaggagacagggagcgacgccgcgaagcgacgaaggcgagcggacagagcaagaacgcgatacatatcacgcactaagatttgatgtcataggaggaggggtgagagaggaaaggcggcggggggcggaggtcacaggcgagagggctgaagtaagaaggcgcgggaggacacgaacgccaacagaaaggagggggcgggcgcgcaacgcacggagggcgtggaggagcggggggggggtagggg

SEQ ID NO: 331042 - DNA, 432 bp, Homo sapiens
gatatgaggcagaaattagttttgtgtgcacataaaacataaaacaaatgagtggagattttgatcttattttccctacatggagttgctagttaattcggttactctaattatttggaaacacggcatataaaatatagactaagaactacaaacttcaaagccatcttttgacaattttgccttaagggtcacgttctctttaaagttgctgactaaattgcacctgcagaaattgttcccataaagagacactcaggagatcagattgattgcgagggtgtgtgagggctgtgtggtccaccggccagagccccccaggcccagctaggattctgagtggcagccccatctctgccctgactcttgggatgacctccttagaaccatttgaccccttagaacgttattttctcacttatcatactgtga

SEQ ID NO: 331043 - DNA, 1384 bp, Homo sapiens
gctgagtcccgtagccaatgggcgggggtggggggcggcccggccggcggggagggggagcccgcggccggggacgcggggggaggaggaggcgggctcccaatccggttccatccggttctcccaccgcccccgctgtgggtctcagcagctcgggcggcgggaggagtggcagcggcaaggcagcccagtttcgcgaaggctgtcggcgcgccgcggcccgcaggcacccggcacgcgccttccccgcaggcacccggcacgcgccttccccgccgccacgatgcccaagaggaaggtcagctccgccgaaggcgccgccaaggaagagcccaagaggagatcggcgcggttgtcagctaaacctcctgcaaaagtggaagcgaagccgaaaaaggcagcagcgaaggataaatcttcagacaaaaaagtgcaaacaaaagggaaaaggggagcaaagggaaaacaggccgaagtggctaaccaagaaactaaagaagacttacctgcggaaaacggggaaacgaagactgaggagagtccagcctctgatgaagcaggagagaaagaagccaagtctgattaataaccatataccatgtcttatcagtggtccctgtctcccttcttgtacaatccagaggaatatttttatcaactattttgtaaatgcaagttttttagtagctctagaaacatttttaagaaggagggaatcccacctcatcccattttttaagtgtaaatgcttttttttaagaggtgaaatcatttgctggttgtttattttttggtacaaccagaaaatagtgtgggatattgaattatgggaggctctgactgtctcgggtgtcagcttaacattccacagatggggggttagtttttatatcctataatacaaagcatattaaatggcaatatggagtcagtcctgcatttaatgtcttgaacattttaaattacttctattaccatgttgttttttagtagaattgtttcctaaagaaaaccactctttgatcatggctctctctgccagaattgtgtgcactctgtaacatcttttgtggtagtcctgttttcctaataactttgttactgtgctgtgaaagattacagatttgaacatgtagtgtacgtgctgttgagttgtgaactggtgggccgtatgtaacagctgaccaacgtgaagatactggtacttgatagcctcttaaggaaaatttgcttccaaattttaagctggaaagtcactggaataactttaaaaaagaattacaatacatggctttttagaatttcgttacgtatgttaagatttgtgtacaaattgaaatgtctgtactgatcctcaaccaataaaatctcagttatgaaaata

SEQ ID NO: 331044 - DNA, 344 bp, Homo sapiens
ctacatgttcacaactcaacagcacgtacactacatgtagtgtacggcccaccagttcacaactcaacagcacgtacactacatgttcaaatctgtaatacgtgctgttgagttgtgaactggtgggccgtatgtaacagctgaccaacgtgaagatactggtacttgatagcctcttaaggaaaatttgcttccaaattttaagctggaaagtcactggaataactttaaaaaagaattacaatacatggctttttagaatttcgttacgtatgttaagatttgtgtacaaattgaaatgtctgtactgatcctcaaccaataaaatctcagttatgaaaata

SEQ ID NO: 331045 - DNA, 123 bp, Homo sapiens
tcaagcttctaacgatgtacggggacatggctttttagaatttcgttacgtatgttaagatttgtgtacaaattgaaatgtctgtactgatcctcaaccaataaaatctcagttatgaaaata

SEQ ID NO: 331046 - DNA, 4403 bp, Homo sapiens
  misc_feature (1622)..(1622): n is a, c, g, or t
gctgagtcccgtagccaatgggcgggggtggggggcggcccggccggcggggagggggagcccgcggccggggacgcggggggaggaggaggcgggctcccaatccggttccatccggttctcccaccgcccccgctgtgggtctcagcagctcgggcggcgggaggagtggcagcggcaaggcagcccagtttcgcgaaggctgtcggcgcgccgcggcccgcaggcacccggcacgcgccttccccgcaggcacccggcacgcgccttccccgccgccacgatgcccaagaggaaggtcagctccgccgaaggcgccgccaaggaagagcccaagaggagatcggcgcggttgtcagctaaacctcctgcaaaagtggaagcgaagccgaaaaaggcagcagcgaaggtaagcctcgaaacgcgcattgggatgcagcggggccttaggctacactgcttcttaatgcggggcttccattttaattagctattggagctttatttatactttaataattacggtaaataatttttctagtggtcgaggcaaaaatgtaatggatatattcatcctggtttatagaactatatcacactaatgctgctgcagatgttaggagacttaggacgacaaaaaatattaaatattaagtctacaaaggaaatttattctttgcgttgcgtacattgtggctggtgcttggcttttaattcgtgcttgtacttccttttttgacaataaaagagtcaagatagcaccgaggccaggagaaagggaacgtgtaagtttttatatatacagtttccaagccaacttcgggaagccttaacctttttacggggtgggggtggggaggtaaaaagttgtgatctctgagaaaataaccgccactactctggaagtgttcatcagcagttatacaaaaccgtgattttggctgctccctaacaaattcgtgattgcatgattcgaattgcaggtctgtagaatgaagttggctttgggtgtacgtgtgtttgataacttgcagggtggaaaagcagaacatgtgtaaaacaagtataagctttgtgtttggatatagcattgaaacctgtaaagctctacatgttcttcgcggggtgattaatttttatccaaaacttaggtgagagtttgctatttgaagtctcaaaaaaaatttttgttaatgccttcacctctttcctaaaagtgtaggtagaagtttagcactgcagtcatcagaagaggcaagattaatttccttgacattgaggagttgttggataattactaaatttgtccttgttaaataaaggtataaaacaaagatgttttttcttttttaatttaaattttttacagagctgagtgtaaaaatgttaactatgttttctttaacagaaagttctgtttttgtgatccttttaaaaataaagcttcacggaaggtatgagaatagtatttttcaactttaaatttctcattaccagaagaccatgtggtaattctctgtatacagttagaacagcacggaaacttgaaggcctaaaaaattagctgaccttgttaaaaatgttggcgtgagcagtatattattacctatctttttttattntgtgtgtgtgtgtgtgtgtgtgttttaaactaattggctgaaatatctgcctgtttccctctttacatttttcttgtttctttccttatttatctttgtccatcttgagatctactgtaaagtgaattttttaatgaaaacagttccaagttttactctcagtgggtttgggacatcagatgtaattgagaggccaacaggtaagtcttcatgtcagtgtttgttgaggaacgagcctatgaggtcagttttcccaaaaggaaaaagggcagaagggatttgttcatttttacatctcgtttctgtaatacacctttgacttcatggttgatcagactttgaagtctaaacagaacgtaagcacttggtgtatcgattatcatactacacagtagacatgttttcaaggcatatcttgtcactgtgtgtgcttctgacttgtatctttccctagaactaaatattttgaaggtccaaacattatactttgggaaacttgattgatttttttttaatctagcttttcagctgataatggttacacgtggtattatttcaagtccaagatattatgtattctattttaactgtttcccagttttgtattttttgtattggaatgattatgaaattaatgagaaatctttagaaacagactacaaaagagtagttcttaaatacagaagtgattgtgaaactttgtgatagcaatgtgtgtagtagcagttttgtctcaaatacatttatcatttgttactcaaaggatgttgaagtattaaaagtcattatgctgtctgtggaatcctactattagtacagaacaccctgcagtgatttttccgcccatgttagcattgaagttgtgagctctacttgcttgtctttatggccctttaattcaagtaattggtcagtatccgtatgggtcttttataccacccgctgggggctaaactaatttagctgctgctgtatacttactaacaaggaataaatgttaagctttcttctcagtattgatggatggtatctaaaagtatttttatgtttctttaacatggcttaaattttgaacttaatgtatcaagttagtatggtcatattaatacctgtgcttttcagattcttcaaacacctaaatgaaagtgataaattcaaaactgatccttttagttcctcattatatgatatgaagggattaactgtagcaggatagtcaacctgaccgtacggcatggtgctttttttcaggtgattggtcttaatgtgagggttaaggtcttgtgaggacagtattgttgaagttcacaacaaatttggggatgggtgggaatacggtcgacgagactcctccggtattcaacttcatgacattgtcctgtcatgtggaactgtagggaatagtggatgatggcgacagtggtgaaatatagctcgggctttaggatttgtcatatgtctaatgaggcttgacatgcaagtactattaaaatctccttagcatacgttgttttcctgattactgggggggaccttaagttgtctcatgtaataggtgtatcaactgatgtgtgatagacattaatatgacagctgttatggatacagtctatacaaaatgagatcctttcataagcttgaagattggggtttcacgctcatgtgtgagatgtccctctctcaaaccttactatgaagtcagcaccactgggcacattacttgtctgacatgaaggggaaaaagtaaaacaaaatgtaaataaggagtaaagcatgtacttaaaatatattcttattctatcataggataaatcttcagacaaaaaagtgcaaacaaaagggaaaaggggagcaaagggaaaacaggccgaagtggctaaccaagaaactaaagaagacttacctgcggaaaacggggaaacgaagactgaggagagtccagcctctgatgaagcaggagagaaagaagccaagtctgattaataaccatataccatgtcttatcagtggtccctgtctcccttcttgtacaatccagaggaatatttttatcaactattttgtaaatgcaagttttttagtagctctagaaacatttttaagaaggagggaatcccacctcatcccattttttaagtgtaaatgcttttttttaagaggtgaaatcatttgctggttgtttattttttggtacaaccagaaaatagtgtgggatattgaattatgggaggctctgactgtctcgggtgtcagcttaacattccacagatggggggttagtttttatatcctataatacaaagcatattaaatggcaatatggagtcagtcctgcatttaatgtcttgaacattttaaattacttctattaccatgttgttttttagtagaattgtttcctaaagaaaaccactctttgatcatggctctctctgccagaattgtgtgcactctgtaacatcttttgtggtagtcctgttttcctaataactttgttactgtgctgtgaaagattacagatttgaacatgtagtgtacgtgctgttgagttgtgaactggtgggccgtatgtaacagctgaccaacgtgaagatactggtacttgatagcctcttaaggaaaatttgcttccaaattttaagctggaaagtcactggaataactttaaaaaagaattacaatacatggctttttagaatttcgttacgtatgttaagatttgtgtacaaattgaaatgtctgtactgatcctcaaccaataaaatctcagttatgaaaata

SEQ ID NO: 331047 - DNA, 4485 bp, Homo sapiens
  misc_feature (1704)..(1704): n is a, c, g, or t
gctgagtcccgtagccaatgggcgggggtggggggcggcccggccggcggggagggggagcccgcggccggggacgcggggggaggaggaggcgggctcccaatccggttccatccggttctcccaccgcccccgctgtgggtctcagcagctcgggcggcgggaggagtggcagcggcaaggcagcccagtttcgcgaaggctgtcggcgcgccgcggcccgcaggcacccggcacgcgccttccccgcaggcacccggcacgcgccttccccgccgccacgatgcccaagaggaaggtcagctccgccgaaggcgccgccaaggaagagcccaagaggagatcggcgcggttgtcagctgtaagtaaagcgagccccgtaaccgttcgttttccgcgggtcgtcccgggtgaggacgctcagtgctgcttttgcctttcagaaacctcctgcaaaagtggaagcgaagccgaaaaaggcagcagcgaaggtaagcctcgaaacgcgcattgggatgcagcggggccttaggctacactgcttcttaatgcggggcttccattttaattagctattggagctttatttatactttaataattacggtaaataatttttctagtggtcgaggcaaaaatgtaatggatatattcatcctggtttatagaactatatcacactaatgctgctgcagatgttaggagacttaggacgacaaaaaatattaaatattaagtctacaaaggaaatttattctttgcgttgcgtacattgtggctggtgcttggcttttaattcgtgcttgtacttccttttttgacaataaaagagtcaagatagcaccgaggccaggagaaagggaacgtgtaagtttttatatatacagtttccaagccaacttcgggaagccttaacctttttacggggtgggggtggggaggtaaaaagttgtgatctctgagaaaataaccgccactactctggaagtgttcatcagcagttatacaaaaccgtgattttggctgctccctaacaaattcgtgattgcatgattcgaattgcaggtctgtagaatgaagttggctttgggtgtacgtgtgtttgataacttgcagggtggaaaagcagaacatgtgtaaaacaagtataagctttgtgtttggatatagcattgaaacctgtaaagctctacatgttcttcgcggggtgattaatttttatccaaaacttaggtgagagtttgctatttgaagtctcaaaaaaaatttttgttaatgccttcacctctttcctaaaagtgtaggtagaagtttagcactgcagtcatcagaagaggcaagattaatttccttgacattgaggagttgttggataattactaaatttgtccttgttaaataaaggtataaaacaaagatgttttttcttttttaatttaaattttttacagagctgagtgtaaaaatgttaactatgttttctttaacagaaagttctgtttttgtgatccttttaaaaataaagcttcacggaaggtatgagaatagtatttttcaactttaaatttctcattaccagaagaccatgtggtaattctctgtatacagttagaacagcacggaaacttgaaggcctaaaaaattagctgaccttgttaaaaatgttggcgtgagcagtatattattacctatctttttttattntgtgtgtgtgtgtgtgtgtgtgttttaaactaattggctgaaatatctgcctgtttccctctttacatttttcttgtttctttccttatttatctttgtccatcttgagatctactgtaaagtgaattttttaatgaaaacagttccaagttttactctcagtgggtttgggacatcagatgtaattgagaggccaacaggtaagtcttcatgtcagtgtttgttgaggaacgagcctatgaggtcagttttcccaaaaggaaaaagggcagaagggatttgttcatttttacatctcgtttctgtaatacacctttgacttcatggttgatcagactttgaagtctaaacagaacgtaagcacttggtgtatcgattatcatactacacagtagacatgttttcaaggcatatcttgtcactgtgtgtgcttctgacttgtatctttccctagaactaaatattttgaaggtccaaacattatactttgggaaacttgattgatttttttttaatctagcttttcagctgataatggttacacgtggtattatttcaagtccaagatattatgtattctattttaactgtttcccagttttgtattttttgtattggaatgattatgaaattaatgagaaatctttagaaacagactacaaaagagtagttcttaaatacagaagtgattgtgaaactttgtgatagcaatgtgtgtagtagcagttttgtctcaaatacatttatcatttgttactcaaaggatgttgaagtattaaaagtcattatgctgtctgtggaatcctactattagtacagaacaccctgcagtgatttttccgcccatgttagcattgaagttgtgagctctacttgcttgtctttatggccctttaattcaagtaattggtcagtatccgtatgggtcttttataccacccgctgggggctaaactaatttagctgctgctgtatacttactaacaaggaataaatgttaagctttcttctcagtattgatggatggtatctaaaagtatttttatgtttctttaacatggcttaaattttgaacttaatgtatcaagttagtatggtcatattaatacctgtgcttttcagattcttcaaacacctaaatgaaagtgataaattcaaaactgatccttttagttcctcattatatgatatgaagggattaactgtagcaggatagtcaacctgaccgtacggcatggtgctttttttcaggtgattggtcttaatgtgagggttaaggtcttgtgaggacagtattgttgaagttcacaacaaatttggggatgggtgggaatacggtcgacgagactcctccggtattcaacttcatgacattgtcctgtcatgtggaactgtagggaatagtggatgatggcgacagtggtgaaatatagctcgggctttaggatttgtcatatgtctaatgaggcttgacatgcaagtactattaaaatctccttagcatacgttgttttcctgattactgggggggaccttaagttgtctcatgtaataggtgtatcaactgatgtgtgatagacattaatatgacagctgttatggatacagtctatacaaaatgagatcctttcataagcttgaagattggggtttcacgctcatgtgtgagatgtccctctctcaaaccttactatgaagtcagcaccactgggcacattacttgtctgacatgaaggggaaaaagtaaaacaaaatgtaaataaggagtaaagcatgtacttaaaatatattcttattctatcataggataaatcttcagacaaaaaagtgcaaacaaaagggaaaaggggagcaaagggaaaacaggccgaagtggctaaccaagaaactaaagaagacttacctgcggaaaacggggaaacgaagactgaggagagtccagcctctgatgaagcaggagagaaagaagccaagtctgattaataaccatataccatgtcttatcagtggtccctgtctcccttcttgtacaatccagaggaatatttttatcaactattttgtaaatgcaagttttttagtagctctagaaacatttttaagaaggagggaatcccacctcatcccattttttaagtgtaaatgcttttttttaagaggtgaaatcatttgctggttgtttattttttggtacaaccagaaaatagtgtgggatattgaattatgggaggctctgactgtctcgggtgtcagcttaacattccacagatggggggttagtttttatatcctataatacaaagcatattaaatggcaatatggagtcagtcctgcatttaatgtcttgaacattttaaattacttctattaccatgttgttttttagtagaattgtttcctaaagaaaaccactctttgatcatggctctctctgccagaattgtgtgcactctgtaacatcttttgtggtagtcctgttttcctaataactttgttactgtgctgtgaaagattacagatttgaacatgtagtgtacgtgctgttgagttgtgaactggtgggccgtatgtaacagctgaccaacgtgaagatactggtacttgatagcctcttaaggaaaatttgcttccaaattttaagctggaaagtcactggaataactttaaaaaagaattacaatacatggctttttagaatttcgttacgtatgttaagatttgtgtacaaattgaaatgtctgtactgatcctcaaccaataaaatctcagttatgaaaata

SEQ ID NO: 331048 - DNA, 3848 bp, Homo sapiens
  misc_feature (1622)..(1622): n is a, c, g, or t
gctgagtcccgtagccaatgggcgggggtggggggcggcccggccggcggggagggggagcccgcggccggggacgcggggggaggaggaggcgggctcccaatccggttccatccggttctcccaccgcccccgctgtgggtctcagcagctcgggcggcgggaggagtggcagcggcaaggcagcccagtttcgcgaaggctgtcggcgcgccgcggcccgcaggcacccggcacgcgccttccccgcaggcacccggcacgcgccttccccgccgccacgatgcccaagaggaaggtcagctccgccgaaggcgccgccaaggaagagcccaagaggagatcggcgcggttgtcagctaaacctcctgcaaaagtggaagcgaagccgaaaaaggcagcagcgaaggtaagcctcgaaacgcgcattgggatgcagcggggccttaggctacactgcttcttaatgcggggcttccattttaattagctattggagctttatttatactttaataattacggtaaataatttttctagtggtcgaggcaaaaatgtaatggatatattcatcctggtttatagaactatatcacactaatgctgctgcagatgttaggagacttaggacgacaaaaaatattaaatattaagtctacaaaggaaatttattctttgcgttgcgtacattgtggctggtgcttggcttttaattcgtgcttgtacttccttttttgacaataaaagagtcaagatagcaccgaggccaggagaaagggaacgtgtaagtttttatatatacagtttccaagccaacttcgggaagccttaacctttttacggggtgggggtggggaggtaaaaagttgtgatctctgagaaaataaccgccactactctggaagtgttcatcagcagttatacaaaaccgtgattttggctgctccctaacaaattcgtgattgcatgattcgaattgcaggtctgtagaatgaagttggctttgggtgtacgtgtgtttgataacttgcagggtggaaaagcagaacatgtgtaaaacaagtataagctttgtgtttggatatagcattgaaacctgtaaagctctacatgttcttcgcggggtgattaatttttatccaaaacttaggtgagagtttgctatttgaagtctcaaaaaaaatttttgttaatgccttcacctctttcctaaaagtgtaggtagaagtttagcactgcagtcatcagaagaggcaagattaatttccttgacattgaggagttgttggataattactaaatttgtccttgttaaataaaggtataaaacaaagatgttttttcttttttaatttaaattttttacagagctgagtgtaaaaatgttaactatgttttctttaacagaaagttctgtttttgtgatccttttaaaaataaagcttcacggaaggtatgagaatagtatttttcaactttaaatttctcattaccagaagaccatgtggtaattctctgtatacagttagaacagcacggaaacttgaaggcctaaaaaattagctgaccttgttaaaaatgttggcgtgagcagtatattattacctatctttttttattntgtgtgtgtgtgtgtgtgtgtgttttaaactaattggctgaaatatctgcctgtttccctctttacatttttcttgtttctttccttatttatctttgtccatcttgagatctactgtaaagtgaattttttaatgaaaacagttccaagttttactctcagtgggtttgggacatcagatgtaattgagaggccaacaggtaagtcttcatgtcagtgtttgttgaggaacgagcctatgaggtcagttttcccaaaaggaaaaagggcagaagggatttgttcatttttacatctcgtttctgtaatacacctttgacttcatggttgatcagactttgaagtctaaacagaacgtaagcacttggtgtatcgattatcatactacacagtagacatgttttcaaggcatatcttgtcactgtgtgtgcttctgacttgtatctttccctagaactaaatattttgaaggtccaaacattatactttgggaaacttgattgatttttttttaatctagcttttcagctgataatggttacacgtggtattatttcaagtccaagatattatgtattctattttaactgtttcccagttttgtattttttgtattggaatgattatgaaattaatgagaaatctttagaaacagactacaaaagagtagttcttaaatacagaagtgattgtgaaactttgtgatagcaatgtgtgtagtagcagttttgtctcaaatacatttatcatttgttactcaaaggatgttgaagtattaaaagtcattatgctgtctgtggaatcctactattagtacagaacaccctgcagtgatttttccgcccatgttagcattgaagttgtgagctctacttgcttgtctttatggccctttaattcaagtaattggtcagtatccgtatgggtcttttataccacccgctgggggctaaactaatttagctgctgctgtatacttactaacaaggaataaatgttaagctttcttctcagtattgatggatggtatctaaaagtatttttatgtttctttaacatggcttaaattttgaacttaatgtatcaagttagtatggtcatattaatacctgtgcttttcagattcttcaaacacctaaatgaaagtgataaattcaaaactgatccttttagttcctcattatatgatatgaagggattaactgtagcaggatagtcaacctgaccgtacggcatggtgctttttttcaggataaatcttcagacaaaaaagtgcaaacaaaagggaaaaggggagcaaagggaaaacaggccgaagtggctaaccaagaaactaaagaagacttacctgcggaaaacggggaaacgaagactgaggagagtccagcctctgatgaagcaggagagaaagaagccaagtctgattaataaccatataccatgtcttatcagtggtccctgtctcccttcttgtacaatccagaggaatatttttatcaactattttgtaaatgcaagttttttagtagctctagaaacatttttaagaaggagggaatcccacctcatcccattttttaagtgtaaatgcttttttttaagaggtgaaatcatttgctggttgtttattttttggtacaaccagaaaatagtgtgggatattgaattatgggaggctctgactgtctcgggtgtcagcttaacattccacagatggggggttagtttttatatcctataatacaaagcatattaaatggcaatatggagtcagtcctgcatttaatgtcttgaacattttaaattacttctattaccatgttgttttttagtagaattgtttcctaaagaaaaccactctttgatcatggctctctctgccagaattgtgtgcactctgtaacatcttttgtggtagtcctgttttcctaataactttgttactgtgctgtgaaagattacagatttgaacatgtagtgtacgtgctgttgagttgtgaactggtgggccgtatgtaacagctgaccaacgtgaagatactggtacttgatagcctcttaaggaaaatttgcttccaaattttaagctggaaagtcactggaataactttaaaaaagaattacaatacatggctttttagaatttcgttacgtatgttaagatttgtgtacaaattgaaatgtctgtactgatcctcaaccaataaaatctcagttatgaaaata

SEQ ID NO: 331049 - DNA, 3509 bp, Homo sapiens
  misc_feature (728)..(728): n is a, c, g, or t
gctgagtcccgtagccaatgggcgggggtggggggcggcccggccggcggggagggggagcccgcggccggggacgcggggggaggaggaggcgggctcccaatccggttccatccggttctcccaccgcccccgctgtgggtctcagcagctcgggcggcgggaggagtggcagcggcaaggcagcccagtttcgcgaaggctgtcggcgcgccgcggcccgcaggcacccggcacgcgccttccccgcaggcacccggcacgcgccttccccgccgccacgatgcccaagaggaaggtcagctccgccgaaggcgccgccaaggaagagcccaagaggagatcggcgcggttgtcagctaaacctcctgcaaaagtggaagcgaagccgaaaaaggcagcagcgaagtgtaggtagaagtttagcactgcagtcatcagaagaggcaagattaatttccttgacattgaggagttgttggataattactaaatttgtccttgttaaataaagaaagttctgtttttgtgatccttttaaaaataaagcttcacggaaggtatgagaatagtatttttcaactttaaatttctcattaccagaagaccatgtggtaattctctgtatacagttagaacagcacggaaacttgaaggcctaaaaaattagctgaccttgttaaaaatgttggcgtgagcagtatattattacctatctttttttattntgtgtgtgtgtgtgtgtgtgtgttttaaactaattggctgaaatatctgcctgtttccctctttacatttttcttgtttctttccttatttatctttgtccatcttgagatctactgtaaagtgaattttttaatgaaaacagttccaagttttactctcagtgggtttgggacatcagatgtaattgagaggccaacaggtaagtcttcatgtcagtgtttgttgaggaacgagcctatgaggtcagttttcccaaaaggaaaaagggcagaagggatttgttcatttttacatctcgtttctgtaatacacctttgacttcatggttgatcagactttgaagtctaaacagaacgtaagcacttggtgtatcgattatcatactacacagtagacatgttttcaaggcatatcttgtcactgtgtgtgcttctgacttgtatctttccctagaactaaatattttgaaggtccaaacattatactttgggaaacttgattgatttttttttaatctagcttttcagctgataatggttacacgtggtattatttcaagtccaagatattatgtattctattttaactgtttcccagttttgtattttttgtattggaatgattatgaaattaatgagaaatctttagaaacagactacaaaagagtagttcttaaatacagaagtgattgtgaaactttgtgatagcaatgtgtgtagtagcagttttgtctcaaatacatttatcatttgttactcaaaggatgttgaagtattaaaagtcattatgctgtctgtggaatcctactattagtacagaacaccctgcagtgatttttccgcccatgttagcattgaagttgtgagctctacttgcttgtctttatggccctttaattcaagtaattggtcagtatccgtatgggtcttttataccacccgctgggggctaaactaatttagctgctgctgtatacttactaacaaggaataaatgttaagctttcttctcagtattgatggatggtatctaaaagtatttttatgtttctttaacatggcttaaattttgaacttaatgtatcaagttagtatggtcatattaatacctgtgcttttcagattcttcaaacacctaaatgaaagtgataaattcaaaactgatccttttagttcctcattatatgatatgaagggattaactgtagcaggatagtcaacctgaccgtacggcatggtgctttttttcaggtgattggtcttaatgtgagggttaaggtcttgtgaggacagtattgttgaagttcacaacaaatttggggatgggtgggaatacggtcgacgagactcctccggtattcaacttcatgacattgtcctgtcatgtggaactgtagggaatagtggatgatggcgacagtggtgaaatatagctcgggctttaggatttgtcatatgtctaatgaggcttgacatgcaagtactattaaaatctccttagcatacgttgttttcctgattactgggggggaccttaagttgtctcatgtaataggtgtatcaactgatgtgtgatagacattaatatgacagctgttatggatacagtctatacaaaatgagatcctttcataagcttgaagattggggtttcacgctcatgtgtgagatgtccctctctcaaaccttactatgaagtcagcaccactgggcacattacttgtctgacatgaaggggaaaaagtaaaacaaaatgtaaataaggagtaaagcatgtacttaaaatatattcttattctatcataggataaatcttcagacaaaaaagtgcaaacaaaagggaaaaggggagcaaagggaaaacaggccgaagtggctaaccaagaaactaaagaagacttacctgcggaaaacggggaaacgaagactgaggagagtccagcctctgatgaagcaggagagaaagaagccaagtctgattaataaccatataccatgtcttatcagtggtccctgtctcccttcttgtacaatccagaggaatatttttatcaactattttgtaaatgcaagttttttagtagctctagaaacatttttaagaaggagggaatcccacctcatcccattttttaagtgtaaatgcttttttttaagaggtgaaatcatttgctggttgtttattttttggtacaaccagaaaatagtgtgggatattgaattatgggaggctctgactgtctcgggtgtcagcttaacattccacagatggggggttagtttttatatcctataatacaaagcatattaaatggcaatatggagtcagtcctgcatttaatgtcttgaacattttaaattacttctattaccatgttgttttttagtagaattgtttcctaaagaaaaccactctttgatcatggctctctctgccagaattgtgtgcactctgtaacatcttttgtggtagtcctgttttcctaataactttgttactgtgctgtgaaagattacagatttgaacatgtagtgtacgtgctgttgagttgtgaactggtgggccgtatgtaacagctgaccaacgtgaagatactggtacttgatagcctcttaaggaaaatttgcttccaaattttaagctggaaagtcactggaataactttaaaaaagaattacaatacatggctttttagaatttcgttacgtatgttaagatttgtgtacaaattgaaatgtctgtactgatcctcaaccaataaaatctcagttatgaaaata

SEQ ID NO: 331050 - DNA, 1477 bp, Homo sapiens
gctgagtcccgtagccaatgggcgggggtggggggcggcccggccggcggggagggggagcccgcggccggggacgcggggggaggaggaggcgggctcccaatccggttccatccggttctcccaccgcccccgctgtgggtctcagcagctcgggcggcgggaggagtggcagcggcaaggcagcccagtttcgcgaaggctgtcggcgcgccgcggcccgcaggcacccggcacgcgccttccccgcaggcacccggcacgcgccttccccgccgccacgatgcccaagaggaaggtcagctccgccgaaggcgccgccaaggaagaggtgagtgcgggccttctgcggggggtggtgggtttcccgtgagccgctggcctgccttctcttctcgctgactctcctttttctttctccaagcccaagaggagatcggcgcggttgtcagctaaacctcctgcaaaagtggaagcgaagccgaaaaaggcagcagcgaaggataaatcttcagacaaaaaagtgcaaacaaaagggaaaaggggagcaaagggaaaacaggccgaagtggctaaccaagaaactaaagaagacttacctgcggaaaacggggaaacgaagactgaggagagtccagcctctgatgaagcaggagagaaagaagccaagtctgattaataaccatataccatgtcttatcagtggtccctgtctcccttcttgtacaatccagaggaatatttttatcaactattttgtaaatgcaagttttttagtagctctagaaacatttttaagaaggagggaatcccacctcatcccattttttaagtgtaaatgcttttttttaagaggtgaaatcatttgctggttgtttattttttggtacaaccagaaaatagtgtgggatattgaattatgggaggctctgactgtctcgggtgtcagcttaacattccacagatggggggttagtttttatatcctataatacaaagcatattaaatggcaatatggagtcagtcctgcatttaatgtcttgaacattttaaattacttctattaccatgttgttttttagtagaattgtttcctaaagaaaaccactctttgatcatggctctctctgccagaattgtgtgcactctgtaacatcttttgtggtagtcctgttttcctaataactttgttactgtgctgtgaaagattacagatttgaacatgtagtgtacgtgctgttgagttgtgaactggtgggccgtatgtaacagctgaccaacgtgaagatactggtacttgatagcctcttaaggaaaatttgcttccaaattttaagctggaaagtcactggaataactttaaaaaagaattacaatacatggctttttagaatttcgttacgtatgttaagatttgtgtacaaattgaaatgtctgtactgatcctcaaccaataaaatctcagttatgaaaata

SEQ ID NO: 331051 - DNA, 1884 bp, Homo sapiens
  misc_feature (1492)..(1492): n is a, c, g, or t
gctgagtcccgtagccaatgggcgggggtggggggcggcccggccggcggggagggggagcccgcggccggggacgcggggggaggaggaggcgggctcccaatccggttccatccggttctcccaccgcccccgctgtgggtctcagcagctcgggcggcgggaggagtggcagcggcaaggcagcccagtttcgcgaaggctgtcggcgcgccgcggcccgcaggcacccggcacgcgccttccccgcaggcacccggcacgcgccttccccgccgccacgatgcccaagaggaaggtcagctccgccgaaggcgccgccaaggaagagcccaagaggagatcggcgcggttgtcagctaaacctcctgcaaaagtggaagcgaagccgaaaaaggcagcagcgaaggataaatcttcagacaaaaaagtgcaaacaaaagggaaaaggggagcaaagggaaaacaggccgaagtggctaaccaagaaactaaagaagacttacctgcggaaaacggggaaacgaagactgaggagagtccagcctctgatgaagcaggagagaaagaagccaagtctgattaataaccatataccatgtcttatcagtggtccctgtctcccttcttgtacaatccagaggaatatttttatcaactattttgtaaatgcaagttttttagtagctctagaaacatttttaagaaggagggaatcccacctcatcccattttttaagtgtaaatgcttttttttaagaggtgaaatcatttgctggttgtttattttttggtacaaccagaaaatagtgtgggatattgaattatgggaggctctgactgtctcgggtgtcagcttaacattccacagatggggggttagtttttatatcctataatacaaagcatattaaatggcaatatggagtcagtcctgcatttaatgtcttgaacattttaaattacttctattaccatgttgttttttagtagaattgtttcctaaagaaaaccactctttgatcatggctctctctgccagaattgtgtgcactctgtaacatcttttgtggtagtcctgttttcctaataactttgttactgtgctgtgaaagattacagatttgaacatgtagtgtacgtgctgttgagttgtgaactggtgggccgtatgtaacagctgaccaacgtgaagatactggtacttgatagcctcttaaggaaaatttgcttccaaattttaagctggaaagtcactggaataactttaaaaaagaattacaatacatggctttttagaatttcgttacgtatgttaagatttgtgtacaaattgaaatgtctgtactgatcctcaaccaataaaatctcagttatgaaaataaaaaaaaaaaaaaaaaaaaatttgggggatctatgggggggggggaaaaaggggtaggaagggcctgggcattagctggtttcttggacccagctttctggtacaaangggggtagatctggcgcgggtctccctataggggagctcggaataaattccggataacgccagggttaaccttgggataatgtgtagacgggaacaaagcacctagcccaacgcggcgatagcccggccagagcacccccccaggggggctgacgcaaattcgggacccacaacagacgggtcggaaaaagctaatagagctcgcacacaacacccagcgcccacgaacccaacacagcagacaataacactgcaccacacaaatatgaaccacgactcacaaaaccagagccgacacaccacacacacaccgccatgatcaacgactcacaagacaacagctaacgcacccacagcatccagtgaatcatcatacctaaagcaaactgtcc

SEQ ID NO: 331052 - DNA, 1189 bp, Homo sapiens
  misc_feature (87)..(87): n is a, c, g, or t
  misc_feature (91)..(93): n is a, c, g, or t
  misc_feature (96)..(96): n is a, c, g, or t
  misc_feature (100)..(102): n is a, c, g, or t
gagtgtcctctgctcctagaggcccagcctctgtgtccctgtgacctgcagatattgggagatccacagctaagacgccgggactcncggnnnccnagannnggtcagctccgccgaaggcgccgccaaggaagagcccaagaggagatcggcgcggttgtcagctaaacctcctgcaaaagtggaagcgaagccgaaaaaggcagcagcgaaggataaatcttcagacaaaaaagtgcaaacaaaagggaaaaggggagcaaagggaaaacaggccgaagtggctaaccaagaaactaaagaagacttacctgcggaaaacggggaaacgaagactgaggagagtccagcctctgatgaagcaggagagaaagaagccaagtctgattaataaccatataccatgtcttatcagtggtccctgtctcccttcttgtacaatccagaggaatatttttatcaactattttgtaaatgcaagttttttagtagctctagaaacatttttaagaaggagggaatcccacctcatcccattttttaagtgtaaatgcttttttttaagaggtgaaatcatttgctggttgtttattttttggtacaaccagaaaatagtgtgggatattgaattatgggaggctctgactgtctcgggtgtcagcttaacattccacagatggggggttagtttttatatcctataatacaaagcatattaaatggcaatatggagtcagtcctgcatttaatgtcttgaacattttaaattacttctattaccatgttgttttttagtagaattgtttcctaaagaaaaccactctttgatcatggctctctctgccagaattgtgtgcactctgtaacatcttttgtggtagtcctgttttcctaataactttgttactgtgctgtgaaagattacagatttgaacatgtagtgtacgtgctgttgagttgtgaactggtgggccgtatgtaacagctgaccaacgtgaagatactggtacttgatagcctcttaaggaaaatttgcttccaaattttaagctggaaagtcactggaataactttaaaaaagaattacaatacatggctttttagaatttcgttacgtatgttaagatttgtgtacaaattgaaatgtctgtactgatcctcaaccaataaaatctcagttatgaaaata

SEQ ID NO: 331053 - DNA, 2297 bp, Homo sapiens
gctgagtcccgtagccaatgggcgggggtggggggcggcccggccggcggggagggggagcccgcggccggggacgcggggggaggaggaggcgggctcccaatccggttccatccggttctcccaccgcccccgctgtgggtctcagcagctcgggcggcgggaggagtggcagcggcaaggcagcccagtttcgcgaaggctgtcggcgcgccgcggcccgcaggcacccggcacgcgccttccccgcaggcacccggcacgcgccttccccgccgccacgatgcccaagaggaaggtcagctccgccgaaggcgccgccaaggaagagcccaagaggagatcggcgcggttgtcagctaaacctcctgcaaaagtggaagcgaagccgaaaaaggcagcagcgaaggtaagcctcgaaacgcgcattgggatgcagcggggccttaggctacactgcttcttaatgcggggcttccattttaattagctattggagctttatttatactttaataattacggtaaataatttttctagtggtcgaggcaaaaatgtaatggatatattcatcctggtttatagaactatatcacactaatgctgctgcagatgttaggagacttaggacgacaaaaaatattaaatattaagtctacaaaggaaatttattctttgcgttgcgtacattgtggctggtgcttggcttttaattcgtgcttgtacttccttttttgacaataaaagagtcaagatagcaccgaggccaggagaaagggaacgtgtaagtttttatatatacagtttccaagccaacttcgggaagccttaacctttttacggggtgggggtggggaggtaaaaagttgtgatctctgagaaaataaccgccactactctggaagtgttcatcagcagttatacaaaaccgtgattttggctgctccctaacaaattcgtgattgcatgattcgaattgcaggtctgtagaatgaagttggctttgggtgtacgtgtgtttgataacttgcagggtggaaaagcagaacatgtgtaaaacaagtataagctttgtgtttggatatagcattgaaacctgtaaagctctacatgttcttcgcggggtgattaatttttatccaaaacttaggtgagagtttgctatttgaagtctcaaaaaaaatttttgttaatgccttcacctctttcctaaaagtgtaggtagaagtttagcactgcagtcatcagaagaggcaagattaatttccttgacattgaggagttgttggataattactaaatttgtccttgttaaataaaggataaatcttcagacaaaaaagtgcaaacaaaagggaaaaggggagcaaagggaaaacaggccgaagtggctaaccaagaaactaaagaagacttacctgcggaaaacggggaaacgaagactgaggagagtccagcctctgatgaagcaggagagaaagaagccaagtctgattaataaccatataccatgtcttatcagtggtccctgtctcccttcttgtacaatccagaggaatatttttatcaactattttgtaaatgcaagttttttagtagctctagaaacatttttaagaaggagggaatcccacctcatcccattttttaagtgtaaatgcttttttttaagaggtgaaatcatttgctggttgtttattttttggtacaaccagaaaatagtgtgggatattgaattatgggaggctctgactgtctcgggtgtcagcttaacattccacagatggggggttagtttttatatcctataatacaaagcatattaaatggcaatatggagtcagtcctgcatttaatgtcttgaacattttaaattacttctattaccatgttgttttttagtagaattgtttcctaaagaaaaccactctttgatcatggctctctctgccagaattgtgtgcactctgtaacatcttttgtggtagtcctgttttcctaataactttgttactgtgctgtgaaagattacagatttgaacatgtagtgtacgtgctgttgagttgtgaactggtgggccgtatgtaacagctgaccaacgtgaagatactggtacttgatagcctcttaaggaaaatttgcttccaaattttaagctggaaagtcactggaataactttaaaaaagaattacaatacatggctttttagaatttcgttacgtatgttaagatttgtgtacaaattgaaatgtctgtactgatcctcaaccaataaaatctcagttatgaaaata

SEQ ID NO: 331054 - DNA, 1524 bp, Homo sapiens
gctgagtcccgtagccaatgggcgggggtggggggcggcccggccggcggggagggggagcccgcggccggggacgcggggggaggaggaggcgggctcccaatccggttccatccggttctcccaccgcccccgctgtgggtctcagcagctcgggcggcgggaggagtggcagcggcaaggcagcccagtttcgcgaaggctgtcggcgcgccgcggcccgcaggcacccggcacgcgccttccccgcaggcacccggcacgcgccttccccgccgccacgatgcccaagaggaaggtcagctccgccgaaggcgccgccaaggaagagcccaagaggagatcggcgcggttgtcagctaaacctcctgcaaaagtggaagcgaagccgaaaaaggcagcagcgaaggataaatcttcagacaaaaaagtgcaaacaaaagggaaaaggggagcaaagggaaaacaggccgaagtggctaaccaagaaactaaagaagacttacctgcggaaaacggggaaacgaagactgaggagagtccagcctctgatgaagcaggagagaaagaagccaagtctgattaataaccatataccatgtcttatcagtggtccctgtctcccttcttgtacaatccagaggaatatttttatcaactattttgtaaatgcaagttttttagtagctctagaaacatttttaagaaggagggaatcccacctcatcccattttttaagtgtaaatgcttttttttaagaggtgaaatcatttgctggttgtttattttttggtacaaccagaaaatagtgtgggatattgaattatgggaggctctgactgtctcgggtgtcagcttaacattccacagatggggggttagtttttatatcctataatacaaagcatattaaatggcaatatggagtcagtcctgcatttaatgtcttgaacattttaaattacttctattaccatgttgttttttagtagaattgtttcctaaagaaaaccactctttgatcatggctctctctgccagaattgtgtgcactctgtaacatcttttgtggtagtcctgttttcctaataactttgttactgtgctgtgaaagattacagatttgaacatgtagtgtacgtgctgttgagttgtgaactggtgggccgtatgtaacagctgaccaacgtgaagatactggtacttgatagcctcttaaggaaaatttgcttccaaattttaagctggaaagtcactggaataactttaaaaaagaattacaatacatggctttttagaatttcgttacgtatgttaagatttgtgtacaaattgaaatgtctgtactgatcctcaaccaataaaatctcagttatgaaaatacactaacaccacccacaccgcgagacaagcgcccaccccgcaatccacactcgttactcaccccatccacatcaccgctcttgcgcacacgcagccaccacataagggcaccctcctcgcgagccgcaactccttccccc

SEQ ID NO: 331055 - DNA, 2004 bp, Homo sapiens
ccttcagtttcgctacgacaactcatacacctcctatgaaaaaactctaccactcaccctagcattacttatatgatatgtctccatacgctctacttgcttgtctttatggccctttaattcaagtaattggtcagtatccgtatgggtcttttataccacccgctgggggctaaactaatttagctgctgctgtatacttactaacaaggaataaatgttaagctttcttctcagtattgatggatggtatctaaaagtatttttatgtttctttaacatggcttaaattttgaacttaatgtatcaagttagtatggtcatattaatacctgtgcttttcagattcttcaaacacctaaatgaaagtgataaattcaaaactgatccttttagttcctcattatatgatatgaagggattaactgtagcaggatagtcaacctgaccgtacggcatggtgctttttttcaggtgattggtcttaatgtgagggttaaggtcttgtgaggacagtattgttgaagttcacaacaaatttggggatgggtgggaatacggtcgacgagactcctccggtattcaacttcatgacattgtcctgtcatgtggaactgtagggaatagtggatgatggcgacagtggtgaaatatagctcgggctttaggatttgtcatatgtctaatgaggcttgacatgcaagtactattaaaatctccttagcatacgttgttttcctgattactgggggggaccttaagttgtctcatgtaataggtgtatcaactgatgtgtgatagacattaatatgacagctgttatggatacagtctatacaaaatgagatcctttcataagcttgaagattggggtttcacgctcatgtgtgagatgtccctctctcaaaccttactatgaagtcagcaccactgggcacattacttgtctgacatgaaggggaaaaagtaaaacaaaatgtaaataaggagtaaagcatgtacttaaaatatattcttattctatcataggataaatcttcagacaaaaaagtgcaaacaaaagggaaaaggggagcaaagggaaaacaggccgaagtggctaaccaagaaactaaagaagacttacctgcggaaaacggggaaacgaagactgaggagagtccagcctctgatgaagcaggagagaaagaagccaagtctgattaataaccatataccatgtcttatcagtggtccctgtctcccttcttgtacaatccagaggaatatttttatcaactattttgtaaatgcaagttttttagtagctctagaaacatttttaagaaggagggaatcccacctcatcccattttttaagtgtaaatgcttttttttaagaggtgaaatcatttgctggttgtttattttttggtacaaccagaaaatagtgtgggatattgaattatgggaggctctgactgtctcgggtgtcagcttaacattccacagatggggggttagtttttatatcctataatacaaagcatattaaatggcaatatggagtcagtcctgcatttaatgtcttgaacattttaaattacttctattaccatgttgttttttagtagaattgtttcctaaagaaaaccactctttgatcatggctctctctgccagaattgtgtgcactctgtaacatcttttgtggtagtcctgttttcctaataactttgttactgtgctgtgaaagattacagatttgaacatgtagtgtacgtgctgttgagttgtgaactggtgggccgtatgtaacagctgaccaacgtgaagatactggtacttgatagcctcttaaggaaaatttgcttccaaattttaagctggaaagtcactggaataactttaaaaaagaattacaatacatggctttttagaatttcgttacgtatgttaagatttgtgtacaaattgaaatgtctgtactgatcctcaaccaataaaatctcagttatgaaaata

SEQ ID NO: 331056 - DNA, 1393 bp, Homo sapiens
gcggccgcgggggcgggcgttctggaacgtttggcggccgggggagctgagggggctattcgaacggggcggcgggaagccgtgacgtcacgcggccgggcattgttctcggggccgggcgggcccgcgagtcctgggactgcggcccgcctctattcgtgcgtctccgtctccgcaggtcagctccgccgaaggcgccgccaaggaagagcccaagaggagatcggcgcggttgtcagctaaacctcctgcaaaagtggaagcgaagccgaaaaaggcagcagcgaagattcttcaaacacctaaatgaaagtgataaattcaaaactgatccttttagttcctcattatatgatatgaagggattaactgtagcaggatagtcaacctgaccgtacggcatggtgctttttttcaggataaatcttcagacaaaaaagtgcaaacaaaagggaaaaggggagcaaagggaaaacaggccgaagtggctaaccaagaaactaaagaagacttacctgcggaaaacggggaaacgaagactgaggagagtccagcctctgatgaagcaggagagaaagaagccaagtctgattaataaccatataccatgtcttatcagtggtccctgtctcccttcttgtacaatccagaggaatatttttatcaactattttgtaaatgcaagttttttagtagctctagaaacatttttaagaaggagggaatcccacctcatcccattttttaagtgtaaatgcttttttttaagaggtgaaatcatttgctggttgtttattttttggtacaaccagaaaatagtgtgggatattgaattatgggaggctctgactgtctcgggtgtcagcttaacattccacagatggggggttagtttttatatcctataatacaaagcatattaaatggcaatatggagtcagtcctgcatttaatgtcttgaacattttaaattacttctattaccatgttgttttttagtagaattgtttcctaaagaaaaccactctttgatcatggctctctctgccagaattgtgtgcactctgtaacatcttttgtggtagtcctgttttcctaataactttgttactgtgctgtgaaagattacagatttgaacatgtagtgtacgtgctgttgagttgtgaactggtgggccgtatgtaacagctgaccaacgtgaagatactggtacttgatagcctcttaaggaaaatttgcttccaaattttaagctggaaagtcactggaataactttaaaaaagaattacaatacatggctttttagaatttcgttacgtatgttaagatttgtgtacaaattgaaatgtctgtactgatcctcaaccaataaaatctcagttatgaaaata

SEQ ID NO: 331057 - DNA, 1618 bp, Homo sapiens
gctgagtcccgtagccaatgggcgggggtggggggcggcccggccggcggggagggggagcccgcggccggggacgcggggggaggaggaggcgggctcccaatccggttccatccggttctcccaccgcccccgctgtgggtctcagcagctcgggcggcgggaggagtggcagcggcaaggcagcccagtttcgcgaaggctgtcggcgcgccgcggcccgcaggcacccggcacgcgccttccccgcaggcacccggcacgcgccttccccgccgccacgatgcccaagaggaaggtcagctccgccgaaggcgccgccaaggaagagcccaagaggagatcggcgcggttgtcagctaaacctcctgcaaaagtggaagcgaagccgaaaaaggcagcagcgaagtgtaggtagaagtttagcactgcagtcatcagaagaggcaagattaatttccttgacattgaggagttgttggataattactaaatttgtccttgttaaataaagattcttcaaacacctaaatgaaagtgataaattcaaaactgatccttttagttcctcattatatgatatgaagggattaactgtagcaggatagtcaacctgaccgtacggcatggtgctttttttcaggataaatcttcagacaaaaaagtgcaaacaaaagggaaaaggggagcaaagggaaaacaggccgaagtggctaaccaagaaactaaagaagacttacctgcggaaaacggggaaacgaagactgaggagagtccagcctctgatgaagcaggagagaaagaagccaagtctgattaataaccatataccatgtcttatcagtggtccctgtctcccttcttgtacaatccagaggaatatttttatcaactattttgtaaatgcaagttttttagtagctctagaaacatttttaagaaggagggaatcccacctcatcccattttttaagtgtaaatgcttttttttaagaggtgaaatcatttgctggttgtttattttttggtacaaccagaaaatagtgtgggatattgaattatgggaggctctgactgtctcgggtgtcagcttaacattccacagatggggggttagtttttatatcctataatacaaagcatattaaatggcaatatggagtcagtcctgcatttaatgtcttgaacattttaaattacttctattaccatgttgttttttagtagaattgtttcctaaagaaaaccactctttgatcatggctctctctgccagaattgtgtgcactctgtaacatcttttgtggtagtcctgttttcctaataactttgttactgtgctgtgaaagattacagatttgaacatgtagtgtacgtgctgttgagttgtgaactggtgggccgtatgtaacagctgaccaacgtgaagatactggtacttgatagcctcttaaggaaaatttgcttccaaattttaagctggaaagtcactggaataactttaaaaaagaattacaatacatggctttttagaatttcgttacgtatgttaagatttgtgtacaaattgaaatgtctgtactgatcctcaaccaataaaatctcagttatgaaaata

SEQ ID NO: 331058 - DNA, 1498 bp, Homo sapiens
gcggccgcgggggcgggcgttctggaacgtttggcggccgggggagctgagggggctattcgaacggggcggcgggaagccgtgacgtcacgcggccgggcattgttctcggggccgggcgggcccgcgagtcctgggactgcggcccgcctctattcgtgcgtctccgtctccgcaggtcagctccgccgaaggcgccgccaaggaagagcccaagaggagatcggcgcggttgtcagctaaacctcctgcaaaagtggaagcgaagccgaaaaaggcagcagcgaagtgtaggtagaagtttagcactgcagtcatcagaagaggcaagattaatttccttgacattgaggagttgttggataattactaaatttgtccttgttaaataaagattcttcaaacacctaaatgaaagtgataaattcaaaactgatccttttagttcctcattatatgatatgaagggattaactgtagcaggatagtcaacctgaccgtacggcatggtgctttttttcaggataaatcttcagacaaaaaagtgcaaacaaaagggaaaaggggagcaaagggaaaacaggccgaagtggctaaccaagaaactaaagaagacttacctgcggaaaacggggaaacgaagactgaggagagtccagcctctgatgaagcaggagagaaagaagccaagtctgattaataaccatataccatgtcttatcagtggtccctgtctcccttcttgtacaatccagaggaatatttttatcaactattttgtaaatgcaagttttttagtagctctagaaacatttttaagaaggagggaatcccacctcatcccattttttaagtgtaaatgcttttttttaagaggtgaaatcatttgctggttgtttattttttggtacaaccagaaaatagtgtgggatattgaattatgggaggctctgactgtctcgggtgtcagcttaacattccacagatggggggttagtttttatatcctataatacaaagcatattaaatggcaatatggagtcagtcctgcatttaatgtcttgaacattttaaattacttctattaccatgttgttttttagtagaattgtttcctaaagaaaaccactctttgatcatggctctctctgccagaattgtgtgcactctgtaacatcttttgtggtagtcctgttttcctaataactttgttactgtgctgtgaaagattacagatttgaacatgtagtgtacgtgctgttgagttgtgaactggtgggccgtatgtaacagctgaccaacgtgaagatactggtacttgatagcctcttaaggaaaatttgcttccaaattttaagctggaaagtcactggaataactttaaaaaagaattacaatacatggctttttagaatttcgttacgtatgttaagatttgtgtacaaattgaaatgtctgtactgatcctcaaccaataaaatctcagttatgaaaata

SEQ ID NO: 331059 - DNA, 1020 bp, Homo sapiens
  misc_feature (34)..(34): n is a, c, g, or t
  misc_feature (58)..(58): n is a, c, g, or t
gcgggcaccgcgtctggccagcacacagacaccncccgtttagggtaaaccccttcanacaaaatgctgcaaacaaaagggaaaaggggagcaaagggaaaacaggccgaagtggctaaccaagaaactaaagaagacttacctgcggaaaacggggaaacgaagactgaggagagtccagcctctgatgaagcaggagagaaagaagccaagtctgattaataaccatataccatgtcttatcagtggtccctgtctcccttcttgtacaatccagaggaatatttttatcaactattttgtaaatgcaagttttttagtagctctagaaacatttttaagaaggagggaatcccacctcatcccattttttaagtgtaaatgcttttttttaagaggtgaaatcatttgctggttgtttattttttggtacaaccagaaaatagtgtgggatattgaattatgggaggctctgactgtctcgggtgtcagcttaacattccacagatggggggttagtttttatatcctataatacaaagcatattaaatggcaatatggagtcagtcctgcatttaatgtcttgaacattttaaattacttctattaccatgttgttttttagtagaattgtttcctaaagaaaaccactctttgatcatggctctctctgccagaattgtgtgcactctgtaacatcttttgtggtagtcctgttttcctaataactttgttactgtgctgtgaaagattacagatttgaacatgtagtgtacgtgctgttgagttgtgaactggtgggccgtatgtaacagctgaccaacgtgaagatactggtacttgatagcctcttaaggaaaatttgcttccaaattttaagctggaaagtcactggaataactttaaaaaagaattacaatacatggctttttagaatttcgttacgtatgttaagatttgtgtacaaattgaaatgtctgtactgatcctcaaccaataaaatctcagttatgaaaata

SEQ ID NO: 331060 - DNA, 1021 bp, Homo sapiens
  misc_feature (89)..(89): n is a, c, g, or t
  misc_feature (95)..(95): n is a, c, g, or t
caagggcgactccatggcagccccttcggtggagctgacctttttcttgggcatcctggcagcagggaaggtgggtgccaggtgcctgnctggcncgcggtgtgcctacagccttcgcgaagctgggctgcctggccgctgccactcctcccgccaccggagctgctctcgctatgttggccaggctggtctcgaactccagaccttagatgaaccacctgcctcggcctcccaaagtgctgggattacaggcgtgagccactgcgcccggaatccagaggaatatttttatcaactattttgtaaatgcaagttttttagtagctctagaaacatttttaagaaggagggaatcccacctcatcccattttttaagtgtaaatgcttttttttaagaggtgaaatcatttgctggttgtttattttttggtacaaccagaaaatagtgtgggatattgaattatgggaggctctgactgtctcgggtgtcagcttaacattccacagatggggggttagtttttatatcctataatacaaagcatattaaatggcaatatggagtcagtcctgcatttaatgtcttgaacattttaaattacttctattaccatgttgttttttagtagaattgtttcctaaagaaaaccactctttgatcatggctctctctgccagaattgtgtgcactctgtaacatcttttgtggtagtcctgttttcctaataactttgttactgtgctgtgaaagattacagatttgaacatgtagtgtacgtgctgttgagttgtgaactggtgggccgtatgtaacagctgaccaacgtgaagatactggtacttgatagcctcttaaggaaaatttgcttccaaattttaagctggaaagtcactggaataactttaaaaaagaattacaatacatggctttttagaatttcgttacgtatgttaagatttgtgtacaaattgaaatgtctgtactgatcctcaaccaataaaatctcagttatgaaaata

SEQ ID NO: 331061 - DNA, 1377 bp, Homo sapiens
  misc_feature (1168)..(1169): n is a, c, g, or t
  misc_feature (1225)..(1226): n is a, c, g, or t
  misc_feature (1238)..(1239): n is a, c, g, or t
  misc_feature (1277)..(1277): n is a, c, g, or t
  misc_feature (1320)..(1320): n is a, c, g, or t
gctgagtcccgtagccaatgggcgggggtggggggcggcccggccggcggggagggggagcccgcggccggggacgcggggggaggaggaggcgggctcccaatccggttccatccggttctcccaccgcccccgctgtgggtctcagcagctcgggcggcgggaggagtggcagcggcaaggcagcccagtttcgcgaaggctgtcggcgcgccgcggcccgcaggcacccggcacgcgccttccccgcaggcacccggcacgcgccttccccgccgccacgatgcccaagaggaaggtcagctccgccgaaggcgccgccaaggaagagcccaagaggagatcggcgcggttgtcagctaaacctcctgcaaaagtggaagcgaagccgaaaaaggcagcagcgaaggataaatcttcagacaaaaaagtgcaaacaaaagggaaaaggggagcaaagggaaaacaggccgaagtggctaaccaagaaactaaagaagacttacctgcggaaaacggggaaacgaagactgaggagagtccagcctctgatgaagcaggagagaaagaagccaagtctgattaataaccatataccatgtcttatcagtggtccctgtctcccttcttgtacaatccagaggaatatttttatcaactattttgtaaatgcaagttttttagtagctctagaaacatttttaagaaggagggaatcccacctcatcccattttttaagtgtaaatgcttttttttaagaggtgaaatcatttgctggttgtttattttttggtacaaccagaaaatagtgtgggatattgaattatgggaggctctgactgtctcgggtgtcagcttaacattccacagatggggggttagtttttatatcctataatacaaagcatattaaatggcaatatggagtcagtcctgcatttaatgtcttgaacattttaaattacttctattaccatgttgttttttagtagaattgtttcctaaagaaaaccactctttgatcatggctctctctgccagaattgtgtgcactctgtaacatcttttgtggtagtcctgttttcctaataactttgttactgtgctgtgaaagattacagatttgaacatgtagtggacaattgagacgttcatatttctacactnngttggtgggatgtcgtcaattatgttacaaccatgtgtggaagacttctggcaatnntcctcaagaatnnctagaactagaattaccattgtgacccagcaatcccanttacgtgggtatatacccaagaggatttataaatcattctacntatagacacatgcacacatatgtttactgcagtgctgttcacaacagcaaagacttg

SEQ ID NO: 331062 - DNA, 3796 bp, Homo sapiens
  misc_feature (1622)..(1622): n is a, c, g, or t
gctgagtcccgtagccaatgggcgggggtggggggcggcccggccggcggggagggggagcccgcggccggggacgcggggggaggaggaggcgggctcccaatccggttccatccggttctcccaccgcccccgctgtgggtctcagcagctcgggcggcgggaggagtggcagcggcaaggcagcccagtttcgcgaaggctgtcggcgcgccgcggcccgcaggcacccggcacgcgccttccccgcaggcacccggcacgcgccttccccgccgccacgatgcccaagaggaaggtcagctccgccgaaggcgccgccaaggaagagcccaagaggagatcggcgcggttgtcagctaaacctcctgcaaaagtggaagcgaagccgaaaaaggcagcagcgaaggtaagcctcgaaacgcgcattgggatgcagcggggccttaggctacactgcttcttaatgcggggcttccattttaattagctattggagctttatttatactttaataattacggtaaataatttttctagtggtcgaggcaaaaatgtaatggatatattcatcctggtttatagaactatatcacactaatgctgctgcagatgttaggagacttaggacgacaaaaaatattaaatattaagtctacaaaggaaatttattctttgcgttgcgtacattgtggctggtgcttggcttttaattcgtgcttgtacttccttttttgacaataaaagagtcaagatagcaccgaggccaggagaaagggaacgtgtaagtttttatatatacagtttccaagccaacttcgggaagccttaacctttttacggggtgggggtggggaggtaaaaagttgtgatctctgagaaaataaccgccactactctggaagtgttcatcagcagttatacaaaaccgtgattttggctgctccctaacaaattcgtgattgcatgattcgaattgcaggtctgtagaatgaagttggctttgggtgtacgtgtgtttgataacttgcagggtggaaaagcagaacatgtgtaaaacaagtataagctttgtgtttggatatagcattgaaacctgtaaagctctacatgttcttcgcggggtgattaatttttatccaaaacttaggtgagagtttgctatttgaagtctcaaaaaaaatttttgttaatgccttcacctctttcctaaaagtgtaggtagaagtttagcactgcagtcatcagaagaggcaagattaatttccttgacattgaggagttgttggataattactaaatttgtccttgttaaataaaggtataaaacaaagatgttttttcttttttaatttaaattttttacagagctgagtgtaaaaatgttaactatgttttctttaacagaaagttctgtttttgtgatccttttaaaaataaagcttcacggaaggtatgagaatagtatttttcaactttaaatttctcattaccagaagaccatgtggtaattctctgtatacagttagaacagcacggaaacttgaaggcctaaaaaattagctgaccttgttaaaaatgttggcgtgagcagtatattattacctatctttttttattntgtgtgtgtgtgtgtgtgtgtgttttaaactaattggctgaaatatctgcctgtttccctctttacatttttcttgtttctttccttatttatctttgtccatcttgagatctactgtaaagtgaattttttaatgaaaacagttccaagttttactctcagtgggtttgggacatcagatgtaattgagaggccaacaggtaagtcttcatgtcagtgtttgttgaggaacgagcctatgaggtcagttttcccaaaaggaaaaagggcagaagggatttgttcatttttacatctcgtttctgtaatacacctttgacttcatggttgatcagactttgaagtctaaacagaacgtaagcacttggtgtatcgattatcatactacacagtagacatgttttcaaggcatatcttgtcactgtgtgtgcttctgacttgtatctttccctagaactaaatattttgaaggtccaaacattatactttgggaaacttgattgatttttttttaatctagcttttcagctgataatggttacacgtggtattatttcaagtccaagatattatgtattctattttaactgtttcccagttttgtattttttgtattggaatgattatgaaattaatgagaaatctttagaaacagactacaaaagagtagttcttaaatacagaagtgattgtgaaactttgtgatagcaatgtgtgtagtagcagttttgtctcaaatacatttatcatttgttactcaaaggatgttgaagtattaaaagtcattatgctgtctgtggaatcctactattagtacagaacaccctgcagtgatttttccgcccatgttagcattgaagttgtgagctctacttgcttgtctttatggccctttaattcaagtaattggtcagtatccgtatgggtcttttataccacccgctgggggctaaactaatttagctgctgctgtatacttactaacaaggaataaatgttaagctttcttctcagtattgatggatggtatctaaaagtatttttatgtttctttaacatggcttaaattttgaacttaatgtatcaagttagtatggtcatattaatacctgtgcttttcagattcttcaaacacctaaatgaaagtgataaattcaaaactgatccttttagttcctcattatatgatatgaagggattaactgtagcaggatagtcaacctgaccgtacggcatggtgctttttttcaggataaatcttcagacaaaaaagtgcaaacaaaagggaaaaggggagcaaagggaaaacaggccgaagtggctaaccaagaaactaaagaagacttacctgcggaaaacggggaaacgaagactgaggagagtccagcctctgatgaagcaggagagaaagaagccaagtctgattaataaccatataccatgtcttatcagtggtccctgtctcccttcttgtacaatccagaggaatatttttatcaactattttgtaaatgcaagttttttagtagctctagaaacatttttaagaaggagggaatcccacctcatcccattttttaagtgtaaatgcttttttttaagaggtgaaatcatttgctggttgtttattttttggtacaaccagaattaacattccacagatggggggttagtttttatatcctataatacaaagcatattaaatggcaatatggagtcagtcctgcatttaatgtcttgaacattttaaattacttctattaccatgttgttttttagtagaattgtttcctaaagaaaaccactctttgatcatggctctctctgccagaattgtgtgcactctgtaacatcttttgtggtagtcctgttttcctaataactttgttactgtgctgtgaaagattacagatttgaacatgtagtgtacgtgctgttgagttgtgaactggtgggccgtatgtaacagctgaccaacgtgaagatactggtacttgatagcctcttaaggaaaatttgcttccaaattttaagctggaaagtcactggaataactttaaaaaagaattacaatacatggctttttagaatttcgttacgtatgttaagatttgtgtacaaattgaaatgtctgtactgatcctcaaccaataaaatctcagttatgaaaata

SEQ ID NO: 331063 - DNA, 852 bp, Homo sapiens
tctatcttaatctcacagaaatttctatgggccaggctgacttagaacgtcatgtcgggaagagaagtgaggccggtctaggaagcaggagagatcatcactggtccattagcaacgtttccagtgtgtgctggaccaggggaagcacattccaagtactgtcagccattactgagataataccatacatgttaataagactaagctcttaaaaggcacgtgtcctacacaagtaatatcacaatccctcgtagaacaggcacctctatccttaatagtgtgggatattgaattatgggaggctctgactgtctcgggtgtcagcttaacattccacagatggggggttagtttttatatcctataatacaaagcatattaaatggcaatatggagtcagtcctgcatttaatgtcttgaacattttaaattacttctattaccatgttgttttttagtagaattgtttcctaaagaaaaccactctttgatcatggctctctctgccagaattgtgtgcactctgtaacatcttttgtggtagtcctgttttcctaataactttgttactgtgctgtgaaagattacagatttgaacatgtagtgtacgtgctgttgagttgtgaactggtgggccgtatgtaacagctgaccaacgtgaagatactggtacttgatagcctcttaaggaaaatttgcttccaaattttaagctggaaagtcactggaataactttaaaaaagaattacaatacatggctttttagaatttcgttacgtatgttaagatttgtgtacaaattgaaatgtctgtactgatcctcaaccaataaaatctcagttatgaaaata

SEQ ID NO: 331064 - DNA, 3366 bp, Homo sapiens
  misc_feature (1622)..(1622): n is a, c, g, or t
  misc_feature (3366)..(3366): n is a, c, g, or t
gctgagtcccgtagccaatgggcgggggtggggggcggcccggccggcggggagggggagcccgcggccggggacgcggggggaggaggaggcgggctcccaatccggttccatccggttctcccaccgcccccgctgtgggtctcagcagctcgggcggcgggaggagtggcagcggcaaggcagcccagtttcgcgaaggctgtcggcgcgccgcggcccgcaggcacccggcacgcgccttccccgcaggcacccggcacgcgccttccccgccgccacgatgcccaagaggaaggtcagctccgccgaaggcgccgccaaggaagagcccaagaggagatcggcgcggttgtcagctaaacctcctgcaaaagtggaagcgaagccgaaaaaggcagcagcgaaggtaagcctcgaaacgcgcattgggatgcagcggggccttaggctacactgcttcttaatgcggggcttccattttaattagctattggagctttatttatactttaataattacggtaaataatttttctagtggtcgaggcaaaaatgtaatggatatattcatcctggtttatagaactatatcacactaatgctgctgcagatgttaggagacttaggacgacaaaaaatattaaatattaagtctacaaaggaaatttattctttgcgttgcgtacattgtggctggtgcttggcttttaattcgtgcttgtacttccttttttgacaataaaagagtcaagatagcaccgaggccaggagaaagggaacgtgtaagtttttatatatacagtttccaagccaacttcgggaagccttaacctttttacggggtgggggtggggaggtaaaaagttgtgatctctgagaaaataaccgccactactctggaagtgttcatcagcagttatacaaaaccgtgattttggctgctccctaacaaattcgtgattgcatgattcgaattgcaggtctgtagaatgaagttggctttgggtgtacgtgtgtttgataacttgcagggtggaaaagcagaacatgtgtaaaacaagtataagctttgtgtttggatatagcattgaaacctgtaaagctctacatgttcttcgcggggtgattaatttttatccaaaacttaggtgagagtttgctatttgaagtctcaaaaaaaatttttgttaatgccttcacctctttcctaaaagtgtaggtagaagtttagcactgcagtcatcagaagaggcaagattaatttccttgacattgaggagttgttggataattactaaatttgtccttgttaaataaaggtataaaacaaagatgttttttcttttttaatttaaattttttacagagctgagtgtaaaaatgttaactatgttttctttaacagaaagttctgtttttgtgatccttttaaaaataaagcttcacggaaggtatgagaatagtatttttcaactttaaatttctcattaccagaagaccatgtggtaattctctgtatacagttagaacagcacggaaacttgaaggcctaaaaaattagctgaccttgttaaaaatgttggcgtgagcagtatattattacctatctttttttattntgtgtgtgtgtgtgtgtgtgtgttttaaactaattggctgaaatatctgcctgtttccctctttacatttttcttgtttctttccttatttatctttgtccatcttgagatctactgtaaagtgaattttttaatgaaaacagttccaagttttactctcagtgggtttgggacatcagatgtaattgagaggccaacaggtaagtcttcatgtcagtgtttgttgaggaacgagcctatgaggtcagttttcccaaaaggaaaaagggcagaagggatttgttcatttttacatctcgtttctgtaatacacctttgacttcatggttgatcagactttgaagtctaaacagaacgtaagcacttggtgtatcgattatcatactacacagtagacatgttttcaaggcatatcttgtcactgtgtgtgcttctgacttgtatctttccctagaactaaatattttgaaggtccaaacattatactttgggaaacttgattgatttttttttaatctagcttttcagctgataatggttacacgtggtattatttcaagtccaagatattatgtattctattttaactgtttcccagttttgtattttttgtattggaatgattatgaaattaatgagaaatctttagaaacagactacaaaagagtagttcttaaatacagaagtgattgtgaaactttgtgatagcaatgtgtgtagtagcagttttgtctcaaatacatttatcatttgttactcaaaggatgttgaagtattaaaagtcattatgctgtctgtggaatcctactattagtacagaacaccctgcagtgatttttccgcccatgttagcattgaagttgtgagctctacttgcttgtctttatggccctttaattcaagtaattggtcagtatccgtatgggtcttttataccacccgctgggggctaaactaatttagctgctgctgtatacttactaacaaggaataaatgttaagctttcttctcagtattgatggatggtatctaaaagtatttttatgtttctttaacatggcttaaattttgaacttaatgtatcaagttagtatggtcatattaatacctgtgcttttcagattcttcaaacacctaaatgaaagtgataaattcaaaactgatccttttagttcctcattatatgatatgaagggattaactgtagcaggatagtcaacctgaccgtacggcatggtgctttttttcaggataaatcttcagacaaaaaagtgcaaacaaaagggaaaaggggagcaaagggaaaacaggccgaagtggctaaccaagaaactaaagaagacttacctgcggaaaacggggaaacgaagactgaggagagtccagcctctgatgaagcaggagagaaagaagccaagtctgattaataaccatataccatgtcttatcagtggtccctgtctcccttcttgtacaatccagaggaatatttttatcaactattttgtaaatgcaagttttttagtagctctagaaacatttttaagaaggagggaatcccacctcatcccattttttaagtgtaaatgcttttttttaagaggtgaaatcatttgctggttgtttattttttggtacaaccagaacattcaaagatgggggtaggttttattcctatatacaaagatattaaatgcattatggagccaccctgcatttatggtctgcattttacttctttcn

SEQ ID NO: 331065 - DNA, 1264 bp, Homo sapiens
gcggccgcgggggcgggcgttctggaacgtttggcggccgggggagctgagggggctattcgaacggggcggcgggaagccgtgacgtcacgcggccgggcattgttctcggggccgggcgggcccgcgagtcctgggactgcggcccgcctctattcgtgcgtctccgtctccgcaggtcagctccgccgaaggcgccgccaaggaagagcccaagaggagatcggcgcggttgtcagctaaacctcctgcaaaagtggaagcgaagccgaaaaaggcagcagcgaaggataaatcttcagacaaaaaagtgcaaacaaaagggaaaaggggagcaaagggaaaacaggccgaagtggctaaccaagaaactaaagaagacttacctgcggaaaacggggaaacgaagactgaggagagtccagcctctgatgaagcaggagagaaagaagccaagtctgattaataaccatataccatgtcttatcagtggtccctgtctcccttcttgtacaatccagaggaatatttttatcaactattttgtaaatgcaagttttttagtagctctagaaacatttttaagaaggagggaatcccacctcatcccattttttaagtgtaaatgcttttttttaagaggtgaaatcatttgctggttgtttattttttggtacaaccagaaaatagtgtgggatattgaattatgggaggctctgactgtctcgggtgtcagcttaacattccacagatggggggttagtttttatatcctataatacaaagcatattaaatggcaatatggagtcagtcctgcatttaatgtcttgaacattttaaattacttctattaccatgttgttttttagtagaattgtttcctaaagaaaaccactctttgatcatggctctctctgccagaattgtgtgcactctgtaacatcttttgtggtagtcctgttttcctaataactttgttactgtgctgtgaaagattacagatttgaacatgtagtgtacgtgctgttgagttgtgaactggtgggccgtatgtaacagctgaccaacgtgaagatactggtacttgatagcctcttaaggaaaatttgcttccaaattttaagctggaaagtcactggaataactttaaaaaagaattacaatacatggctttttagaatttcgttacgtatgttaagatttgtgtacaaattgaaatgtctgtactgatcctcaaccaataaaatctcagttatgaaaata

SEQ ID NO: 331066 - DNA, 4552 bp, Homo sapiens
  misc_feature (1771)..(1771): n is a, c, g, or t
gctgagtcccgtagccaatgggcgggggtggggggcggcccggccggcggggagggggagcccgcggccggggacgcggggggaggaggaggcgggctcccaatccggttccatccggttctcccaccgcccccgctgtgggtctcagcagctcgggcggcgggaggagtggcagcggcaaggcagcccagtttcgcgaaggctgtcggcgcgccgcggcccgcaggcacccggcacgcgccttccccgccgccacgatgcccaagaggaaggtcagctccgccgaaggcgccgccaaggaagaggtgagtgcgggccttctgcggggggtggtgggtttcccgtgagccgctggcctgccttctcttctcgctgactctcctttttctttctccaagcccaagaggagatcggcgcggttgtcagctgtaagtaaagcgagccccgtaaccgttcgttttccgcgggtcgtcccgggtgaggacgctcagtgctgcttttgcctttcagaaacctcctgcaaaagtggaagcgaagccgaaaaaggcagcagcgaaggtaagcctcgaaacgcgcattgggatgcagcggggccttaggctacactgcttcttaatgcggggcttccattttaattagctattggagctttatttatactttaataattacggtaaataatttttctagtggtcgaggcaaaaatgtaatggatatattcatcctggtttatagaactatatcacactaatgctgctgcagatgttaggagacttaggacgacaaaaaatattaaatattaagtctacaaaggaaatttattctttgcgttgcgtacattgtggctggtgcttggcttttaattcgtgcttgtacttccttttttgacaataaaagagtcaagatagcaccgaggccaggagaaagggaacgtgtaagtttttatatatacagtttccaagccaacttcgggaagccttaacctttttacggggtgggggtggggaggtaaaaagttgtgatctctgagaaaataaccgccactactctggaagtgttcatcagcagttatacaaaaccgtgattttggctgctccctaacaaattcgtgattgcatgattcgaattgcaggtctgtagaatgaagttggctttgggtgtacgtgtgtttgataacttgcagggtggaaaagcagaacatgtgtaaaacaagtataagctttgtgtttggatatagcattgaaacctgtaaagctctacatgttcttcgcggggtgattaatttttatccaaaacttaggtgagagtttgctatttgaagtctcaaaaaaaatttttgttaatgccttcacctctttcctaaaagtgtaggtagaagtttagcactgcagtcatcagaagaggcaagattaatttccttgacattgaggagttgttggataattactaaatttgtccttgttaaataaaggtataaaacaaagatgttttttcttttttaatttaaattttttacagagctgagtgtaaaaatgttaactatgttttctttaacagaaagttctgtttttgtgatccttttaaaaataaagcttcacggaaggtatgagaatagtatttttcaactttaaatttctcattaccagaagaccatgtggtaattctctgtatacagttagaacagcacggaaacttgaaggcctaaaaaattagctgaccttgttaaaaatgttggcgtgagcagtatattattacctatctttttttattntgtgtgtgtgtgtgtgtgtgtgttttaaactaattggctgaaatatctgcctgtttccctctttacatttttcttgtttctttccttatttatctttgtccatcttgagatctactgtaaagtgaattttttaatgaaaacagttccaagttttactctcagtgggtttgggacatcagatgtaattgagaggccaacaggtaagtcttcatgtcagtgtttgttgaggaacgagcctatgaggtcagttttcccaaaaggaaaaagggcagaagggatttgttcatttttacatctcgtttctgtaatacacctttgacttcatggttgatcagactttgaagtctaaacagaacgtaagcacttggtgtatcgattatcatactacacagtagacatgttttcaaggcatatcttgtcactgtgtgtgcttctgacttgtatctttccctagaactaaatattttgaaggtccaaacattatactttgggaaacttgattgatttttttttaatctagcttttcagctgataatggttacacgtggtattatttcaagtccaagatattatgtattctattttaactgtttcccagttttgtattttttgtattggaatgattatgaaattaatgagaaatctttagaaacagactacaaaagagtagttcttaaatacagaagtgattgtgaaactttgtgatagcaatgtgtgtagtagcagttttgtctcaaatacatttatcatttgttactcaaaggatgttgaagtattaaaagtcattatgctgtctgtggaatcctactattagtacagaacaccctgcagtgatttttccgcccatgttagcattgaagttgtgagctctacttgcttgtctttatggccctttaattcaagtaattggtcagtatccgtatgggtcttttataccacccgctgggggctaaactaatttagctgctgctgtatacttactaacaaggaataaatgttaagctttcttctcagtattgatggatggtatctaaaagtatttttatgtttctttaacatggcttaaattttgaacttaatgtatcaagttagtatggtcatattaatacctgtgcttttcagattcttcaaacacctaaatgaaagtgataaattcaaaactgatccttttagttcctcattatatgatatgaagggattaactgtagcaggatagtcaacctgaccgtacggcatggtgctttttttcaggtgattggtcttaatgtgagggttaaggtcttgtgaggacagtattgttgaagttcacaacaaatttggggatgggtgggaatacggtcgacgagactcctccggtattcaacttcatgacattgtcctgtcatgtggaactgtagggaatagtggatgatggcgacagtggtgaaatatagctcgggctttaggatttgtcatatgtctaatgaggcttgacatgcaagtactattaaaatctccttagcatacgttgttttcctgattactgggggggaccttaagttgtctcatgtaataggtgtatcaactgatgtgtgatagacattaatatgacagctgttatggatacagtctatacaaaatgagatcctttcataagcttgaagattggggtttcacgctcatgtgtgagatgtccctctctcaaaccttactatgaagtcagcaccactgggcacattacttgtctgacatgaaggggaaaaagtaaaacaaaatgtaaataaggagtaaagcatgtacttaaaatatattcttattctatcataggataaatcttcagacaaaaaagtgcaaacaaaagggaaaaggggagcaaagggaaaacaggccgaagtggctaaccaagaaactaaagaagacttacctgcggaaaacggggaaacgaagactgaggagagtccagcctctgatgaagcaggagagaaagaagccaagtctgattaataaccatataccatgtcttatcagtggtccctgtctcccttcttgtacaatccagaggaatatttttatcaactattttgtaaatgcaagttttttagtagctctagaaacatttttaagaaggagggaatcccacctcatcccattttttaagtgtaaatgcttttttttaagaggtgaaatcatttgctggttgtttattttttggtacaaccagaaaatagtgtgggatattgaattatgggaggctctgactgtctcgggtgtcagcttaacattccacagatggggggttagtttttatatcctataatacaaagcatattaaatggcaatatggagtcagtcctgcatttaatgtcttgaacattttaaattacttctattaccatgttgttttttagtagaattgtttcctaaagaaaaccactctttgatcatggctctctctgccagaattgtgtgcactctgtaacatcttttgtggtagtcctgttttcctaataactttgttactgtgctgtgaaagattacagatttgaacatgtagtgtacgtgctgttgagttgtgaactggtgggccgtatgtaacagctgaccaacgtgaagatactggtacttgatagcctcttaaggaaaatttgcttccaaattttaagctggaaagtcactggaataactttaaaaaagaattacaatacatggctttttagaatttcgttacgtatgttaagatttgtgtacaaattgaaatgtctgtactgatcctcaaccaataaaatctcagttatgaaaata

SEQ ID NO: 331067 - DNA, 1358 bp, Homo sapiens
gctgagtcccgtagccaatgggcgggggtggggggcggcccggccggcggggagggggagcccgcggccggggacgcggggggaggaggaggcgggctcccaatccggttccatccggttctcccaccgcccccgctgtgggtctcagcagctcgggcggcgggaggagtggcagcggcaaggcagcccagtttcgcgaaggctgtcggcgcgccgcggcccgcaggcacccggcacgcgccttccccgccgccacgatgcccaagaggaaggtcagctccgccgaaggcgccgccaaggaagagcccaagaggagatcggcgcggttgtcagctaaacctcctgcaaaagtggaagcgaagccgaaaaaggcagcagcgaaggataaatcttcagacaaaaaagtgcaaacaaaagggaaaaggggagcaaagggaaaacaggccgaagtggctaaccaagaaactaaagaagacttacctgcggaaaacggggaaacgaagactgaggagagtccagcctctgatgaagcaggagagaaagaagccaagtctgattaataaccatataccatgtcttatcagtggtccctgtctcccttcttgtacaatccagaggaatatttttatcaactattttgtaaatgcaagttttttagtagctctagaaacatttttaagaaggagggaatcccacctcatcccattttttaagtgtaaatgcttttttttaagaggtgaaatcatttgctggttgtttattttttggtacaaccagaaaatagtgtgggatattgaattatgggaggctctgactgtctcgggtgtcagcttaacattccacagatggggggttagtttttatatcctataatacaaagcatattaaatggcaatatggagtcagtcctgcatttaatgtcttgaacattttaaattacttctattaccatgttgttttttagtagaattgtttcctaaagaaaaccactctttgatcatggctctctctgccagaattgtgtgcactctgtaacatcttttgtggtagtcctgttttcctaataactttgttactgtgctgtgaaagattacagatttgaacatgtagtgtacgtgctgttgagttgtgaactggtgggccgtatgtaacagctgaccaacgtgaagatactggtacttgatagcctcttaaggaaaatttgcttccaaattttaagctggaaagtcactggaataactttaaaaaagaattacaatacatggctttttagaatttcgttacgtatgttaagatttgtgtacaaattgaaatgtctgtactgatcctcaaccaataaaatctcagttatgaaaata

SEQ ID NO: 331068 - DNA, 1275 bp, Homo sapiens
cgcttcacgcaggcctgcgaagctggagcccctggatagcctttcttgccgacagaggcgggagaaatttgctacttcctgtataccttatccttctcccttcccagtctaagatacgaactataaatgttcgaacccaattcaccccggaggggaggggccagataccagtggcctgaaggcgcccaggtcagctccgccgaaggcgccgccaaggaagagcccaagaggagatcggcgcggttgtcagctaaacctcctgcaaaagtggaagcgaagccgaaaaaggcagcagcgaaggataaatcttcagacaaaaaagtgcaaacaaaagggaaaaggggagcaaagggaaaacaggccgaagtggctaaccaagaaactaaagaagacttacctgcggaaaacggggaaacgaagactgaggagagtccagcctctgatgaagcaggagagaaagaagccaagtctgattaataaccatataccatgtcttatcagtggtccctgtctcccttcttgtacaatccagaggaatatttttatcaactattttgtaaatgcaagttttttagtagctctagaaacatttttaagaaggagggaatcccacctcatcccattttttaagtgtaaatgcttttttttaagaggtgaaatcatttgctggttgtttattttttggtacaaccagaaaatagtgtgggatattgaattatgggaggctctgactgtctcgggtgtcagcttaacattccacagatggggggttagtttttatatcctataatacaaagcatattaaatggcaatatggagtcagtcctgcatttaatgtcttgaacattttaaattacttctattaccatgttgttttttagtagaattgtttcctaaagaaaaccactctttgatcatggctctctctgccagaattgtgtgcactctgtaacatcttttgtggtagtcctgttttcctaataactttgttactgtgctgtgaaagattacagatttgaacatgtagtgtacgtgctgttgagttgtgaactggtgggccgtatgtaacagctgaccaacgtgaagatactggtacttgatagcctcttaaggaaaatttgcttccaaattttaagctggaaagtcactggaataactttaaaaaagaattacaatacatggctttttagaatttcgttacgtatgttaagatttgtgtacaaattgaaatgtctgtactgatcctcaaccaataaaatctcagttatgaaaata

SEQ ID NO: 331069 - DNA, 1466 bp, Homo sapiens
gctgagtcccgtagccaatgggcgggggtggggggcggcccggccggcggggagggggagcccgcggccggggacgcggggggaggaggaggcgggctcccaatccggttccatccggttctcccaccgcccccgctgtgggtctcagcagctcgggcggcgggaggagtggcagcggcaaggcagcccagtttcgcgaaggctgtcggcgcgccgcggcccgcaggcacccggcacgcgccttccccgcaggcacccggcacgcgccttccccgccgccacgatgcccaagaggaaggtcagctccgccgaaggcgccgccaaggaagagcccaagaggagatcggcgcggttgtcagctgtaagtaaagcgagccccgtaaccgttcgttttccgcgggtcgtcccgggtgaggacgctcagtgctgcttttgcctttcagaaacctcctgcaaaagtggaagcgaagccgaaaaaggcagcagcgaaggataaatcttcagacaaaaaagtgcaaacaaaagggaaaaggggagcaaagggaaaacaggccgaagtggctaaccaagaaactaaagaagacttacctgcggaaaacggggaaacgaagactgaggagagtccagcctctgatgaagcaggagagaaagaagccaagtctgattaataaccatataccatgtcttatcagtggtccctgtctcccttcttgtacaatccagaggaatatttttatcaactattttgtaaatgcaagttttttagtagctctagaaacatttttaagaaggagggaatcccacctcatcccattttttaagtgtaaatgcttttttttaagaggtgaaatcatttgctggttgtttattttttggtacaaccagaaaatagtgtgggatattgaattatgggaggctctgactgtctcgggtgtcagcttaacattccacagatggggggttagtttttatatcctataatacaaagcatattaaatggcaatatggagtcagtcctgcatttaatgtcttgaacattttaaattacttctattaccatgttgttttttagtagaattgtttcctaaagaaaaccactctttgatcatggctctctctgccagaattgtgtgcactctgtaacatcttttgtggtagtcctgttttcctaataactttgttactgtgctgtgaaagattacagatttgaacatgtagtgtacgtgctgttgagttgtgaactggtgggccgtatgtaacagctgaccaacgtgaagatactggtacttgatagcctcttaaggaaaatttgcttccaaattttaagctggaaagtcactggaataactttaaaaaagaattacaatacatggctttttagaatttcgttacgtatgttaagatttgtgtacaaattgaaatgtctgtactgatcctcaaccaataaaatctcagttatgaaaata

SEQ ID NO: 331070 - DNA, 1414 bp, Homo sapiens
gctgagtcccgtagccaatgggcgggggtggggggcggcccggccggcggggagggggagcccgcggccggggacgcggggggaggaggaggcgggctcccaatccggttccatccggttctcccaccgcccccgctgtgggtctcagcagctcgggcggcgggaggagtggcagcggcaaggcagcccagtttcgcgaaggctgtcggcgcgccgcggcccgcaggcacccggcacgcgccttccccgcaggcacccggcacgcgccttccccgccgccacgatgcccaagaggaaggtcagctccgccgaaggcgccgccaaggaagagcccaagaggagatcggcgcggttgtcagctaaacctcctgcaaaagtggaagcgaagccgaaaaaggcagcagcgaaggataaatcttcagacaaaaaagtgcaaacaaaagggaaaaggggagcaaagggaaaacaggccgaagtggctaaccaagaaactaaagaagacttacctgcggaaaacggggaaacgaagactgaggagagtccagcctctgatgaagcaggagagaaagaagccaagtctgattaataaccatataccatgtcttatcagtggtccctgtctcccttcttgtacaatccagaggaatatttttatcaactattttgtaaatgcaagttttttagtagctctagaaacatttttaagaaggagggaatcccacctcatcccattttttaagtgtaaatgcttttttttaagaggtgaaatcatttgctggttgtttattttttggtacaaccagaaaatagtgtgggatattgaattatgggaggctctgactgtctcgggtgtcagcttaacattccacagatggggggttagtttttatatcctataatacaaagcatattaaatggcaatatggagtcagtcctgcatttaatgtcttgaacattttaaattacttctattaccatgttgttttttagtagaattgtttcctaaagaaaaccactctttgatcatggctctctctgccagaattgtgtgcactctgtaacatcttttgtggtagtcctgttttcctaataactttgttactgtgctgtgaaagattacagatttgaacatgtagtgtacgtgctgttgagttgtgaactggtgggccgtatgtaacagctgaccaacgtgaagatactggtacttgatagcctcttaaggaaaatttgcttccaaattttaagctggaaagtcactggaataactttaaaaaagaattacaatacatggctttttagaatttcgttacgtatgttaagatttgtgtacaaattgaaatgtctgtactgatcctcaaccaataaaatctcagttatgaaaataatattttgaagcacatggaaaaaaaaaaag

SEQ ID NO: 331071 - DNA, 1489 bp, Homo sapiens
gctgagtcccgtagccaatgggcgggggtggggggcggcccggccggcggggagggggagcccgcggccggggacgcggggggaggaggaggcgggctcccaatccggttccatccggttctcccaccgcccccgctgtgggtctcagcagctcgggcggcgggaggagtggcagcggcaaggcagcccagtttcgcgaaggctgtcggcgcgccgcggcccgcaggcacccggcacgcgccttccccgcaggcacccggcacgcgccttccccgccgccacgatgcccaagaggaaggtcagctccgccgaaggcgccgccaaggaagagcccaagaggagatcggcgcggttgtcagctaaacctcctgcaaaagtggaagcgaagccgaaaaaggcagcagcgaagtgtaggtagaagtttagcactgcagtcatcagaagaggcaagattaatttccttgacattgaggagttgttggataattactaaatttgtccttgttaaataaaggataaatcttcagacaaaaaagtgcaaacaaaagggaaaaggggagcaaagggaaaacaggccgaagtggctaaccaagaaactaaagaagacttacctgcggaaaacggggaaacgaagactgaggagagtccagcctctgatgaagcaggagagaaagaagccaagtctgattaataaccatataccatgtcttatcagtggtccctgtctcccttcttgtacaatccagaggaatatttttatcaactattttgtaaatgcaagttttttagtagctctagaaacatttttaagaaggagggaatcccacctcatcccattttttaagtgtaaatgcttttttttaagaggtgaaatcatttgctggttgtttattttttggtacaaccagaaaatagtgtgggatattgaattatgggaggctctgactgtctcgggtgtcagcttaacattccacagatggggggttagtttttatatcctataatacaaagcatattaaatggcaatatggagtcagtcctgcatttaatgtcttgaacattttaaattacttctattaccatgttgttttttagtagaattgtttcctaaagaaaaccactctttgatcatggctctctctgccagaattgtgtgcactctgtaacatcttttgtggtagtcctgttttcctaataactttgttactgtgctgtgaaagattacagatttgaacatgtagtgtacgtgctgttgagttgtgaactggtgggccgtatgtaacagctgaccaacgtgaagatactggtacttgatagcctcttaaggaaaatttgcttccaaattttaagctggaaagtcactggaataactttaaaaaagaattacaatacatggctttttagaatttcgttacgtatgttaagatttgtgtacaaattgaaatgtctgtactgatcctcaaccaataaaatctcagttatgaaaata

SEQ ID NO: 331072 - DNA, 1415 bp, Homo sapiens
gcggccgcgggggcgggcgttctggaacgtttggcggccgggggagctgagggggctattcgaacggggcggcgggaagccgtgacgtcacgcggccgggcattgttctcggggccgggcgggcccgcgagtcctgggactgcggcccgcctctattcgtgcgtctccgtctccgcaggtcagctccgccgaaggcgccgccaaggaagagcccaagaggagatcggcgcggttgtcagctaaacctcctgcaaaagtggaagcgaagccgaaaaaggcagcagcgaagtgtaggtagaagtttagcactgcagtcatcagaagaggcaagattaatttccttgacattgaggagttgttggataattactaaatttgtccttgttaaataaagaaagttctgtttttgtgatccttttaaaaataaagcttcacggaaggataaatcttcagacaaaaaagtgcaaacaaaagggaaaaggggagcaaagggaaaacaggccgaagtggctaaccaagaaactaaagaagacttacctgcggaaaacggggaaacgaagactgaggagagtccagcctctgatgaagcaggagagaaagaagccaagtctgattaataaccatataccatgtcttatcagtggtccctgtctcccttcttgtacaatccagaggaatatttttatcaactattttgtaaatgcaagttttttagtagctctagaaacatttttaagaaggagggaatcccacctcatcccattttttaagtgtaaatgcttttttttaagaggtgaaatcatttgctggttgtttattttttggtacaaccagaaaatagtgtgggatattgaattatgggaggctctgactgtctcgggtgtcagcttaacattccacagatggggggttagtttttatatcctataatacaaagcatattaaatggcaatatggagtcagtcctgcatttaatgtcttgaacattttaaattacttctattaccatgttgttttttagtagaattgtttcctaaagaaaaccactctttgatcatggctctctctgccagaattgtgtgcactctgtaacatcttttgtggtagtcctgttttcctaataactttgttactgtgctgtgaaagattacagatttgaacatgtagtgtacgtgctgttgagttgtgaactggtgggccgtatgtaacagctgaccaacgtgaagatactggtacttgatagcctcttaaggaaaatttgcttccaaattttaagctggaaagtcactggaataactttaaaaaagaattacaatacatggctttttagaatttcgttacgtatgttaagatttgtgtacaaattgaaatgtctgtactgatcctcaaccaataaaatctcagttatgaaaata

SEQ ID NO: 331073 - DNA, 2687 bp, Homo sapiens
  misc_feature (1622)..(1622): n is a, c, g, or t
gctgagtcccgtagccaatgggcgggggtggggggcggcccggccggcggggagggggagcccgcggccggggacgcggggggaggaggaggcgggctcccaatccggttccatccggttctcccaccgcccccgctgtgggtctcagcagctcgggcggcgggaggagtggcagcggcaaggcagcccagtttcgcgaaggctgtcggcgcgccgcggcccgcaggcacccggcacgcgccttccccgcaggcacccggcacgcgccttccccgccgccacgatgcccaagaggaaggtcagctccgccgaaggcgccgccaaggaagagcccaagaggagatcggcgcggttgtcagctaaacctcctgcaaaagtggaagcgaagccgaaaaaggcagcagcgaaggtaagcctcgaaacgcgcattgggatgcagcggggccttaggctacactgcttcttaatgcggggcttccattttaattagctattggagctttatttatactttaataattacggtaaataatttttctagtggtcgaggcaaaaatgtaatggatatattcatcctggtttatagaactatatcacactaatgctgctgcagatgttaggagacttaggacgacaaaaaatattaaatattaagtctacaaaggaaatttattctttgcgttgcgtacattgtggctggtgcttggcttttaattcgtgcttgtacttccttttttgacaataaaagagtcaagatagcaccgaggccaggagaaagggaacgtgtaagtttttatatatacagtttccaagccaacttcgggaagccttaacctttttacggggtgggggtggggaggtaaaaagttgtgatctctgagaaaataaccgccactactctggaagtgttcatcagcagttatacaaaaccgtgattttggctgctccctaacaaattcgtgattgcatgattcgaattgcaggtctgtagaatgaagttggctttgggtgtacgtgtgtttgataacttgcagggtggaaaagcagaacatgtgtaaaacaagtataagctttgtgtttggatatagcattgaaacctgtaaagctctacatgttcttcgcggggtgattaatttttatccaaaacttaggtgagagtttgctatttgaagtctcaaaaaaaatttttgttaatgccttcacctctttcctaaaagtgtaggtagaagtttagcactgcagtcatcagaagaggcaagattaatttccttgacattgaggagttgttggataattactaaatttgtccttgttaaataaaggtataaaacaaagatgttttttcttttttaatttaaattttttacagagctgagtgtaaaaatgttaactatgttttctttaacagaaagttctgtttttgtgatccttttaaaaataaagcttcacggaaggtatgagaatagtatttttcaactttaaatttctcattaccagaagaccatgtggtaattctctgtatacagttagaacagcacggaaacttgaaggcctaaaaaattagctgaccttgttaaaaatgttggcgtgagcagtatattattacctatctttttttattntgtgtgtgtgtgtgtgtgtgtgttttaaactaattggctgaaatatctgcctgtttccctctttacatttttcttgtttctttccttatttatctttgtccatcttgagatctactgtaaagtgaattttttaatgaaaacagttccaagttttactctcagtgggtttgggacatcagatgtaattgagaggccaacaggtaagtcttcatgtcagtgtttgttgaggaacgagcctatgaggtcagttttcccaaaaggaaaaagggcagaagggatttgttcatttttacatctcgtttctgtaatacacctttgacttcatggttgatcagactttgaagtctaaacagaacgtaagcacttggtgtatcgattatcatactacacagtagacatgttttcaaggcatatcttgtcactgtgtgtgcttctgacttgtatctttccctagaactaaatattttgaaggtccaaacattatactttgggaaacttgattgatttttttttaatctagcttttcagctgataatggttacacgtggtattatttcaagtccaagatattatgtattctattttaactgtttcccagttttgtattttttgtattggaatgattatgaaattaatgagaaatctttagaaacagactacaaaagagtagttcttaaatacagaagtgattgtgaaactttgtgatagcaatgtgtgtagtagcagttttgtctcaaatacatttatcatttgttactcaaaggatgttgaagtattaaaagtcattatgctgtctgtggaatcctactattagtacagaacaccctgcagtgatttttccgcccatgttagcattgaagttgtgagctctacttgcttgtctttatggccctttaattcaagtaattggtcagtatccgtatgggtcttttataccacccgctgggggctaaactaatttagctgctgctgtatacttactaacaaggaataaatgttaaatttgtgtacaaattgaaatgtctgtactgatcctcaaccaataaaatctcagttatgaaaata

SEQ ID NO: 331074 - DNA, 472 bp, Homo sapiens
aaaaaaaaaaaaaaaaaaaaaaaaaaaaaaaaaaaaaaaaaaaaaaaaaaaaaaaaaaaaaaaaaaaaaaaaaaaaaaaaaaaaaaaaaatgctataaaatggtgaaagcttccttctaaactgccccaagtgttgaagtcttcactttattttgttctgttttgttttgtttttctgttttgtttgcaaaatggtaagggggtgtcgggggggatggggtgtattttgttgcaagtttgtgaggggaaaatgttttggtttgtttctactgacctgaatgtgttggatctacacgtgttgttttgtttttgctttattgatgcacggatgcttttgaacagtagagcgaaatgctagacatggagaatctgctctgtttgtcctttatacatttctgtagttaacagaacactgtaatgtgccttggagcttagtaacttgtaataaattcaattgatattaaaaaaaaaa

SEQ ID NO: 331075 - DNA, 4391 bp, Homo sapiens
tggtgtggtgcggcgaacctggcttacgcgttttcctgagccggcagatagtagtcctcctgtagtgcaccccgcttggctccacattgctcccgggctcagcgtgacaccacgcgtatggggacggagcccgagccccgagtagggccggctgggaggaatctgggcgtcctgccgcgcatgcgccttgcctgagcaacaagtgggctccacagaggaagtgtaaaggggagggggaagaactggtgcagagcatggcggtgacgtcagcgctccgcccgggcggcatcccgcgcggccaagccggggacagcgcgagccgcagccggagcaggagcgccgagacgcgcctccggaacgtagagtaacaatcacaaccccacattccgggcgagcgtgagcacgagcgggaagggatgcgacccgggccgaggcgccgcgcgagcgccctgcagccaacgtgagcgccgccagccgcggcggcccgggcgccggccaggcctgggggcggcgggagcctgcgtgcgtgcactcctctcctctgctctcgtgcgtcctggaagcagtggccgcggcggctccctccggggtgcaaacccagtcgccgccagcagaacggccgacgctgcggaggggagaaggtcctttctcggctgccaccccctcccccggtcctccggggaagcagcggcttcagcaagattggacccgggcaccgggtggcactgaaccctctggccctcgccccagggggcccgtcggggagaggacgcagctcgtaggggggtccccggggagaggaagagacagcccctttcgagcttccacgcaccagccactccggggagggggccaagaggcaacggcggccaccaccgggcaccctcgccccctcccctcgggccgggagcttccagcccaagtctgcagcaccaggaagaaggcgcctgagctcccctcgcgacgagtcaaccgcagtaggaggtgggggcgaagagagggctgaacccgtccgctgcccgggcggtggagcccccacggcgaggcgctgcgccggcggtggagactcgcgttccctccagcccctggggcagaactttctcgccccccctcctccctcccccgcagtcggactccctccccagccggccagtcctcccggaggagaaggcgccgcggagacagcccgggcgggggcctaccttccccagggcaggcatcatgtcggcggcgcaggtgtcctcgtcccggagacaatcttgctacctgtgcgacctgccccgcatgccctgggccatgatctgggacttctcggaacccgtatgccgcggttgcgtcaactacgagggcgctgatcgcatcgaattcgtgatcgagacagcgcgccagctgaagcgggcgcacggctgcttccaggacggccgctcccccgggccgccgccgccgcgcaacagcaacagcaacagcagcagcagcagcagcagcaacagcagcagcagcagcagcagcagcaacaacagctcaaccacgttgatggttccagcaagcctgcggtgctggcggccccgtctggcctggagcgctacggcctaagcgctgccgccgccgccgccgccgccgccgccgctgcggtggaacagcgcagccgcttcgagtacccgccaccgccggtgagcctgggaagcagcagccacaccgcgcgactgcccaacggcctggggggcccaaacggcttccccaaaccaacaccagaggagggacccccagagctgaaccgtcagagccccaattcttcttcagcggcggcgtcggtggcgtctcggcgtggaacgcacggtgggctggttacggggctgcccaacccggggggtggcggaggcccccagctcaccgtgccccccaacctgctaccgcagacgctgcttaacggcccggccagcgctgcggtactccccccaccccctccccacgccctgggcagccgtgggcccccgacgcctgctcccccaggggctcctgggggccccgcttgtctcgggggtaccccgggtgtatcggccacgtcgtcctccgcgtcgtcttcgacctcttcgtcggtggcagaggtgggcgtgggtgctggtggtaagaggcccggctcggtgtcgagcacagaccaggagcgcgagttgaaggagaagcagcgcaacgccgaggccctggccgagctgagcgagagcctgcgcaaccgcgccgaggagtgggccagcaagcccaagatggtccgcgacacgctgctcacgctggcaggctgcacgccctacgaggttcgcttcaagaaggaccactcgctgctgggccgcgttttcgccttcgacgccgtctccaagcccggcatggactacgaattgaagctgttcattgagtaccccacgggctcgggcaacgtgtactccagtgcatctggtgtggccaagcagatgtatcaggactgcatgaaggacttcggccggggcctatcctcgggtttcaagtacctggagtacgaaaagaagcacggctccggggactggcgcctgcttggagacctgctccccgaagccgtgcgcttcttcaaggagggcgtgcccggcgccgacatgctgccccagccctacctggacgccagctgtcccatgctgcccactgctctggtgagtctgagccgcgcccccagcgcacccccggggaccggggccttgccgcccgccgcgccgtcgggccggggcgcagccgccagcctgcgcaagagaaaggcctctccggagcccccggactcagccgagggcgcgctgaagctgggcgaggaacagcagaggcagcagtggatggcgaaccagagcgaggcgctgaagctcaccatgtccgccgggggcttcgcggcgccggggcacgcggcggggggtccgcctccgccgcccccacctctgggaccccattccaaccggaccaccccacctgagtcagccccccagaacggtccgtcccctatggccgctctcatgtcggtggcagatactctgggcacagcgcactcgcccaaggatggcagttccgtgcactctaccactgcgtcggcgcggcgaaacagcagcagcccagtctcgccggcctccgtgccggggcagcgccgcttggcatcacgtaacggggacctgaatttacaggtggcgcccccgccgcctagcgcccacccgggcatggaccaagtgcacccccaaaacattccggattcccccatggccaacagcggacccctctgctgcaccatttgccacgaacgtttggaggatacgcatttcgttcagtgcccttccgtccccagccacaaattttgcttcccttgctctagagagagtatcaaggcccagggggccaccggcgaggtgtattgccccagcggagagaaatgccccctagtcgggtcgaatgtaccttgggccttcatgcagggcgaaatcgcgactatcttagctggggatgttaaagtgaaaaaggagagagacccttgaaccactgggcagccacctcctttgccctagaccagctcctctccaatcctgagggcccctcccccaacccaactcgaccctccctcccctcacccccaaggtgtagaattgtgaatataacgaaactgcaaaaagttagtcttatgtatagacattattttcgtcgtatgtttctatattttgaaacaaaggtatgtaacttcttcatttgaaggataagctggtttgtgttaagcagtatagtattggttgggtcatttgcatcatatcgttagcatttatttggtggcagaatgtttgcctaggtacagaattaatagcccttagcaacgactgctgctggtgtgtatttttgtaaatgttatgcactctctgaaaggaaaaacacacacaaaagaaaaagacttttttttttttttttttttttgccaaggccagtgttgctgcctaaaaaaaaaaaaaaaaaaaaaaaaaaaaaatgctataaaatggtgaaagcttccttctaaactgccccaagtgttgaagtcttcactttattttgttctgttttgttttgtttttctgttttgtttgcaaaatggtaagggggtgtcgggggggatggggtgtattttgttgcaagtttgtgaggggaaaatgttttggtttgtttctactgacctgaatgtgttggatctacacgtgttgttttgtttttgctttattgatgcacggatgcttttgaacagtagagcgaaatgctagacatggagaatctgctctgtttgtcctttatacatttctgtagttaacagaacactgtaatgtgccttggagcttagtaacttgtaataaattcaattgatattaaaaaaaaaa

SEQ ID NO: 331076 - DNA, 2355 bp, Homo sapiens
tcagggccggaatcgggtggtggtgtggtgtggtatcatgcctgtatccagcactttggatcactggaggtgggcgtgggtgctggtggtaagaggcccggctcggtgtcgagcacagaccaggagcgcgagttgaaggagaagcagcgcaacgccgaggccctggccgagctgagcgagagcctgcgcaaccgcgccgaggagtgggccagcaagcccaagatggtccgcgacacgctgctcacgctggcaggctgcacgccctacgaggttcgcttcaagaaggaccactcgctgctgggccgcgttttcgccttcgacgccgtctccaagcccggcatggactacgaattgaagctgttcattgagtaccccacgggctcgggcaacgtgtactccagtgcatctggtgtggccaagcagatgtatcaggactgcatgaaggacttcggccggggcctatcctcgggtttcaagtacctggagtacgaaaagaagcacggctccggggactggcgcctgcttggagacctgctccccgaagccgtgcgcttcttcaaggagggcgtgcccggcgccgacatgctgccccagccctacctggacgccagctgtcccatgctgcccactgctctggtgagtctgagccgcgcccccagcgcacccccggggaccggggccttgccgcccgccgcgccgtcgggccggggcgcagccgccagcctgcgcaagagaaaggcctctccggagcccccggactcagccgagggcgcgctgaagctgggcgaggaacagcagaggcagcagtggatggcgaaccagagcgaggcgctgaagctcaccatgtccgccgggggcttcgcggcgccggggcacgcggcggggggtccgcctccgccgcccccacctctgggaccccattccaaccggaccaccccacctgagtcagccccccagaacggtccgtcccctatggccgctctcatgtcggtggcagatactctgggcacagcgcactcgcccaaggatggcagttccgtgcactctaccactgcgtcggcgcggcgaaacagcagcagcccagtctcgccggcctccgtgccggggcagcgccgcttggcatcacgtaacggggacctgaatttacaggtggcgcccccgccgcctagcgcccacccgggcatggaccaagtgcacccccaaaacattccggattcccccatggccaacagcggacccctctgctgcaccatttgccacgaacgtttggaggatacgcatttcgttcagtgcccttccgtccccagccacaaattttgcttcccttgctctagagagagtatcaaggcccagggggccaccggcgaggtgtattgccccagcggagagaaatgccccctagtcgggtcgaatgtaccttgggccttcatgcagggcgaaatcgcgactatcttagctggggatgttaaagtgaaaaaggagagagacccttgaaccactgggcagccacctcctttgccctagaccagctcctctccaatcctgagggcccctcccccaacccaactcgaccctccctcccctcacccccaaggtgtagaattgtgaatataacgaaactgcaaaaagttagtcttatgtatagacattattttcgtcgtatgtttctatattttgaaacaaaggtatgtaacttcttcatttgaaggataagctggtttgtgttaagcagtatagtattggttgggtcatttgcatcatatcgttagcatttatttggtggcagaatgtttgcctaggtacagaattaatagcccttagcaacgactgctgctggtgtgtatttttgtaaatgttatgcactctctgaaaggaaaaacacacacaaaagaaaaagacttttttttttttttttttttttgccaaggccagtgttgctgcctaaaaaaaaaaaaaaaaaaaaaaaaaaaaaatgctataaaatggtgaaagcttccttctaaactgccccaagtgttgaagtcttcactttattttgttctgttttgttttgtttttctgttttgtttgcaaaatggtaagggggtgtcgggggggatggggtgtattttgttgcaagtttgtgaggggaaaatgttttggtttgtttctactgacctgaatgtgttggatctacacgtgttgttttgtttttgctttattgatgcacggatgcttttgaacagtagagcgaaatgctagacatggagaatctgctctgtttgtcctttatacatttctgtagttaacagaacactgtaatgtgccttggagcttagtaacttgtaataaattcaattgatattaaaaaaaaaa

SEQ ID NO: 331077 - DNA, 2927 bp, Homo sapiens
tggtgtggtgcggcgaacctggcttacgcgttttcctgagccggcagatagtagtcctcctgtagtgcaccccgcttggctccacattgctcccgggctcagcgtgacaccacgcgtatggggacggagcccgagccccgagtagggccggctgggaggaatctgggcgtcctgccgcgcatgcgccttgcctgagcaacaagtgggctccacagaggaagtgtaaaggggagggggaagaactggtgcagagcatggcggtgacgtcagcgctccgcccgggcggcatcccgcgcggccaagccggggacagcgcgagccgcagccggagcaggagcgccgagacgcgcctccggaacgtagagtaacaatcacaaccccacattccgggcgagcgtgagcacgagcgggaagggatgcgacccgggccgaggcgccgcgcgagcgccctgcagccaacgtgagcgccgccagccgcggcggcccgggcgccggccaggcctgggggcggcgggagcctgcgtgcgtgcactcctctcctctgctctcgtgcgtcctggaagcagtggccgcggcggctccctccggggtgcaaacccagtcgccgccagcagaacggccgacgctgcggaggggagaaggtcctttctcggctgccaccccctcccccggtcctccggggaagcagcggcttcagcaagattggacccgggcaccgggtggcactgaaccctctggccctcgccccagggggcccgtcggggagaggacgcagctcgtaggggggtccccggggagaggaagagacagcccctttcgagcttccacgcaccagccactccggggagggggccaagaggcaacggcggccaccaccgggcaccctcgccccctcccctcgggccgggagcttccagcccaagtctgcagcaccaggaagaaggcgcctgagctcccctcgcgacgagtcaaccgcagtaggaggtgggggcgaagagagggctgaacccgtccgctgcccgggcggtggagcccccacggcgaggcgctgcgccggcggtggagactcgcgttccctccagcccctggggcagaactttctcgccccccctcctccctcccccgcagtcggactccctccccagccggccagtcctcccggaggagaaggcgccgcggagacagcccgggcgggggcctaccttccccagggcaggcatcatgtcggcggcgcaggtgtcctcgtcccggagacaatcttgctacctgtgcgacctgccccgcatgccctgggccatgatctgggacttctcggaacccgtatgccgcggttgcgtcaactacgagggcgctgatcgcatcgaattcgtgatcgagacagcgcgccagctgaagcgggcgcacggctgcttccaggacggccgctcccccgggccgccgccgccgcgcaacagcaacagcaacagcagcagcagcagcagcagcaacagcagcagcagcagcagcagcagcaacaacagctcaaccacgttgatggttccagcaagcctgcggtgctggcggccccgtctggcctggagcgctacggcctaagcgctgccgccgccgccgccgccgccgccgccgctgcggtggaacagcgcagccgcttcgagtacccgccggcctccgtgccggggcagcgccgcttggcatcacgtaacggggacctgaatttacaggtggcgcccccgccgcctagcgcccacccgggcatggaccaagtgcacccccaaaacattccggattcccccatggccaacagcggacccctctgctgcaccatttgccacgaacgtttggaggatacgcatttcgttcagtgcccttccgtccccagccacaaattttgcttcccttgctctagagagagtatcaaggcccagggggccaccggcgaggtgtattgccccagcggagagaaatgccccctagtcgggtcgaatgtaccttgggccttcatgcagggcgaaatcgcgactatcttagctggggatgttaaagtgaaaaaggagagagacccttgaaccactgggcagccacctcctttgccctagaccagctcctctccaatcctgagggcccctcccccaacccaactcgaccctccctcccctcacccccaaggtgtagaattgtgaatataacgaaactgcaaaaagttagtcttatgtatagacattattttcgtcgtatgtttctatattttgaaacaaaggtatgtaacttcttcatttgaaggataagctggtttgtgttaagcagtatagtattggttgggtcatttgcatcatatcgttagcatttatttggtggcagaatgtttgcctaggtacagaattaatagcccttagcaacgactgctgctggtgtgtatttttgtaaatgttatgcactctctgaaaggaaaaacacacacaaaagaaaaagacttttttttttttttttttttttgccaaggccagtgttgctgcctaaaaaaaaaaaaaaaaaaaaaaaaaaaaaatgctataaaatggtgaaagcttccttctaaactgccccaagtgttgaagtcttcactttattttgttctgttttgttttgtttttctgttttgtttgcaaaatggtaagggggtgtcgggggggatggggtgtattttgttgcaagtttgtgaggggaaaatgttttggtttgtttctactgacctgaatgtgttggatctacacgtgttgttttgtttttgctttattgatgcacggatgcttttgaacagtagagcgaaatgctagacatggagaatctgctctgtttgtcctttatacatttctgtagttaacagaacactgtaatgtgccttggagcttagtaacttgtaataaattcaattgatattaaaaaaaaaa

SEQ ID NO: 331078 - DNA, 4003 bp, Homo sapiens
tggtgtggtgcggcgaacctggcttacgcgttttcctgagccggcagatagtagtcctcctgtagtgcaccccgcttggctccacattgctcccgggctcagcgtgacaccacgcgtatggggacggagcccgagccccgagtagggccggctgggaggaatctgggcgtcctgccgcgcatgcgccttgcctgagcaacaagtgggctccacagaggaagtgtaaaggggagggggaagaactggtgcagagcatggcggtgacgtcagcgctccgcccgggcggcatcccgcgcggccaagccggggacagcgcgagccgcagccggagcaggagcgccgagacgcgcctccggaacgtagagtaacaatcacaaccccacattccgggcgagcgtgagcacgagcgggaagggatgcgacccgggccgaggcgccgcgcgagcgccctgcagccaacgtgagcgccgccagccgcggcggcccgggcgccggccaggcctgggggcggcgggagcctgcgtgcgtgcactcctctcctctgctctcgtgcgtcctggaagcagtggccgcggcggctccctccggggtgcaaacccagtcgccgccagcagaacggccgacgctgcggaggggagaaggtcctttctcggctgccaccccctcccccggtcctccggggaagcagcggcttcagcaagattggacccgggcaccgggtggcactgaaccctctggccctcgccccagggggcccgtcggggagaggacgcagctcgtaggggggtccccggggagaggaagagacagcccctttcgagcttccacgcaccagccactccggggagggggccaagaggcaacggcggccaccaccgggcaccctcgccccctcccctcgggccgggagcttccagcccaagtctgcagcaccaggaagaaggcgcctgagctcccctcgcgacgagtcaaccgcagtaggaggtgggggcgaagagagggctgaacccgtccgctgcccgggcggtggagcccccacggcgaggcgctgcgccggcggtggagactcgcgttccctccagcccctggggcagaactttctcgccccccctcctccctcccccgcagtcggactccctccccagccggccagtcctcccggaggagaaggcgccgcggagacagcccgggcgggggcctaccttccccagggcaggcatcatgtcggcggcgcaggtgtcctcgtcccggagacaatcttgctacctgtgcgacctgccccgcatgccctgggccatgatctgggacttctcggaacccgtatgccgcggttgcgtcaactacgagggcgctgatcgcatcgaattcgtgatcgagacagcgcgccagctgaagcgggcgcacggctgcttccaggacggccgctcccccgggccgccgccgccgcgcaacagcaacagcaacagcagcagcagcagcagcagcaacagcagcagcagcagcagcagcagcaacaacagctcaaccacgttgatggttccagcaagcctgcggtgctggcggccccgtctggcctggagcgctacggcctaagcgctgccgccgccgccgccgccgccgccgccgctgcggtggaacagcgcagccgcttcgagtacccgccaccgccggtgagcctgggaagcagcagccacaccgcgcgactgcccaacggcctggggggcccaaacggcttccccaaaccaacaccagaggagggacccccagagctgaaccgtcagagccccaattcttcttcagcggcggcgtcggtggcgtctcggcgtggaacgcacggtgggctggttacggggctgcccaacccggggggtggcggaggcccccagctcaccgtgccccccaacctgctaccgcagacgctgcttaacggcccggccagcgctgcggtactccccccaccccctccccacgccctgggcagccgtgggcccccgacgcctgctcccccaggggctcctgggggccccgcttgtctcgggggtaccccgggtgtatcggccacgtcgtcctccgcgtcgtcttcgacctcttcgtcggtggcagaggtgggcgtgggtgctggtggtaagaggcccggctcggtgtcgagcacagaccaggagcgcgagttgaaggagaagcagcgcaacgccgaggccctggccgagctgagcgagagcctgcgcaaccgcgccgaggagtgggccagcaagcccaagatggtccgcgacacgctgctcacgctggcaggctgcacgccctacgaggttcgcttcaagaaggaccactcgctgctgggccgcgttttcgccttcgacgccgtctccaagcccggcatggactacgaattgaagctgttcattgagtaccccacgggctcgggcaacgtgtactccagtgcatctggtgtggccaagcagatgtatcaggactgcatgaaggacttcggccggggcctatcctcgggtttcaagtacctggagtacgaaaagaagcacggctccggggactggcgcctgcttggagacctgctccccgaagccgtgcgcttcttcaaggagggcgtgcccggcgccgacatgctgccccagccctacctggacgccagctgtcccatgctgcccactgctctggtgagtctgagccgcgcccccagcgcacccccggggaccggggccttgccgcccgccgcgccgtcgggccggggcgcagccgccagcctgcgcaagagaaaggcctctccggagcccccggactcagccgagggcgcgctgaagctgggcgaggaacagcagaggcagcagtggatggcgaaccagagcgaggcgctgaagctcaccatgtccgccgggggcttcgcggcgccggggcacgcggcggggggtccgcctccgccgcccccacctctgggaccccattccaaccggaccaccccacctgagtcagccccccagaacggtccgtcccctatggccgctctcatgtcggtggcagatactctgggcacagcgcactcgcccaaggatggcagttccgtgcactctaccactgcgtcggcgcggcgaaacagcagcagcccagtctcgccggcctccgtgccggggcagcgccgcttggcatcacgtaacggggacctgaatttacaggtggcgcccccgccgcctagcgcccacccgggcatggaccaagtgcacccccaaaacattccggattcccccatggccaacagcggacccctctgctgcaccatttgccacgaacgtttggaggatacgcatttcgttcagtgcccttccgtccccagccacaaattttgcttcccttgctctagagagagtatcaaggcccagggggccaccggcgaggtgtattgccccagcggagagaaatgccccctagtcgggtcgaatgtaccttgggccttcatgcagggcgaaatcgcgactatcttagctggggatgttaaagtgaaaaaggagagagacccttgaaccactgggcagccacctcctttgccctagaccagctcctctccaatcctgagggcccctcccccaacccaactcgaccctccctcccctcacccccaaggtgtagaattgtgaatataacgaaactgcaaaaagttagtcttatgtatagacattattttcgtcgtatgtttctatattttgaaacaaaggtatgtaacttcttcatttgaaggataagctggtttgtgttaagcagtatagtattggttgggtcatttgcatcatatcgttagcatttatttggtggcagaatgtttgcctaggtacagaattaatagcccttagcaacgactgctgctggtgtgtatttttgtaaatgttatgcactctctgaaaggaaaaacacacacaaaagaaaaagactttttttttttttttttttttttttttttttttttttttttttttttttttttttttttttttttttt

SEQ ID NO: 331079 - DNA, 4411 bp, Homo sapiens
ggttcttaaatgcgtttttacttgggaatgccgggcagggaaaggaaaggtcatcgtctgtttaatttccacccccagctctggacttccagcattagctcgccgggcctcagctgttgtacacacacggcgaggggggaggggagggcggaggcgcggaggaggggccggctgggaggaatctgggcgtcctgccgcgcatgcgccttgcctgagcaacaagtgggctccacagaggaagtgtaaaggggagggggaagaactggtgcagagcatggcggtgacgtcagcgctccgcccgggcggcatcccgcgcggccaagccggggacagcgcgagccgcagccggagcaggagcgccgagacgcgcctccggaacgtagagtaacaatcacaaccccacattccgggcgagcgtgagcacgagcgggaagggatgcgacccgggccgaggcgccgcgcgagcgccctgcagccaacgtgagcgccgccagccgcggcggcccgggcgccggccaggcctgggggcggcgggagcctgcgtgcgtgcactcctctcctctgctctcgtgcgtcctggaagcagtggccgcggcggctccctccggggtgcaaacccagtcgccgccagcagaacggccgacgctgcggaggggagaaggtcctttctcggctgccaccccctcccccggtcctccggggaagcagcggcttcagcaagattggacccgggcaccgggtggcactgaaccctctggccctcgccccagggggcccgtcggggagaggacgcagctcgtaggggggtccccggggagaggaagagacagcccctttcgagcttccacgcaccagccactccggggagggggccaagaggcaacggcggccaccaccgggcaccctcgccccctcccctcgggccgggagcttccagcccaagtctgcagcaccaggaagaaggcgcctgagctcccctcgcgacgagtcaaccgcagtaggaggtgggggcgaagagagggctgaacccgtccgctgcccgggcggtggagcccccacggcgaggcgctgcgccggcggtggagactcgcgttccctccagcccctggggcagaactttctcgccccccctcctccctcccccgcagtcggactccctccccagccggccagtcctcccggaggagaaggcgccgcggagacagcccgggcgggggcctaccttccccagggcaggcatcatgtcggcggcgcaggtgtcctcgtcccggagacaatcttgctacctgtgcgacctgccccgcatgccctgggccatgatctgggacttctcggaacccgtatgccgcggttgcgtcaactacgagggcgctgatcgcatcgaattcgtgatcgagacagcgcgccagctgaagcgggcgcacggctgcttccaggacggccgctcccccgggccgccgccgccgcgcaacagcaacagcaacagcagcagcagcagcagcagcaacagcagcagcagcagcagcagcagcaacaacagctcaaccacgttgatggttccagcaagcctgcggtgctggcggccccgtctggcctggagcgctacggcctaagcgctgccgccgccgccgccgccgccgccgccgctgcggtggaacagcgcagccgcttcgagtacccgccaccgccggtgagcctgggaagcagcagccacaccgcgcgactgcccaacggcctggggggcccaaacggcttccccaaaccaacaccagaggagggacccccagagctgaaccgtcagagccccaattcttcttcagcggcggcgtcggtggcgtctcggcgtggaacgcacggtgggctggttacggggctgcccaacccggggggtggcggaggcccccagctcaccgtgccccccaacctgctaccgcagacgctgcttaacggcccggccagcgctgcggtactccccccaccccctccccacgccctgggcagccgtgggcccccgacgcctgctcccccaggggctcctgggggccccgcttgtctcgggggtaccccgggtgtatcggccacgtcgtcctccgcgtcgtcttcgacctcttcgtcggtggcagaggtgggcgtgggtgctggtggtaagaggcccggctcggtgtcgagcacagaccaggagcgcgagttgaaggagaagcagcgcaacgccgaggccctggccgagctgagcgagagcctgcgcaaccgcgccgaggagtgggccagcaagcccaagatggtccgcgacacgctgctcacgctggcaggctgcacgccctacgaggttcgcttcaagaaggaccactcgctgctgggccgcgttttcgccttcgacgccgtctccaagcccggcatggactacgaattgaagctgttcattgagtaccccacgggctcgggcaacgtgtactccagtgcatctggtgtggccaagcagatgtatcaggactgcatgaaggacttcggccggggcctatcctcgggtttcaagtacctggagtacgaaaagaagcacggctccggggactggcgcctgcttggagacctgctccccgaagccgtgcgcttcttcaaggagggcgtgcccggcgccgacatgctgccccagccctacctggacgccagctgtcccatgctgcccactgctctggtgagtctgagccgcgcccccagcgcacccccggggaccggggccttgccgcccgccgcgccgtcgggccggggcgcagccgccagcctgcgcaagagaaaggcctctccggagcccccggactcagccgagggcgcgctgaagctgggcgaggaacagcagaggcagcagtggatggcgaaccagagcgaggcgctgaagctcaccatgtccgccgggggcttcgcggcgccggggcacgcggcggggggtccgcctccgccgcccccacctctgggaccccattccaaccggaccaccccacctgagtcagccccccagaacggtccgtcccctatggccgctctcatgtcggtggcagatactctgggcacagcgcactcgcccaaggatggcagttccgtgcactctaccactgcgtcggcgcggcgaaacagcagcagcccagtctcgccggcctccgtgccggggcagcgccgcttggcatcacgtaacggggacctgaatttacaggtggcgcccccgccgcctagcgcccacccgggcatggaccaagtgcacccccaaaacattccggattcccccatggccaacagcggacccctctgctgcaccatttgccacgaacgtttggaggatacgcatttcgttcagtgcccttccgtccccagccacaaattttgcttcccttgctctagagagagtatcaaggcccagggggccaccggcgaggtgtattgccccagcggagagaaatgccccctagtcgggtcgaatgtaccttgggccttcatgcagggcgaaatcgcgactatcttagctggggatgttaaagtgaaaaaggagagagacccttgaaccactgggcagccacctcctttgccctagaccagctcctctccaatcctgagggcccctcccccaacccaactcgaccctccctcccctcacccccaaggtgtagaattgtgaatataacgaaactgcaaaaagttagtcttatgtatagacattattttcgtcgtatgtttctatattttgaaacaaaggtatgtaacttcttcatttgaaggataagctggtttgtgttaagcagtatagtattggttgggtcatttgcatcatatcgttagcatttatttggtggcagaatgtttgcctaggtacagaattaatagcccttagcaacgactgctgctggtgtgtatttttgtaaatgttatgcactctctgaaaggaaaaacacacacaaaagaaaaagacttttttttttttttttttttttgccaaggccagtgttgctgcctaaaaaaaaaaaaaaaaaaaaaaaaaaaaaatgctataaaatggtgaaagcttccttctaaactgccccaagtgttgaagtcttcactttattttgttctgttttgttttgtttttctgttttgtttgcaaaatggtaagggggtgtcgggggggatggggtgtattttgttgcaagtttgtgaggggaaaatgttttggtttgtttctactgacctgaatgtgttggatctacacgtgttgttttgtttttgctttattgatgcacggatgcttttgaacagtagagcgaaatgctagacatggagaatctgctctgtttgtcctttatacatttctgtagttaacagaacactgtaatgtgccttggagcttagtaacttgtaataaattcaattgatattaaaaaaaaaa

SEQ ID NO: 331080 - DNA, 4342 bp, Homo sapiens
  misc_feature (4147)..(4147): n is a, c, g, or t
  misc_feature (4150)..(4150): n is a, c, g, or t
  misc_feature (4154)..(4154): n is a, c, g, or t
  misc_feature (4157)..(4157): n is a, c, g, or t
  misc_feature (4194)..(4194): n is a, c, g, or t
  misc_feature (4198)..(4198): n is a, c, g, or t
  misc_feature (4277)..(4277): n is a, c, g, or t
  misc_feature (4301)..(4301): n is a, c, g, or t
tggtgtggtgcggcgaacctggcttacgcgttttcctgagccggcagatagtagtcctcctgtagtgcaccccgcttggctccacattgctcccgggctcagcgtgacaccacgcgtatggggacggagcccgagccccgagtagggccggctgggaggaatctgggcgtcctgccgcgcatgcgccttgcctgagcaacaagtgggctccacagaggaagtgtaaaggggagggggaagaactggtgcagagcatggcggtgacgtcagcgctccgcccgggcggcatcccgcgcggccaagccggggacagcgcgagccgcagccggagcaggagcgccgagacgcgcctccggaacgtagagtaacaatcacaaccccacattccgggcgagcgtgagcacgagcgggaagggatgcgacccgggccgaggcgccgcgcgagcgccctgcagccaacgtgagcgccgccagccgcggcggcccgggcgccggccaggcctgggggcggcgggagcctgcgtgcgtgcactcctctcctctgctctcgtgcgtcctggaagcagtggccgcggcggctccctccggggtgcaaacccagtcgccgccagcagaacggccgacgctgcggaggggagaaggtcctttctcggctgccaccccctcccccggtcctccggggaagcagcggcttcagcaagattggacccgggcaccgggtggcactgaaccctctggccctcgccccagggggcccgtcggggagaggacgcagctcgtaggggggtccccggggagaggaagagacagcccctttcgagcttccacgcaccagccactccggggagggggccaagaggcaacggcggccaccaccgggcaccctcgccccctcccctcgggccgggagcttccagcccaagtctgcagcaccaggaagaaggcgcctgagctcccctcgcgacgagtcaaccgcagtaggaggtgggggcgaagagagggctgaacccgtccgctgcccgggcggtggagcccccacggcgaggcgctgcgccggcggtggagactcgcgttccctccagcccctggggcagaactttctcgccccccctcctccctcccccgcagtcggactccctccccagccggccagtcctcccggaggagaaggcgccgcggagacagcccgggcgggggcctaccttccccagggcaggcatcatgtcggcggcgcaggtgtcctcgtcccggagacaatcttgctacctgtgcgacctgccccgcatgccctgggccatgatctgggacttctcggaacccgtatgccgcggttgcgtcaactacgagggcgctgatcgcatcgaattcgtgatcgagacagcgcgccagctgaagcgggcgcacggctgcttccaggacggccgctcccccgggccgccgccgccgcgcaacagcaacagcaacagcagcagcagcagcagcagcaacagcagcagcagcagcagcagcagcaacaacagctcaaccacgttgatggttccagcaagcctgcggtgctggcggccccgtctggcctggagcgctacggcctaagcgctgccgccgccgccgccgccgccgccgccgctgcggtggaacagcgcagccgcttcgagtacccgccaccgccggtgagcctgggaagcagcagccacaccgcgcgactgcccaacggcctggggggcccaaacggcttccccaaaccaacaccagaggagggacccccagagctgaaccgtcagagccccaattcttcttcagcggcggcgtcggtggcgtctcggcgtggaacgcacggtgggctggttacggggctgcccaacccggggggtggcggaggcccccagctcaccgtgccccccaacctgctaccgcagacgctgcttaacggcccggccagcgctgcggtactccccccaccccctccccacgccctgggcagccgtgggcccccgacgcctgctcccccaggggctcctgggggccccgcttgtctcgggggtaccccgggtgtatcggccacgtcgtcctccgcgtcgtcttcgacctcttcgtcggtggcagaggtgggcgtgggtgctggtggtaagaggcccggctcggtgtcgagcacagaccaggagcgcgagttgaaggagaagcagcgcaacgccgaggccctggccgagctgagcgagagcctgcgcaaccgcgccgaggagtgggccagcaagcccaagatggtccgcgacacgctgctcacgctggcaggctgcacgccctacgaggttcgcttcaagaaggaccactcgctgctgggccgcgttttcgccttcgacgccgtctccaagcccggcatggactacgaattgaagctgttcattgagtaccccacgggctcgggcaacgtgtactccagtgcatctggtgtggccaagcagatgtatcaggactgcatgaaggacttcggccggggcctatcctcgggtttcaagtacctggagtacgaaaagaagcacggctccggggactggcgcctgcttggagacctgctccccgaagccgtgcgcttcttcaaggagggcgtgcccggcgccgacatgctgccccagccctacctggacgccagctgtcccatgctgcccactgctctggtgagtctgagccgcgcccccagcgcacccccggggaccggggccttgccgcccgccgcgccgtcgggccggggcgcagccgccagcctgcgcaagagaaaggcctctccggagcccccggactcagccgagggcgcgctgaagctgggcgaggaacagcagaggcagcagtggatggcgaaccagagcgaggcgctgaagctcaccatgtccgccgggggcttcgcggcgccggggcacgcggcggggggtccgcctccgccgcccccacctctgggaccccattccaaccggaccaccccacctgagtcagccccccagaacggtccgtcccctatggccgctctcatgtcggtggcagatactctgggcacagcgcactcgcccaaggatggcagttccgtgcactctaccactgcgtcggcgcggcgaaacagcagcagcccagtctcgccggcctccgtgccggggcagcgccgcttggcatcacgtaacggggacctgaatttacaggtggcgcccccgccgcctagcgcccacccgggcatggaccaagtgcacccccaaaacattccggattcccccatggccaacagcggacccctctgctgcaccatttgccacgaacgtttggaggatacgcatttcgttcagtgcccttccgtccccagccacaaattttgcttcccttgctctagagagagtatcaaggcccagggggccaccggcgaggtgtattgccccagcggagagaaatgccccctagtcgggtcgaatgtaccttgggccttcatgcagggcgaaatcgcgactatcttagctggggatgttaaagtgaaaaaggagagagacccttgaaccactgggcagccacctcctttgccctagaccagctcctctccaatcctgagggcccctcccccaacccaactcgaccctccctcccctcacccccaaggtgtagaattgtgaatataacgaaactgcaaaaagttagtcttatgtatagacattattttcgtcgtatgtttctatattttgaaacaaaggtatgtaacttcttcatttgaaggataagctggtttgtgttaagcagtatagtattggttgggtcatttgcatcatatcgttagcatttatttggtggcagaatgtttgcctaggtacagaattaatagcccttagcaacgactgctgctggtgtgtatttttgtaaatgttatgcactctctgaaaggaaaaacacacacaaaagaaaaagacttttttttttttttttttttttgccaaggccagtgttgctgcctaaaaaaaaaaaaaaaaaaaaaaaaaaaaaatgctataaaatggtgaaagcttccttctaaactgccccaagtgttgaagtcttcactttattttgttctgttttgttttgtttttctgttttgtttgcaaaatggtaagggggtgtcgggggggatggggtgtatttnctncccnccntcccctgccccccggtttctctccccccttctccccncccntcccctccccccccctctccctctctccttccctcccccccccacctcccccccccttctcttctctctcccccttctnccccctcccctctcccccctttcncccctcccccttccccccctcccccccctctcccccccccc

SEQ ID NO: 331081 - DNA, 1495 bp, Homo sapiens
tggtgtggtgcggcgaacctggcttacgcgttttcctgagccggcagatagtagtcctcctgtagtgcaccccgcttggctccacattgctcccgggctcagcgtgacaccacgcgtatggggacggagcccgagccccgagtagggccggctgggaggaatctgggcgtcctgccgcgcatgcgccttgcctgagcaacaagtgggctccacagaggaagtgtaaaggggagggggaagaactggtgcagagcatggcggtgacgtcagcgctccgcccgggcggcatcccgcgcggccaagccggggacagcgcgagccgcagccggagcaggagcgccgagacgcgcctccggaacgtagagtaacaatcacaaccccacattccgggcgagcgtgagcacgagcgggaagggatgcgacccgggccgaggcgccgcgcgagcgccctgcagccaacgtgagcgccgccagccgcggcggcccgggcgccggccaggcctgggggcggcgggagcctgcgtgcgtgcactcctctcctctgctctcgtgcgtcctggaagcagtggccgcggcggctccctccggggtgcaaacccagtcgccgccagcagaacggccgacgctgcggaggggagaaggtcctttctcggctgccaccccctcccccggtcctccggggaagcagcggcttcagcaagattggacccgggcaccgggtggcactgaaccctctggccctcgccccagggggcccgtcggggagaggacgcagctcgtaggggggtccccggggagaggaagagacagcccctttcgagcttccacgcaccagccactccggggagggggccaagaggcaacggcggccaccaccgggcaccctcgccccctcccctcgggccgggagcttccagcccaagtctgcagcaccaggaagaaggcgcctgagctcccctcgcgacgagtcaaccgcagtaggaggtgggggcgaagagagggctgaacccgtccgctgcccgggcggtggagcccccacggcgaggcgctgcgccggcggtggagactcgcgttccctccagcccctggggcagaactttctcgccccccctcctccctcccccgcagtcggactccctccccagccggccagtcctcccggaggagaaggcgccgcggagacagcccgggcgggggcctaccttccccagggcaggcatcatgtcggcggcgcaggtgtcctcgtcccggagacaatcttgctacctgtgcgacctgccccgcatgccctgggccatgatctgggacttctcggaacccgtatgccgcggttgcgtcaactacgagggcgctgatcgcatcgaattcgtgatcgagacagcgcgccagctgaagcgggcgcacggctgcttccaggacggccgctcccccgggccgccgccgccgtcggggtcaagacagtggccctgtcggctaaggaagcggcggcggcggc

SEQ ID NO: 331082 - DNA, 2714 bp, Homo sapiens
ctccctcctccctctctccctccctctggcgtctccagccgactttcgcttcccgtcagcagcctttggcggaagagtgtcccgcctcttccgctctacagcggaggtggctgtggcggtggcgctggtggctgcggcggcggcggcggcagcggcgctcgagcggttcctgtcagggtcagccggcgggccccctgggtggtccacctgcaaatcgcggagcggcgccccagggatcgatggcgatgaactataacgcgaaggatgaagtggacggtgggcccccgtgtgctccggggggcaccgcgaagactcggagaccggataacacggccttcaaacagcaacggctgccagcttggcagcccatccttacggctggcacggtgctacctattttcttcatcatcggtctcatcttcattcccatcggcattggcatttttgtcacctccaacaacatccgcgagatcgagggcaacgtgtttatgtattatggactgtctaatttctatcaaaaccatcgtcgttacgtgaaatctcgagatgatagtcaactaaatggagattctagtgctttgcttaatcccagtaaggaatgtgaaccttatcgaagaaatgaagacaaaccaattgctccttgtggagctattgccaacagcatgtttaatgatacattagaattgtttctcattggcaatgattcttatcctatacctatcgctttgaaaaagaaaggtattgcttggtggacagataaaaatgtgaaattcagaaatccccctggaggagacaacctggaagaacgatttaaaggtacaacaaagcctgtgaactggcttaaaccagtttacatgctggattctgacccagataataatggattcataaatgaggattttattgtttggatgcgtactgcagcattacctacttttcgcaagttgtatcgtcttatagaaaggaaaagtgatttacatccaacattaccagctggccgatactctttgaatgtcacatacaattaccctgtacattattttgatggacgaaaacggatgatcttgagcactatttcatggatgggaggaaaaaatccatttttggggattgcttacatcgctgttggatccatctccttccttctgggagttgtactgctagtaattaatcataaatatagaaacagtagtaatacagctgacattaccatttaattttatattatgaaagcaaatcatctgcatgtgcatcaaggccagtcctattcaacctagctttcgaatgctgatatctggttagtatgtcattttgaagttggcacataacttttctaaaaaaaagcagtctttgttgtttgcttcttccctacggatgacttctaaaaatatatgacgggtataaaaaaattagctatattgatcatatcaacactgtaactgctgaaatggcattctaatgtttgctttttattcggacaggccacatgatgcatagagcctctttcatgtgacttgtgtctactgcttaaatctttatgctgtgttgatgatattatattgacatatgaagctgtatatgtgtatgtattttgtggagaaagggattacaagatgtatgagtataatgacttgctaacctttcaggattcagagaaagatgaagaaagaccatatctaaataatacacttcatcattttcatgtgtataaatgcttaaagtaccatctttgttgaggtggttcatgtatccagtttatccagtacagttatttgtcaagcttagctttgatttcaaaggacacgcttaccttgtctggcataagaattaatgctcatgtctgcagtggttgggtaggtcctgcttaggagaattaaaaaattcctctttccgtttggttgaatgttgcagtcaggaaccccaactcacttggaatgtttttatatgtaatcatttcccttgaagcttatactttataagggaagaaagaattcaggtgatatgggaaaactgcttggcagaccttcatcttctgcctcaactgtaaaccacatgtaaatgcttaatggagactgttttcattcttgtgatatttaacattcagaaaattacttcagctttggaaatactcaggctgtttttattctgcaggtaagtgttttgacttaagtactaatattccagaaatttttgaaagcagtaaccttaatttcctatgtatttcattccacttttgcatataggtcaaatagcaatgtgtatgcacattctctttagttaaggcaccaattgttttggttggttttcctaagacatactttaaaaagatgttctataaatttcctagttaaattatggggattttggagtatgtacatgataaattataatacgtatatggttgaagttattttattttttactaatgaattattttaatattccttattgaataaatgctgtaacttgtttgctatggaacttattcttaaagttctagttaaaaataatttttccacatgcatgaaaatatgtattaatcagaggtggcttaattacattgaaattgcttttttgttgttgtttttttactgaaataactcatgtttgtgtagaagaatgcctgtttactcagagtttatattttccttcagttatattttaaatcaaaaggtctgggtaatgtatacttttgattaatatatacttttttt

SEQ ID NO: 331083 - DNA, 402 bp, Homo sapiens
  misc_feature (385)..(386): n is a, c, g, or t
cctcgcgaacgtgttatcccatccaggttttaacttcttcatgcctggatgggataaaatgtaattcattgttaaattaattcatatttgtatttattaatcactgtgacaacattaaccatttgttcttaccaggaagtggtcagattatcatctgagttacagttagactggctaagtttggtattagatcaaggggaatgtccagtaaacagagaggtaagcatgatggaaataatgaagtggggtacacaggaaaaacctgactagtgaggaggagcagctgagagatagggtcagtgaatgcggttcagcctgctacctctcctgtcttcatagaaccattgccttagaattattgtatgacacgttcgcgagggtaccnnctcgattctatctgtc

SEQ ID NO: 331084 - DNA, 568 bp, Homo sapiens
gtttcagagtgttttaggtatccactttctctaaggaagtgcttagttatatttttctcttgcagattgattataccggaacagagccttccagtccctgtaataaatgtttatctccggatgtgacaccttgcttttgtaccattaacttcacactggaaaagtcatttgaggtctgtgtttccaagtaatgtgctagaaaagccatgctttaaaaaatactgatactgtactaaatgtcttttacaaggtattttccttttatagagaagtctgtataatttactggagtttataggcttttgaggaagatcgttttgtgtgtttggctgttggattttgctgtctggtaattaaatacatttatttgaatggtttagttagtactttgtagacaaaatttaagatattgtattttatcctttcaacagataatgttatgactgtacgaatcaattttttatcaagttttatatacttgtatttttaaaattattgctcaaattgttgtgcatacttacgatactaaagcaagctttactttagaaaataaataattctcccatta

SEQ ID NO: 331085 - DNA, 4503 bp, Homo sapiens
ctccctcctccctctctccctccctctggcgtctccagccgactttcgcttcccgtcagcagcctttggcggaagagtgtcccgcctcttccgctctacagcggaggtggctgtggcggtggcgctggtggctgcggcggcggcggcggcagcggcgctcgagcggttcctgtcagggtcagccggcgggccccctgggtggtccacctgcaaatcgcggagcggcgccccagggatcgatggcgatgaactataacgcgaaggatgaagtggacggtgggcccccgtgtgctccggggggcaccgcgaagactcggagaccggataacacggccttcaaacagcaacggctgccagcttggcagcccatccttacggctggcacggtgctacctattttcttcatcatcggtctcatcttcattcccatcggcattggcatttttgtcacctccaacaacatccgcgagatcgagattgattataccggaacagagccttccagtccctgtaataaatgtttatctccggatgtgacaccttgcttttgtaccattaacttcacactggaaaagtcatttgagggcaacgtgtttatgtattatggactgtctaatttctatcaaaaccatcgtcgttacgtgaaatctcgagatgatagtcaactaaatggagattctagtgctttgcttaatcccagtaaggaatgtgaaccttatcgaagaaatgaagacaaaccaattgctccttgtggagctattgccaacagcatgtttaatgatacattagaattgtttctcattggcaatgattcttatcctatacctatcgctttgaaaaagaaaggtattgcttggtggacagataaaaatgtgaaattcagaaatccccctggaggagacaacctggaagaacgatttaaaggtacaacaaagcctgtgaactggcttaaaccagtttacatgctggattctgacccagataataatggattcataaatgaggattttattgtttggatgcgtactgcagcattacctacttttcgcaagttgtatcgtcttatagaaaggaaaagtgatttacatccaacattaccagctggccgatactctttgaatgtcacatacaattaccctgtacattattttgatggacgaaaacggatgatcttgagcactatttcatggatgggaggaaaaaatccatttttggggattgcttacatcgctgttggatccatctccttccttctgggagttgtactgctagtaattaatcataaatatagaaacagtagtaatacagctgacattaccatttaattttatattatgaaagcaaatcatctgcatgtgcatcaaggccagtcctattcaacctagctttcgaatgctgatatctggttagtatgtcattttgaagttggcacataacttttctaaaaaaaagcagtctttgttgtttgcttcttccctacggatgacttctaaaaatatatgacgggtataaaaaaattagctatattgatcatatcaacactgtaactgctgaaatggcattctaatgtttgctttttattcggacaggccacatgatgcatagagcctctttcatgtgacttgtgtctactgcttaaatctttatgctgtgttgatgatattatattgacatatgaagctgtatatgtgtatgtattttgtggagaaagggattacaagatgtatgagtataatgacttgctaacctttcaggattcagagaaagatgaagaaagaccatatctaaataatacacttcatcattttcatgtgtataaatgcttaaagtaccatctttgttgaggtggttcatgtatccagtttatccagtacagttatttgtcaagcttagctttgatttcaaaggacacgcttaccttgtctggcataagaattaatgctcatgtctgcagtggttgggtaggtcctgcttaggagaattaaaaaattcctctttccgtttggttgaatgttgcagtcaggaaccccaactcacttggaatgtttttatatgtaatcatttcccttgaagcttatactttataagggaagaaagaattcaggtgatatgggaaaactgcttggcagaccttcatcttctgcctcaactgtaaaccacatgtaaatgcttaatggagactgttttcattcttgtgatatttaacattcagaaaattacttcagctttggaaatactcaggctgtttttattctgcaggtaagtgttttgacttaagtactaatattccagaaatttttgaaagcagtaaccttaatttcctatgtatttcattccacttttgcatataggtcaaatagcaatgtgtatgcacattctctttagttaaggcaccaattgttttggttggttttcctaagacatactttaaaaagatgttctataaatttcctagttaaattatggggattttggagtatgtacatgataaattataatacgtatatggttgaagttattttattttttactaatgaattattttaatattccttattgaataaatgctgtaacttgtttgctatggaacttattcttaaagttctagttaaaaataatttttccacatgcatgaaaatatgtattaatcagaggtggcttaattacattgaaattgcttttttgttgttgtttttttactgaaataactcatgtttgtgtagaagaatgcctgtttactcagagtttatattttccttcagttatattttaaatcaaaaggtctgggtaatgtatacttttgattaatatatactttttttaaaaaacaaaaaacaatgtaatggttaatagtagaaatgtgccacacttttcaagttttatataacatatgaaattcagttaaaagaatgtgtgtttcataatgacttttaactggtaaaaatattacttgcacgaagtacttgatgtatggttatcctgaaatttcggagtatttggtgtgttctttgtctaaaaatagtctgttttgtcagtccttcagaatattatttattctgaagattgtccctcttgcacttggcagtttattttcggggatacattgttgggggagaggggtttctgccactctttccagattgagtctgtgctgtttaaggaggactaccatcctgcaactctttttctaattggggcacagaggatgtcgctaaagaaaagttgaagagccctttcagcactttctcatctgtggagaagatggaatcttaaaatacatttggagttttatctgttttacaagtccattgatggcctaagttcctcctgttttctgctgtttgatctctaaggaactcctgttgctaaatatgaagagtatggaacattcatatagtctctgtgaagcatggggggagggaagacatttctttttcttataggctttatgctcaaatgtcatagtctcctttcaaagaattgtgttgcattttaaatgcacccagcttaagtagaagacattgaaggatgcattaattttcaggaactattttgaattatgaaaagattcccaattgaaaaaattattcaacaagtaaaagctaagaaatttcattgaaatcataaggcagtttaagcataaattgataaaaatagctgtgtactactaattaatagaaaatcattcaaccaagagaagagtcaagtgaatatcgtttgtttatttgctagtgagtttctttgtaacgttgattttattaaatgataatatttggttagtatgtcctatgttaataaaaatgaacaaaattaattttgctatgttcaggtgtcttgataaaataacaatgctccagtgttgttgcttacatttagcactaaattttaacacagggtcagtgagtccaggttttaacttcttcatgcctggatgggataaaatgtaattcattgttaaattaattcatatttgtatttattaatcactgtgacaacattaaccatttgttcttaccaggaagtggtcagattatcatctgagttacagttagactggctaagtttggtattagatcaaggggaatgtccagtaaacagagaggtaagcatgatggaaataatgaagtggggtacacaggaaaaacctgactagtgaggaggagcagctgagagatagggtcagtgaatgcggttcagcctgctacctctcctgtcttcatagaaccattgccttagaattattgtatgacacgttttttgttggttaagctgtaaggttttgttctttgtgaacatgggtattttgaggggagggtggagggagtagggaagtggtccttttacaagaattttgatgcataagtgtctattgtagggtttggatgatctagtaaagtgttttagaacccctttttatcccatgcaccattcagtaaacataaaaatcacaattctgctaatgtcatttggaacttcaaaataaatatcttgtctaaaaacaaa

SEQ ID NO: 331086 - DNA, 6410 bp, Homo sapiens
  misc_feature (2783)..(2783): n is a, c, g, or t
  misc_feature (2794)..(2794): n is a, c, g, or t
ctccctcctccctctctccctccctctggcgtctccagccgactttcgcttcccgtcagcagcctttggcggaagagtgtcccgcctcttccgctctacagcggaggtggctgtggcggtggcgctggtggctgcggcggcggcggcggcagcggcgctcgagcggttcctgtcagggtcagccggcgggccccctgggtggtccacctgcaaatcgcggagcggcgccccagggatcgatggcgatgaactataacgcgaaggatgaagtggacggtgggcccccgtgtgctccggggggcaccgcgaagactcggagaccggataacacggccttcaaacagcaacggctgccagcttggcagcccatccttacggctggcacggtgctacctattttcttcatcatcggtctcatcttcattcccatcggcattggcatttttgtcacctccaacaacatccgcgagatcgagattgattataccggaacagagccttccagtccctgtaataaatgtttatctccggatgtgacaccttgcttttgtaccattaacttcacactggaaaagtcatttgagggcaacgtgtttatgtattatggactgtctaatttctatcaaaaccatcgtcgttacgtgaaatctcgagatgatagtcaactaaatggagattctagtgctttgcttaatcccagtaaggaatgtgaaccttatcgaagaaatgaagacaaaccaattgctccttgtggagctattgccaacagcatgtttaatgatacattagaattgtttctcattggcaatgattcttatcctatacctatcgctttgaaaaagaaaggtattgcttggtggacagataaaaatgtgaaattcagaaatccccctggaggagacaacctggaagaacgatttaaaggtacaacaaagcctgtgaactggcttaaaccagtttacatgctggattctgacccagataataatggattcataaatgaggattttattgtttggatgcgtactgcagcattacctacttttcgcaagttgtatcgtcttatagaaaggaaaagtgatttacatccaacattaccagctggccgatactctttgaatgtcacatacagcagcagcatatctccctattatagaccagaatacaggaatatcgagcacttaagtaacttagctgactttacacaggtaataataaagagttgaggttcataaccaggctgttgactccaaaggccataattttactctcagctaccaacatagcctgcgtcttagctagttcactcagttacaccaacccatatctgcatagatgcagtcttttttaggagggaaatactcagtaatttcttttattctaaccaaagtctttgcatcttttaatctggagtctatattttacatacactgtgagtgaagagatctctcaatattagaattgtaaatgtttgctgatctttgcatttttatttccataatccaaatgagtcataatccatatgggttttggttttaaaatggattagtaaatggttaaattaatagacccaatttcaaaataaggttttttttgaattctactctcttgatgttgcacctgaatacacaagtaaatatggcctgctatggcaggctaaaagtgaccaagtttttgaaactaaatccacattggagcagttttggacagacagacccacttcaagtgctggtagaaataacattatcctgaggggatagtcaaactagagagtagctctgttaaaattagcatccagaaaatctctagagagtaagggcaaatttagcaacctgtagcctaaggcacaatgaagggaagtctgtgaagcactgaggaatttttagttgatagatgatttccatacaggaattctgcagcagggtcccaggtttgaaagaactatctaaaggaatgcatgatatatggcagattgagaagacttgataagacaggaatttggacctgcaaaacatcaagggttaattatcaaaattgggcataaggtgggaactaaagactagaatgatggcagaagcctgtttctttaggtttgggagactagagagagacaagcatgggtaatttgatactgtatcccacagaatgttgggttagctagaggtcttaaaatcattcctgccttagtttagggttaatttaagaagttagcagaactgaacctgccattgggagttagggacccatagggacccatctgtggggatggagagttgaagaaactagagaaacagatggggcctaaccctagattcaaaagatgcttttgaaaaagttgtaaactttttgcatggagacttggttctgtcttctttgctgccttacctcttgcaaaattctacaactggtccatgtagataattcatctagtacactggtgccctgtttcctaaatctccttaacagcccacccttcactgccactgttagctatcagctgtgtcacagagtgagttttgccattgctccaaatcagcaagttaaaacttttttattaccatgctttttgatcttttgctcagagccttttcatagtctcataactacactcttgatacatgtgttctttgagctcatggagacttctagttcctgatttttccattttctcctggtctgtcagtctccttgtgtgggcttcattgttcacttgaagtatttttttcacattgcattcctttgaggccttttgccccttccatgtaatgagagcaaaagcaccngagaaactacntaacctttacatttatttgttttggtaaaatattttggcttttactactaacatttagtttgctaaatcagtctttcaagataatactttgtgtgtgtgtgtgtgatttagaacgtaggagtgaggtacctgtatatcctagaattacacaaatgaattaccaacaattaaatggcaacttttaaaattgtattttaaacatcaagtaaccagagatggaaaaatcttcctataccctcttcagattaccctgtacattattttgatggacgaaaacggatgatcttgagcactatttcatggatgggaggaaaaaatccatttttggggattgcttacatcgctgttggatccatctccttccttctgggagttgtactgctagtaattaatcataaatatagaaacagtagtaatacagctgacattaccatttaattttatattatgaaagcaaatcatctgcatgtgcatcaaggccagtcctattcaacctagctttcgaatgctgatatctggttagtatgtcattttgaagttggcacataacttttctaaaaaaaagcagtctttgttgtttgcttcttccctacggatgacttctaaaaatatatgacgggtataaaaaaattagctatattgatcatatcaacactgtaactgctgaaatggcattctaatgtttgctttttattcggacaggccacatgatgcatagagcctctttcatgtgacttgtgtctactgcttaaatctttatgctgtgttgatgatattatattgacatatgaagctgtatatgtgtatgtattttgtggagaaagggattacaagatgtatgagtataatgacttgctaacctttcaggattcagagaaagatgaagaaagaccatatctaaataatacacttcatcattttcatgtgtataaatgcttaaagtaccatctttgttgaggtggttcatgtatccagtttatccagtacagttatttgtcaagcttagctttgatttcaaaggacacgcttaccttgtctggcataagaattaatgctcatgtctgcagtggttgggtaggtcctgcttaggagaattaaaaaattcctctttccgtttggttgaatgttgcagtcaggaaccccaactcacttggaatgtttttatatgtaatcatttcccttgaagcttatactttataagggaagaaagaattcaggtgatatgggaaaactgcttggcagaccttcatcttctgcctcaactgtaaaccacatgtaaatgcttaatggagactgttttcattcttgtgatatttaacattcagaaaattacttcagctttggaaatactcaggctgtttttattctgcaggtaagtgttttgacttaagtactaatattccagaaatttttgaaagcagtaaccttaatttcctatgtatttcattccacttttgcatataggtcaaatagcaatgtgtatgcacattctctttagttaaggcaccaattgttttggttggttttcctaagacatactttaaaaagatgttctataaatttcctagttaaattatggggattttggagtatgtacatgataaattataatacgtatatggttgaagttattttattttttactaatgaattattttaatattccttattgaataaatgctgtaacttgtttgctatggaacttattcttaaagttctagttaaaaataatttttccacatgcatgaaaatatgtattaatcagaggtggcttaattacattgaaattgcttttttgttgttgtttttttactgaaataactcatgtttgtgtagaagaatgcctgtttactcagagtttatattttccttcagttatattttaaatcaaaaggtctgggtaatgtatacttttgattaatatatactttttttaaaaaacaaaaaacaatgtaatggttaatagtagaaatgtgccacacttttcaagttttatataacatatgaaattcagttaaaagaatgtgtgtttcataatgacttttaactggtaaaaatattacttgcacgaagtacttgatgtatggttatcctgaaatttcggagtatttggtgtgttctttgtctaaaaatagtctgttttgtcagtccttcagaatattatttattctgaagattgtccctcttgcacttggcagtttattttcggggatacattgttgggggagaggggtttctgccactctttccagattgagtctgtgctgtttaaggaggactaccatcctgcaactctttttctaattggggcacagaggatgtcgctaaagaaaagttgaagagccctttcagcactttctcatctgtggagaagatggaatcttaaaatacatttggagttttatctgttttacaagtccattgatggcctaagttcctcctgttttctgctgtttgatctctaaggaactcctgttgctaaatatgaagagtatggaacattcatatagtctctgtgaagcatggggggagggaagacatttctttttcttataggctttatgctcaaatgtcatagtctcctttcaaagaattgtgttgcattttaaatgcacccagcttaagtagaagacattgaaggatgcattaattttcaggaactattttgaattatgaaaagattcccaattgaaaaaattattcaacaagtaaaagctaagaaatttcattgaaatcataaggcagtttaagcataaattgataaaaatagctgtgtactactaattaatagaaaatcattcaaccaagagaagagtcaagtgaatatcgtttgtttatttgctagtgagtttctttgtaacgttgattttattaaatgataatatttggttagtatgtcctatgttaataaaaatgaacaaaattaattttgctatgttcaggtgtcttgataaaataacaatgctccagtgttgttgcttacatttagcactaaattttaacacagggtcagtgagtccaggttttaacttcttcatgcctggatgggataaaatgtaattcattgttaaattaattcatatttgtatttattaatcactgtgacaacattaaccatttgttcttaccaggaagtggtcagattatcatctgagttacagttagactggctaagtttggtattagatcaaggggaatgtccagtaaacagagaggtaagcatgatggaaataatgaagtggggtacacaggaaaaacctgactagtgaggaggagcagctgagagatagggtcagtgaatgcggttcagcctgctacctctcctgtcttcatagaaccattgccttagaattattgtatgacacgttttttgttggttaagctgtaaggttttgttctttgtgaacatgggtattttgaggggagggtggagggagtagggaagtggtccttttacaagaattttgatgcataagtgtctattgtagggtttggatgatctagtaaagtgttttagaacccctttttatcccatgcaccattcagtaaacataaaaatcacaattctgctaatgtcatttggaacttcaaaataaatatcttgtctaaaaacaaa

SEQ ID NO: 331087 - DNA, 4395 bp, Homo sapiens
ctccctcctccctctctccctccctctggcgtctccagccgactttcgcttcccgtcagcagcctttggcggaagagtgtcccgcctcttccgctctacagcggaggtggctgtggcggtggcgctggtggctgcggcggcggcggcggcagcggcgctcgagcggttcctgtcagggtcagccggcgggccccctgggtggtccacctgcaaatcgcggagcggcgccccagggatcgatggcgatgaactataacgcgaaggatgaagtggacggtgggcccccgtgtgctccggggggcaccgcgaagactcggagaccggataacacggccttcaaacagcaacggctgccagcttggcagcccatccttacggctggcacggtgctacctattttcttcatcatcggtctcatcttcattcccatcggcattggcatttttgtcacctccaacaacatccgcgagatcgagggcaacgtgtttatgtattatggactgtctaatttctatcaaaaccatcgtcgttacgtgaaatctcgagatgatagtcaactaaatggagattctagtgctttgcttaatcccagtaaggaatgtgaaccttatcgaagaaatgaagacaaaccaattgctccttgtggagctattgccaacagcatgtttaatgatacattagaattgtttctcattggcaatgattcttatcctatacctatcgctttgaaaaagaaaggtattgcttggtggacagataaaaatgtgaaattcagaaatccccctggaggagacaacctggaagaacgatttaaaggtacaacaaagcctgtgaactggcttaaaccagtttacatgctggattctgacccagataataatggattcataaatgaggattttattgtttggatgcgtactgcagcattacctacttttcgcaagttgtatcgtcttatagaaaggaaaagtgatttacatccaacattaccagctggccgatactctttgaatgtcacatacaattaccctgtacattattttgatggacgaaaacggatgatcttgagcactatttcatggatgggaggaaaaaatccatttttggggattgcttacatcgctgttggatccatctccttccttctgggagttgtactgctagtaattaatcataaatatagaaacagtagtaatacagctgacattaccatttaattttatattatgaaagcaaatcatctgcatgtgcatcaaggccagtcctattcaacctagctttcgaatgctgatatctggttagtatgtcattttgaagttggcacataacttttctaaaaaaaagcagtctttgttgtttgcttcttccctacggatgacttctaaaaatatatgacgggtataaaaaaattagctatattgatcatatcaacactgtaactgctgaaatggcattctaatgtttgctttttattcggacaggccacatgatgcatagagcctctttcatgtgacttgtgtctactgcttaaatctttatgctgtgttgatgatattatattgacatatgaagctgtatatgtgtatgtattttgtggagaaagggattacaagatgtatgagtataatgacttgctaacctttcaggattcagagaaagatgaagaaagaccatatctaaataatacacttcatcattttcatgtgtataaatgcttaaagtaccatctttgttgaggtggttcatgtatccagtttatccagtacagttatttgtcaagcttagctttgatttcaaaggacacgcttaccttgtctggcataagaattaatgctcatgtctgcagtggttgggtaggtcctgcttaggagaattaaaaaattcctctttccgtttggttgaatgttgcagtcaggaaccccaactcacttggaatgtttttatatgtaatcatttcccttgaagcttatactttataagggaagaaagaattcaggtgatatgggaaaactgcttggcagaccttcatcttctgcctcaactgtaaaccacatgtaaatgcttaatggagactgttttcattcttgtgatatttaacattcagaaaattacttcagctttggaaatactcaggctgtttttattctgcaggtaagtgttttgacttaagtactaatattccagaaatttttgaaagcagtaaccttaatttcctatgtatttcattccacttttgcatataggtcaaatagcaatgtgtatgcacattctctttagttaaggcaccaattgttttggttggttttcctaagacatactttaaaaagatgttctataaatttcctagttaaattatggggattttggagtatgtacatgataaattataatacgtatatggttgaagttattttattttttactaatgaattattttaatattccttattgaataaatgctgtaacttgtttgctatggaacttattcttaaagttctagttaaaaataatttttccacatgcatgaaaatatgtattaatcagaggtggcttaattacattgaaattgcttttttgttgttgtttttttactgaaataactcatgtttgtgtagaagaatgcctgtttactcagagtttatattttccttcagttatattttaaatcaaaaggtctgggtaatgtatacttttgattaatatatactttttttaaaaaacaaaaaacaatgtaatggttaatagtagaaatgtgccacacttttcaagttttatataacatatgaaattcagttaaaagaatgtgtgtttcataatgacttttaactggtaaaaatattacttgcacgaagtacttgatgtatggttatcctgaaatttcggagtatttggtgtgttctttgtctaaaaatagtctgttttgtcagtccttcagaatattatttattctgaagattgtccctcttgcacttggcagtttattttcggggatacattgttgggggagaggggtttctgccactctttccagattgagtctgtgctgtttaaggaggactaccatcctgcaactctttttctaattggggcacagaggatgtcgctaaagaaaagttgaagagccctttcagcactttctcatctgtggagaagatggaatcttaaaatacatttggagttttatctgttttacaagtccattgatggcctaagttcctcctgttttctgctgtttgatctctaaggaactcctgttgctaaatatgaagagtatggaacattcatatagtctctgtgaagcatggggggagggaagacatttctttttcttataggctttatgctcaaatgtcatagtctcctttcaaagaattgtgttgcattttaaatgcacccagcttaagtagaagacattgaaggatgcattaattttcaggaactattttgaattatgaaaagattcccaattgaaaaaattattcaacaagtaaaagctaagaaatttcattgaaatcataaggcagtttaagcataaattgataaaaatagctgtgtactactaattaatagaaaatcattcaaccaagagaagagtcaagtgaatatcgtttgtttatttgctagtgagtttctttgtaacgttgattttattaaatgataatatttggttagtatgtcctatgttaataaaaatgaacaaaattaattttgctatgttcaggtgtcttgataaaataacaatgctccagtgttgttgcttacatttagcactaaattttaacacagggtcagtgagtccaggttttaacttcttcatgcctggatgggataaaatgtaattcattgttaaattaattcatatttgtatttattaatcactgtgacaacattaaccatttgttcttaccaggaagtggtcagattatcatctgagttacagttagactggctaagtttggtattagatcaaggggaatgtccagtaaacagagaggtaagcatgatggaaataatgaagtggggtacacaggaaaaacctgactagtgaggaggagcagctgagagatagggtcagtgaatgcggttcagcctgctacctctcctgtcttcatagaaccattgccttagaattattgtatgacacgttttttgttggttaagctgtaaggttttgttctttgtgaacatgggtattttgaggggagggtggagggagtagggaagtggtccttttacaagaattttgatgcataagtgtctattgtagggtttggatgatctagtaaagtgttttagaacccctttttatcccatgcaccattcagtaaacataaaaatcacaattctgctaatgtcatttggaacttcaaaataaatatcttgtctaaaaacaaa

SEQ ID NO: 331088 - DNA, 6356 bp, Homo sapiens
  misc_feature (2783)..(2783): n is a, c, g, or t
  misc_feature (2794)..(2794): n is a, c, g, or t
ctccctcctccctctctccctccctctggcgtctccagccgactttcgcttcccgtcagcagcctttggcggaagagtgtcccgcctcttccgctctacagcggaggtggctgtggcggtggcgctggtggctgcggcggcggcggcggcagcggcgctcgagcggttcctgtcagggtcagccggcgggccccctgggtggtccacctgcaaatcgcggagcggcgccccagggatcgatggcgatgaactataacgcgaaggatgaagtggacggtgggcccccgtgtgctccggggggcaccgcgaagactcggagaccggataacacggccttcaaacagcaacggctgccagcttggcagcccatccttacggctggcacggtgctacctattttcttcatcatcggtctcatcttcattcccatcggcattggcatttttgtcacctccaacaacatccgcgagatcgagattgattataccggaacagagccttccagtccctgtaataaatgtttatctccggatgtgacaccttgcttttgtaccattaacttcacactggaaaagtcatttgagggcaacgtgtttatgtattatggactgtctaatttctatcaaaaccatcgtcgttacgtgaaatctcgagatgatagtcaactaaatggagattctagtgctttgcttaatcccagtaaggaatgtgaaccttatcgaagaaatgaagacaaaccaattgctccttgtggagctattgccaacagcatgtttaatgatacattagaattgtttctcattggcaatgattcttatcctatacctatcgctttgaaaaagaaaggtattgcttggtggacagataaaaatgtgaaattcagaaatccccctggaggagacaacctggaagaacgatttaaaggtacaacaaagcctgtgaactggcttaaaccagtttacatgctggattctgacccagataataatggattcataaatgaggattttattgtttggatgcgtactgcagcattacctacttttcgcaagttgtatcgtcttatagaaaggaaaagtgatttacatccaacattaccagctggccgatactctttgaatgtcacatacagcagcagcatatctccctattatagaccagaatacaggaatatcgagcacttaagtaacttagctgactttacacaggtaataataaagagttgaggttcataaccaggctgttgactccaaaggccataattttactctcagctaccaacatagcctgcgtcttagctagttcactcagttacaccaacccatatctgcatagatgcagtcttttttaggagggaaatactcagtaatttcttttattctaaccaaagtctttgcatcttttaatctggagtctatattttacatacactgtgagtgaagagatctctcaatattagaattgtaaatgtttgctgatctttgcatttttatttccataatccaaatgagtcataatccatatgggttttggttttaaaatggattagtaaatggttaaattaatagacccaatttcaaaataaggttttttttgaattctactctcttgatgttgcacctgaatacacaagtaaatatggcctgctatggcaggctaaaagtgaccaagtttttgaaactaaatccacattggagcagttttggacagacagacccacttcaagtgctggtagaaataacattatcctgaggggatagtcaaactagagagtagctctgttaaaattagcatccagaaaatctctagagagtaagggcaaatttagcaacctgtagcctaaggcacaatgaagggaagtctgtgaagcactgaggaatttttagttgatagatgatttccatacaggaattctgcagcagggtcccaggtttgaaagaactatctaaaggaatgcatgatatatggcagattgagaagacttgataagacaggaatttggacctgcaaaacatcaagggttaattatcaaaattgggcataaggtgggaactaaagactagaatgatggcagaagcctgtttctttaggtttgggagactagagagagacaagcatgggtaatttgatactgtatcccacagaatgttgggttagctagaggtcttaaaatcattcctgccttagtttagggttaatttaagaagttagcagaactgaacctgccattgggagttagggacccatagggacccatctgtggggatggagagttgaagaaactagagaaacagatggggcctaaccctagattcaaaagatgcttttgaaaaagttgtaaactttttgcatggagacttggttctgtcttctttgctgccttacctcttgcaaaattctacaactggtccatgtagataattcatctagtacactggtgccctgtttcctaaatctccttaacagcccacccttcactgccactgttagctatcagctgtgtcacagagtgagttttgccattgctccaaatcagcaagttaaaacttttttattaccatgctttttgatcttttgctcagagccttttcatagtctcataactacactcttgatacatgtgttctttgagctcatggagacttctagttcctgatttttccattttctcctggtctgtcagtctccttgtgtgggcttcattgttcacttgaagtatttttttcacattgcattcctttgaggccttttgccccttccatgtaatgagagcaaaagcaccngagaaactacntaacctttacatttatttgttttggtaaaatattttggcttttactactaacatttagtttgctaaatcagtctttcaagataatactttgtgtgtgtgtgtgtgatttagaacgtaggagtgaggtacctgtatatcctagaattacacaaatgaattaccaacaattaaatggcaacttttaaaattgtattttaaacatcaagtaaccagagatggaaaaatcttcctataccctcttcagattaccctgtacattattttgatggacgaaaacggatgatcttgagcactatttcatggatgggaggaaaaaatccatttttggggattgcttacatcgctgttggatccatctccttccttctgggagttgtactgctagtaattaatcataaatatagaaacagtagtaatacagctgacattaccatttaattttatattatgaaagcaaatcatctgcatgtgcatcaaggccagtcctattcaacctagctttcgaatgctgatatctggttagtatgtcattttgaagttggcacataacttttctaaaaaaaagcagtctttgttgtttgcttcttccctacggatgacttctaaaaatatatgacgggtataaaaaaattagctatattgatcatatcaacactgtaactgctgaaatggcattctaatgtttgctttttattcggacaggccacatgatgcatagagcctctttcatgtgacttgtgtctactgcttaaatctttatgctgtgttgatgatattatattgacatatgaagctgtatatgtgtatgtattttgtggagaaagggattacaagatgtatgagtataatgacttgctaacctttcaggattcagagaaagatgaagaaagaccatatctaaataatacacttcatcattttcatgtgtataaatgcttaaagtaccatctttgttgaggtggttcatgtatccagtttatccagtacagttatttgtcaagcttagctttgatttcaaaggacacgcttaccttgtctggcataagaattaatgctcatgtctgcagtggttgggtaggtcctgcttaggagaattaaaaaattcctctttccgtttggttgaatgttgcagtcaggaaccccaactcacttggaatgtttttatatgtaatcatttcccttgaagcttatactttataagggaagaaagaattcaggtgatatgggaaaactgcttggcagaccttcatcttctgcctcaactgtaaaccacatgtaaatgcttaatggagactgttttcattcttgtgatatttaacattcagaaaattacttcagctttggaaatactcaggctgtttttattctgcaggtaagtgttttgacttaagtactaatattccagaaatttttgaaagcagtaaccttaatttcctatgtatttcattccacttttgcatataggtcaaatagcaatgtgtatgcacattctctttagttaaggcaccaattgttttggttggttttcctaagacatactttaaaaagatgttctataaatttcctagttaaattatggggattttggagtatgtacatgataaattataatacgtatatggttgaagttattttattttttactaatgaattattttaatattccttattgaataaatgctgtaacttgtttgctatggaacttattcttaaagttctagttaaaaataatttttccacatgcatgaaaatatgtattaatcagaggtggcttaattacattgaaattgcttttttgttgttgtttttttactgaaataactcatgtttgtgtagaagaatgcctgtttactcagagtttatattttccttcagttatattttaaatcaaaaggtctgggtaatgtatacttttgattaatatatactttttttaaaaaacaaaaaacaatgtaatggttaatagtagaaatgtgccacacttttcaagttttatataacatatgaaattcagttaaaagaatgtgtgtttcataatgacttttaactggtaaaaatattacttgcacgaagtacttgatgtatggttatcctgaaatttcggagtatttggtgtgttctttgtctaaaaatagtctgttttgtcagtccttcagaatattatttattctgaagattgtccctcttgcacttggcagtttattttcggggatacattgttgggggagaggggtttctgccactctttccagattgagtctgtgctgtttaaggaggactaccatcctgcaactctttttctaattggggcacagaggatgtcgctaaagaaaagttgaagagccctttcagcactttctcatctgtggagaagatggaatcttaaaatacatttggagttttatctgttttacaagtccattgatggcctaagttcctcctgttttctgctgtttgatctctaaggaactcctgttgctaaatatgaagagtatggaacattcatatagtctctgtgaagcatggggggagggaagacatttctttttcttataggctttatgctcaaatgtcatagtctcctttcaaagaattgtgttgcattttaaatgcacccagcttaagtagaagacattgaaggatgcattaattttcaggaactattttgaattatgaaaagattcccaattgaaaaaattattcaacaagtaaaagctaagaaatttcattgaaatcataaggcagtttaagcataaattgataaaaatagctgtgtactactaattaatagaaaatcattcaaccaagagaagagtcaagtgaatatcgtttgtttatttgctagtgagtttctttgtaacgttgattttattaaatgataatatttggttagtatgtcctatgttaataaaaatgaacaaaattaattttgctatgttcaggtgtcttgataaaataacaatgctccagtgttgttgcttacatttagcactaaattttaacacagggtcagtgagtccaggttttaacttcttcatgcctggatgggataaacattaaccatttgttcttaccaggaagtggtcagattatcatctgagttacagttagactggctaagtttggtattagatcaaggggaatgtccagtaaacagagaggtaagcatgatggaaataatgaagtggggtacacaggaaaaacctgactagtgaggaggagcagctgagagatagggtcagtgaatgcggttcagcctgctacctctcctgtcttcatagaaccattgccttagaattattgtatgacacgttttttgttggttaagctgtaaggttttgttctttgtgaacatgggtattttgaggggagggtggagggagtagggaagtggtccttttacaagaattttgatgcataagtgtctattgtagggtttggatgatctagtaaagtgttttagaacccctttttatcccatgcaccattcagtaaacataaaaatcacaattctgctaatgtcatttggaacttcaaaataaatatcttgtctaaaaacaaa

SEQ ID NO: 331089 - DNA, 5656 bp, Homo sapiens
  misc_feature (2029)..(2029): n is a, c, g, or t
  misc_feature (2040)..(2040): n is a, c, g, or t
taatgtctttctttgcttgtgtttagatacattagaattgtttctcattggcaatgattcttatcctatacctatcgctttgaaaaagaaaggtattgcttggtggacagataaaaatgtgaaattcagaaatccccctggaggagacaacctggaagaacgatttaaaggtacaacaaagcctgtgaactggcttaaaccagtttacatgctggattctgacccagataataatggattcataaatgaggattttattgtttggatgcgtactgcagcattacctacttttcgcaagttgtatcgtcttatagaaaggaaaagtgatttacatccaacattaccagctggccgatactctttgaatgtcacatacagcagcagcatatctccctattatagaccagaatacaggaatatcgagcacttaagtaacttagctgactttacacaggtaataataaagagttgaggttcataaccaggctgttgactccaaaggccataattttactctcagctaccaacatagcctgcgtcttagctagttcactcagttacaccaacccatatctgcatagatgcagtcttttttaggagggaaatactcagtaatttcttttattctaaccaaagtctttgcatcttttaatctggagtctatattttacatacactgtgagtgaagagatctctcaatattagaattgtaaatgtttgctgatctttgcatttttatttccataatccaaatgagtcataatccatatgggttttggttttaaaatggattagtaaatggttaaattaatagacccaatttcaaaataaggttttttttgaattctactctcttgatgttgcacctgaatacacaagtaaatatggcctgctatggcaggctaaaagtgaccaagtttttgaaactaaatccacattggagcagttttggacagacagacccacttcaagtgctggtagaaataacattatcctgaggggatagtcaaactagagagtagctctgttaaaattagcatccagaaaatctctagagagtaagggcaaatttagcaacctgtagcctaaggcacaatgaagggaagtctgtgaagcactgaggaatttttagttgatagatgatttccatacaggaattctgcagcagggtcccaggtttgaaagaactatctaaaggaatgcatgatatatggcagattgagaagacttgataagacaggaatttggacctgcaaaacatcaagggttaattatcaaaattgggcataaggtgggaactaaagactagaatgatggcagaagcctgtttctttaggtttgggagactagagagagacaagcatgggtaatttgatactgtatcccacagaatgttgggttagctagaggtcttaaaatcattcctgccttagtttagggttaatttaagaagttagcagaactgaacctgccattgggagttagggacccatagggacccatctgtggggatggagagttgaagaaactagagaaacagatggggcctaaccctagattcaaaagatgcttttgaaaaagttgtaaactttttgcatggagacttggttctgtcttctttgctgccttacctcttgcaaaattctacaactggtccatgtagataattcatctagtacactggtgccctgtttcctaaatctccttaacagcccacccttcactgccactgttagctatcagctgtgtcacagagtgagttttgccattgctccaaatcagcaagttaaaacttttttattaccatgctttttgatcttttgctcagagccttttcatagtctcataactacactcttgatacatgtgttctttgagctcatggagacttctagttcctgatttttccattttctcctggtctgtcagtctccttgtgtgggcttcattgttcacttgaagtatttttttcacattgcattcctttgaggccttttgccccttccatgtaatgagagcaaaagcaccngagaaactacntaacctttacatttatttgttttggtaaaatattttggcttttactactaacatttagtttgctaaatcagtctttcaagataatactttgtgtgtgtgtgtgtgatttagaacgtaggagtgaggtacctgtatatcctagaattacacaaatgaattaccaacaattaaatggcaacttttaaaattgtattttaaacatcaagtaaccagagatggaaaaatcttcctataccctcttcagattaccctgtacattattttgatggacgaaaacggatgatcttgagcactatttcatggatgggaggaaaaaatccatttttggggattgcttacatcgctgttggatccatctccttccttctgggagttgtactgctagtaattaatcataaatatagaaacagtagtaatacagctgacattaccatttaattttatattatgaaagcaaatcatctgcatgtgcatcaaggccagtcctattcaacctagctttcgaatgctgatatctggttagtatgtcattttgaagttggcacataacttttctaaaaaaaagcagtctttgttgtttgcttcttccctacggatgacttctaaaaatatatgacgggtataaaaaaattagctatattgatcatatcaacactgtaactgctgaaatggcattctaatgtttgctttttattcggacaggccacatgatgcatagagcctctttcatgtgacttgtgtctactgcttaaatctttatgctgtgttgatgatattatattgacatatgaagctgtatatgtgtatgtattttgtggagaaagggattacaagatgtatgagtataatgacttgctaacctttcaggattcagagaaagatgaagaaagaccatatctaaataatacacttcatcattttcatgtgtataaatgcttaaagtaccatctttgttgaggtggttcatgtatccagtttatccagtacagttatttgtcaagcttagctttgatttcaaaggacacgcttaccttgtctggcataagaattaatgctcatgtctgcagtggttgggtaggtcctgcttaggagaattaaaaaattcctctttccgtttggttgaatgttgcagtcaggaaccccaactcacttggaatgtttttatatgtaatcatttcccttgaagcttatactttataagggaagaaagaattcaggtgatatgggaaaactgcttggcagaccttcatcttctgcctcaactgtaaaccacatgtaaatgcttaatggagactgttttcattcttgtgatatttaacattcagaaaattacttcagctttggaaatactcaggctgtttttattctgcaggtaagtgttttgacttaagtactaatattccagaaatttttgaaagcagtaaccttaatttcctatgtatttcattccacttttgcatataggtcaaatagcaatgtgtatgcacattctctttagttaaggcaccaattgttttggttggttttcctaagacatactttaaaaagatgttctataaatttcctagttaaattatggggattttggagtatgtacatgataaattataatacgtatatggttgaagttattttattttttactaatgaattattttaatattccttattgaataaatgctgtaacttgtttgctatggaacttattcttaaagttctagttaaaaataatttttccacatgcatgaaaatatgtattaatcagaggtggcttaattacattgaaattgcttttttgttgttgtttttttactgaaataactcatgtttgtgtagaagaatgcctgtttactcagagtttatattttccttcagttatattttaaatcaaaaggtctgggtaatgtatacttttgattaatatatactttttttaaaaaacaaaaaacaatgtaatggttaatagtagaaatgtgccacacttttcaagttttatataacatatgaaattcagttaaaagaatgtgtgtttcataatgacttttaactggtaaaaatattacttgcacgaagtacttgatgtatggttatcctgaaatttcggagtatttggtgtgttctttgtctaaaaatagtctgttttgtcagtccttcagaatattatttattctgaagattgtccctcttgcacttggcagtttattttcggggatacattgttgggggagaggggtttctgccactctttccagattgagtctgtgctgtttaaggaggactaccatcctgcaactctttttctaattggggcacagaggatgtcgctaaagaaaagttgaagagccctttcagcactttctcatctgtggagaagatggaatcttaaaatacatttggagttttatctgttttacaagtccattgatggcctaagttcctcctgttttctgctgtttgatctctaaggaactcctgttgctaaatatgaagagtatggaacattcatatagtctctgtgaagcatggggggagggaagacatttctttttcttataggctttatgctcaaatgtcatagtctcctttcaaagaattgtgttgcattttaaatgcacccagcttaagtagaagacattgaaggatgcattaattttcaggaactattttgaattatgaaaagattcccaattgaaaaaattattcaacaagtaaaagctaagaaatttcattgaaatcataaggcagtttaagcataaattgataaaaatagctgtgtactactaattaatagaaaatcattcaaccaagagaagagtcaagtgaatatcgtttgtttatttgctagtgagtttctttgtaacgttgattttattaaatgataatatttggttagtatgtcctatgttaataaaaatgaacaaaattaattttgctatgttcaggtgtcttgataaaataacaatgctccagtgttgttgcttacatttagcactaaattttaacacagggtcagtgagtccaggttttaacttcttcatgcctggatgggataaaatgtaattcattgttaaattaattcatatttgtatttattaatcactgtgacaacattaaccatttgttcttaccaggaagtggtcagattatcatctgagttacagttagactggctaagtttggtattagatcaaggggaatgtccagtaaacagagaggtaagcatgatggaaataatgaagtggggtacacaggaaaaacctgactagtgaggaggagcagctgagagatagggtcagtgaatgcggttcagcctgctacctctcctgtcttcatagaaccattgccttagaattattgtatgacacgttttttgttggttaagctgtaaggttttgttctttgtgaacatgggtattttgaggggagggtggagggagtagggaagtggtccttttacaagaattttgatgcataagtgtctattgtagggtttggatgatctagtaaagtgttttagaacccctttttatcccatgcaccattcagtaaacataaaaatcacaattctgctaatgtcatttggaacttcaaaataaatatcttgtctaaaaacaaa

SEQ ID NO: 331090 - DNA, 2645 bp, Homo sapiens
  misc_feature (35)..(35): n is a, c, g, or t
atcgagctcggcaccctgattgcatttagactgantgcatttagacaaggacacgcttaccttgtctggcataagaattaatgctcatgtctgcagtggttgggtaggtcctgcttaggagaattaaaaaattcctctttccgtttggttgaatgttgcagtcaggaaccccaactcacttggaatgtttttatatgtaatcatttcccttgaagcttatactttataagggaagaaagaattcaggtgatatgggaaaactgcttggcagaccttcatcttctgcctcaactgtaaaccacatgtaaatgcttaatggagactgttttcattcttgtgatatttaacattcagaaaattacttcagctttggaaatactcaggctgtttttattctgcaggtaagtgttttgacttaagtactaatattccagaaatttttgaaagcagtaaccttaatttcctatgtatttcattccacttttgcatataggtcaaatagcaatgtgtatgcacattctctttagttaaggcaccaattgttttggttggttttcctaagacatactttaaaaagatgttctataaatttcctagttaaattatggggattttggagtatgtacatgataaattataatacgtatatggttgaagttattttattttttactaatgaattattttaatattccttattgaataaatgctgtaacttgtttgctatggaacttattcttaaagttctagttaaaaataatttttccacatgcatgaaaatatgtattaatcagaggtggcttaattacattgaaattgcttttttgttgttgtttttttactgaaataactcatgtttgtgtagaagaatgcctgtttactcagagtttatattttccttcagttatattttaaatcaaaaggtctgggtaatgtatacttttgattaatatatactttttttaaaaaacaaaaaacaatgtaatggttaatagtagaaatgtgccacacttttcaagttttatataacatatgaaattcagttaaaagaatgtgtgtttcataatgacttttaactggtaaaaatattacttgcacgaagtacttgatgtatggttatcctgaaatttcggagtatttggtgtgttctttgtctaaaaatagtctgttttgtcagtccttcagaatattatttattctgaagattgtccctcttgcacttggcagtttattttcggggatacattgttgggggagaggggtttctgccactctttccagattgagtctgtgctgtttaaggaggactaccatcctgcaactctttttctaattggggcacagaggatgtcgctaaagaaaagttgaagagccctttcagcactttctcatctgtggagaagatggaatcttaaaatacatttggagttttatctgttttacaagtccattgatggcctaagttcctcctgttttctgctgtttgatctctaaggaactcctgttgctaaatatgaagagtatggaacattcatatagtctctgtgaagcatggggggagggaagacatttctttttcttataggctttatgctcaaatgtcatagtctcctttcaaagaattgtgttgcattttaaatgcacccagcttaagtagaagacattgaaggatgcattaattttcaggaactattttgaattatgaaaagattcccaattgaaaaaattattcaacaagtaaaagctaagaaatttcattgaaatcataaggcagtttaagcataaattgataaaaatagctgtgtactactaattaatagaaaatcattcaaccaagagaagagtcaagtgaatatcgtttgtttatttgctagtgagtttctttgtaacgttgattttattaaatgataatatttggttagtatgtcctatgttaataaaaatgaacaaaattaattttgctatgttcaggtgtcttgataaaataacaatgctccagtgttgttgcttacatttagcactaaattttaacacagggtcagtgagtccaggttttaacttcttcatgcctggatgggataaaatgtaattcattgttaaattaattcatatttgtatttattaatcactgtgacaacattaaccatttgttcttaccaggaagtggtcagattatcatctgagttacagttagactggctaagtttggtattagatcaaggggaatgtccagtaaacagagaggtaagcatgatggaaataatgaagtggggtacacaggaaaaacctgactagtgaggaggagcagctgagagatagggtcagtgaatgcggttcagcctgctacctctcctgtcttcatagaaccattgccttagaattattgtatgacacgttttttgttggttaagctgtaaggttttgttctttgtgaacatgggtattttgaggggagggtggagggagtagggaagtggtccttttacaagaattttgatgcataagtgtctattgtagggtttggatgatctagtaaagtgttttagaacccctttttatcccatgcaccattcagtaaacataaaaatcacaattctgctaatgtcatttggaacttcaaaataaatatcttgtctaaaaacaaa

SEQ ID NO: 331091 - DNA, 5879 bp, Homo sapiens
  misc_feature (2783)..(2783): n is a, c, g, or t
  misc_feature (2794)..(2794): n is a, c, g, or t
  misc_feature (5862)..(5863): n is a, c, g, or t
ctccctcctccctctctccctccctctggcgtctccagccgactttcgcttcccgtcagcagcctttggcggaagagtgtcccgcctcttccgctctacagcggaggtggctgtggcggtggcgctggtggctgcggcggcggcggcggcagcggcgctcgagcggttcctgtcagggtcagccggcgggccccctgggtggtccacctgcaaatcgcggagcggcgccccagggatcgatggcgatgaactataacgcgaaggatgaagtggacggtgggcccccgtgtgctccggggggcaccgcgaagactcggagaccggataacacggccttcaaacagcaacggctgccagcttggcagcccatccttacggctggcacggtgctacctattttcttcatcatcggtctcatcttcattcccatcggcattggcatttttgtcacctccaacaacatccgcgagatcgagattgattataccggaacagagccttccagtccctgtaataaatgtttatctccggatgtgacaccttgcttttgtaccattaacttcacactggaaaagtcatttgagggcaacgtgtttatgtattatggactgtctaatttctatcaaaaccatcgtcgttacgtgaaatctcgagatgatagtcaactaaatggagattctagtgctttgcttaatcccagtaaggaatgtgaaccttatcgaagaaatgaagacaaaccaattgctccttgtggagctattgccaacagcatgtttaatgatacattagaattgtttctcattggcaatgattcttatcctatacctatcgctttgaaaaagaaaggtattgcttggtggacagataaaaatgtgaaattcagaaatccccctggaggagacaacctggaagaacgatttaaaggtacaacaaagcctgtgaactggcttaaaccagtttacatgctggattctgacccagataataatggattcataaatgaggattttattgtttggatgcgtactgcagcattacctacttttcgcaagttgtatcgtcttatagaaaggaaaagtgatttacatccaacattaccagctggccgatactctttgaatgtcacatacagcagcagcatatctccctattatagaccagaatacaggaatatcgagcacttaagtaacttagctgactttacacaggtaataataaagagttgaggttcataaccaggctgttgactccaaaggccataattttactctcagctaccaacatagcctgcgtcttagctagttcactcagttacaccaacccatatctgcatagatgcagtcttttttaggagggaaatactcagtaatttcttttattctaaccaaagtctttgcatcttttaatctggagtctatattttacatacactgtgagtgaagagatctctcaatattagaattgtaaatgtttgctgatctttgcatttttatttccataatccaaatgagtcataatccatatgggttttggttttaaaatggattagtaaatggttaaattaatagacccaatttcaaaataaggttttttttgaattctactctcttgatgttgcacctgaatacacaagtaaatatggcctgctatggcaggctaaaagtgaccaagtttttgaaactaaatccacattggagcagttttggacagacagacccacttcaagtgctggtagaaataacattatcctgaggggatagtcaaactagagagtagctctgttaaaattagcatccagaaaatctctagagagtaagggcaaatttagcaacctgtagcctaaggcacaatgaagggaagtctgtgaagcactgaggaatttttagttgatagatgatttccatacaggaattctgcagcagggtcccaggtttgaaagaactatctaaaggaatgcatgatatatggcagattgagaagacttgataagacaggaatttggacctgcaaaacatcaagggttaattatcaaaattgggcataaggtgggaactaaagactagaatgatggcagaagcctgtttctttaggtttgggagactagagagagacaagcatgggtaatttgatactgtatcccacagaatgttgggttagctagaggtcttaaaatcattcctgccttagtttagggttaatttaagaagttagcagaactgaacctgccattgggagttagggacccatagggacccatctgtggggatggagagttgaagaaactagagaaacagatggggcctaaccctagattcaaaagatgcttttgaaaaagttgtaaactttttgcatggagacttggttctgtcttctttgctgccttacctcttgcaaaattctacaactggtccatgtagataattcatctagtacactggtgccctgtttcctaaatctccttaacagcccacccttcactgccactgttagctatcagctgtgtcacagagtgagttttgccattgctccaaatcagcaagttaaaacttttttattaccatgctttttgatcttttgctcagagccttttcatagtctcataactacactcttgatacatgtgttctttgagctcatggagacttctagttcctgatttttccattttctcctggtctgtcagtctccttgtgtgggcttcattgttcacttgaagtatttttttcacattgcattcctttgaggccttttgccccttccatgtaatgagagcaaaagcaccngagaaactacntaacctttacatttatttgttttggtaaaatattttggcttttactactaacatttagtttgctaaatcagtctttcaagataatactttgtgtgtgtgtgtgtgatttagaacgtaggagtgaggtacctgtatatcctagaattacacaaatgaattaccaacaattaaatggcaacttttaaaattgtattttaaacatcaagtaaccagagatggaaaaatcttcctataccctcttcagattaccctgtacattattttgatggacgaaaacggatgatcttgagcactatttcatggatgggaggaaaaaatccatttttggggattgcttacatcgctgttggatccatctccttccttctgggagttgtactgctagtaattaatcataaatatagaaacagtagtaatacagctgacattaccatttaattttatattatgaaagcaaatcatctgcatgtgcatcaaggccagtcctattcaacctagctttcgaatgctgatatctggttagtatgtcattttgaagttggcacataacttttctaaaaaaaagcagtctttgttgtttgcttcttccctacggatgacttctaaaaatatatgacgggtataaaaaaattagctatattgatcatatcaacactgtaactgctgaaatggcattctaatgtttgctttttattcggacaggccacatgatgcatagagcctctttcatgtgacttgtgtctactgcttaaatctttatgctgtgttgatgatattatattgacatatgaagctgtatatgtgtatgtattttgtggagaaagggattacaagatgtatgagtataatgacttgctaacctttcaggattcagagaaagatgaagaaagaccatatctaaataatacacttcatcattttcatgtgtataaatgcttaaagtaccatctttgttgaggtggttcatgtatccagtttatccagtacagttatttgtcaagcttagctttgatttcaaaggacacgcttaccttgtctggcataagaattaatgctcatgtctgcagtggttgggtaggtcctgcttaggagaattaaaaaattcctctttccgtttggttgaatgttgcagtcaggaaccccaactcacttggaatgtttttatatgtaatcatttcccttgaagcttatactttataagggaagaaagaattcaggtgatatgggaaaactgcttggcagaccttcatcttctgcctcaactgtaaaccacatgtaaatgcttaatggagactgttttcattcttgtgatatttaacattcagaaaattacttcagctttggaaatactcaggctgtttttattctgcaggtaagtgttttgacttaagtactaatattccagaaatttttgaaagcagtaaccttaatttcctatgtatttcattccacttttgcatataggtcaaatagcaatgtgtatgcacattctctttagttaaggcaccaattgttttggttggttttcctaagacatactttaaaaagatgttctataaatttcctagttaaattatggggattttggagtatgtacatgataaattataatacgtatatggttgaagttattttattttttactaatgaattattttaatattccttattgaataaatgctgtaacttgtttgctatggaacttattcttaaagttctagttaaaaataatttttccacatgcatgaaaatatgtattaatcagaggtggcttaattacattgaaattgcttttttgttgttgtttttttactgaaataactcatgtttgtgtagaagaatgcctgtttactcagagtttatattttccttcagttatattttaaatcaaaaggtctgggtaatgtatacttttgattaatatatactttttttaaaaaacaaaaaacaatgtaatggttaatagtagaaatgtgccacacttttcaagttttatataacatatgaaattcagttaaaagaatgtgtgtttcataatgacttttaactggtaaaaatattacttgcacgaagtacttgatgtatggttatcctgaaatttcggagtatttggtgtgttctttgtctaaaaatagtctgttttgtcagtccttcagaatattatttattctgaagattgtccctcttgcacttggcagtttattttcggggatacattgttgggggagaggggtttctgccactctttccagattgagtctgtgctgtttaaggaggactaccatcctgcaactctttttctaattggggcacagaggatgtcgctaaagaaaagttgaagagccctttcagcactttctcatctgtggagaagatggaatcttaaaatacatttggagttttatctgttttacaagtccattgatggcctaagttcctcctgttttctgctgtttgatctctaaggaactcctgttgctaaatatgaagagtatggaacattcatatagtctctgtgaagcatggggggagggaagacatttctttttcttataggctttatgctcaaatgtcatagtctcctttcaaagaattgtgttgcattttaaatgcacccagcttaagtagaagacattgaaggatgcattaattttcaggaactattttgaattatgaaaagattcccaattgaaaaaattattcaacaagtaaaagctaagaaatttcattgaaatcataaggcagtttaagcataaattgataaaaatagctgtgtactactaattaatagaaaatcattcaaccaagagaagagtcaagtgaatatcgtttgtttatttgctagtgagtttctttgtaacgttgattttattaaatgataatatttggttagtatgtcctatgttaataaaaatgaacaaaattaattttgctatgttcaggtgtcttgataaaataacaatgctccagtgttgttgcttacatttagcactaaattttaacacagggtcagtgagtccaggttttaacttcttcatgcctggatgggatagttcgcgagggtaccnnctcgattctatctgtc

SEQ ID NO: 331092 - DNA, 5631 bp, Homo sapiens
  misc_feature (2783)..(2783): n is a, c, g, or t
  misc_feature (2794)..(2794): n is a, c, g, or t
ctccctcctccctctctccctccctctggcgtctccagccgactttcgcttcccgtcagcagcctttggcggaagagtgtcccgcctcttccgctctacagcggaggtggctgtggcggtggcgctggtggctgcggcggcggcggcggcagcggcgctcgagcggttcctgtcagggtcagccggcgggccccctgggtggtccacctgcaaatcgcggagcggcgccccagggatcgatggcgatgaactataacgcgaaggatgaagtggacggtgggcccccgtgtgctccggggggcaccgcgaagactcggagaccggataacacggccttcaaacagcaacggctgccagcttggcagcccatccttacggctggcacggtgctacctattttcttcatcatcggtctcatcttcattcccatcggcattggcatttttgtcacctccaacaacatccgcgagatcgagattgattataccggaacagagccttccagtccctgtaataaatgtttatctccggatgtgacaccttgcttttgtaccattaacttcacactggaaaagtcatttgagggcaacgtgtttatgtattatggactgtctaatttctatcaaaaccatcgtcgttacgtgaaatctcgagatgatagtcaactaaatggagattctagtgctttgcttaatcccagtaaggaatgtgaaccttatcgaagaaatgaagacaaaccaattgctccttgtggagctattgccaacagcatgtttaatgatacattagaattgtttctcattggcaatgattcttatcctatacctatcgctttgaaaaagaaaggtattgcttggtggacagataaaaatgtgaaattcagaaatccccctggaggagacaacctggaagaacgatttaaaggtacaacaaagcctgtgaactggcttaaaccagtttacatgctggattctgacccagataataatggattcataaatgaggattttattgtttggatgcgtactgcagcattacctacttttcgcaagttgtatcgtcttatagaaaggaaaagtgatttacatccaacattaccagctggccgatactctttgaatgtcacatacagcagcagcatatctccctattatagaccagaatacaggaatatcgagcacttaagtaacttagctgactttacacaggtaataataaagagttgaggttcataaccaggctgttgactccaaaggccataattttactctcagctaccaacatagcctgcgtcttagctagttcactcagttacaccaacccatatctgcatagatgcagtcttttttaggagggaaatactcagtaatttcttttattctaaccaaagtctttgcatcttttaatctggagtctatattttacatacactgtgagtgaagagatctctcaatattagaattgtaaatgtttgctgatctttgcatttttatttccataatccaaatgagtcataatccatatgggttttggttttaaaatggattagtaaatggttaaattaatagacccaatttcaaaataaggttttttttgaattctactctcttgatgttgcacctgaatacacaagtaaatatggcctgctatggcaggctaaaagtgaccaagtttttgaaactaaatccacattggagcagttttggacagacagacccacttcaagtgctggtagaaataacattatcctgaggggatagtcaaactagagagtagctctgttaaaattagcatccagaaaatctctagagagtaagggcaaatttagcaacctgtagcctaaggcacaatgaagggaagtctgtgaagcactgaggaatttttagttgatagatgatttccatacaggaattctgcagcagggtcccaggtttgaaagaactatctaaaggaatgcatgatatatggcagattgagaagacttgataagacaggaatttggacctgcaaaacatcaagggttaattatcaaaattgggcataaggtgggaactaaagactagaatgatggcagaagcctgtttctttaggtttgggagactagagagagacaagcatgggtaatttgatactgtatcccacagaatgttgggttagctagaggtcttaaaatcattcctgccttagtttagggttaatttaagaagttagcagaactgaacctgccattgggagttagggacccatagggacccatctgtggggatggagagttgaagaaactagagaaacagatggggcctaaccctagattcaaaagatgcttttgaaaaagttgtaaactttttgcatggagacttggttctgtcttctttgctgccttacctcttgcaaaattctacaactggtccatgtagataattcatctagtacactggtgccctgtttcctaaatctccttaacagcccacccttcactgccactgttagctatcagctgtgtcacagagtgagttttgccattgctccaaatcagcaagttaaaacttttttattaccatgctttttgatcttttgctcagagccttttcatagtctcataactacactcttgatacatgtgttctttgagctcatggagacttctagttcctgatttttccattttctcctggtctgtcagtctccttgtgtgggcttcattgttcacttgaagtatttttttcacattgcattcctttgaggccttttgccccttccatgtaatgagagcaaaagcaccngagaaactacntaacctttacatttatttgttttggtaaaatattttggcttttactactaacatttagtttgctaaatcagtctttcaagataatactttgtgtgtgtgtgtgtgatttagaacgtaggagtgaggtacctgtatatcctagaattacacaaatgaattaccaacaattaaatggcaacttttaaaattgtattttaaacatcaagtaaccagagatggaaaaatcttcctataccctcttcagattaccctgtacattattttgatggacgaaaacggatgatcttgagcactatttcatggatgggaggaaaaaatccatttttggggattgcttacatcgctgttggatccatctccttccttctgggagttgtactgctagtaattaatcataaatatagaaacagtagtaatacagctgacattaccatttaattttatattatgaaagcaaatcatctgcatgtgcatcaaggccagtcctattcaacctagctttcgaatgctgatatctggttagtatgtcattttgaagttggcacataacttttctaaaaaaaagcagtctttgttgtttgcttcttccctacggatgacttctaaaaatatatgacgggtataaaaaaattagctatattgatcatatcaacactgtaactgctgaaatggcattctaatgtttgctttttattcggacaggccacatgatgcatagagcctctttcatgtgacttgtgtctactgcttaaatctttatgctgtgttgatgatattatattgacatatgaagctgtatatgtgtatgtattttgtggagaaagggattacaagatgtatgagtataatgacttgctaacctttcaggattcagagaaagatgaagaaagaccatatctaaataatacacttcatcattttcatgtgtataaatgcttaaagtaccatctttgttgaggtggttcatgtatccagtttatccagtacagttatttgtcaagcttagctttgatttcaaaggacacgcttaccttgtctggcataagaattaatgctcatgtctgcagtggttgggtaggtcctgcttaggagaattaaaaaattcctctttccgtttggttgaatgttgcagtcaggaaccccaactcacttggaatgtttttatatgtaatcatttcccttgaagcttatactttataagggaagaaagaattcaggtgatatgggaaaactgcttggcagaccttcatcttctgcctcaactgtaaaccacatgtaaatgcttaatggagactgttttcattcttgtgatatttaacattcagaaaattacttcagctttggaaatactcaggctgtttttattctgcaggtaagtgttttgacttaagtactaatattccagaaatttttgaaagcagtaaccttaatttcctatgtatttcattccacttttgcatataggtcaaatagcaatgtgtatgcacattctctttagttaaggcaccaattgttttggttggttttcctaagacatactttaaaaagatgttctataaatttcctagttaaattatggggattttggagtatgtacatgataaattataatacgtatatggttgaagttattttattttttactaatgaattattttaatattccttattgaataaatgctgtaacttgtttgctatggaacttattcttaaagttctagttaaaaataatttttccacatgcatgaaaatatgtattaatcagaggtggcttaattacattgaaattgcttttttgttgttgtttttttactgaaataactcatgtttgtgtagaagaatgcctgtttactcagagtttatattttccttcagttatattttaaatcaaaaggtctgggtaatgtatacttttgattaatatatactttttttaaaaaacaaaaaacaatgtaatggttaatagtagaaatgtgccacacttttcaagttttatataacatatgaaattcagttaaaagaatgtgtgtttcataatgacttttaactggtaaaaatattacttgcacgaagtacttgatgtatggttatcctgaaatttcggagtatttggtgtgttctttgtctaaaaatagtctgttttgtcagtccttcagaatattatttattctgaagattgtccctcttgcacttggcagtttattttcggggatacattgttgggggagaggggtttctgccactctttccagattgagtctgtgctgtttaaggaggactaccatcctgcaactctttttctaattggggcacagaggatgtcgctaaagaaaagttgaagagccctttcagcactttctcatctgtggagaagatggaatcttaaaatacatttggagttttatctgttttacaagtccattgatggcctaagttcctcctgttttctgctgtttgatctctaaggaactcctgttgctaaatatgaagagtatggaacattcatatagtctctgtgaagcatggggggagggaagacatttctttttcttataggctttatgctcaaatgtcatagtctcctttcaaagaattgtgttgcattttaaatgcacccagcttaagtagaagacattgaaggatgcattaattttcaggaactattttgaattatgaaaagattcccaattgaaaaaattattcaacaagtaaaagctaagaaatttcattgaaatcataaggcagtttaagcataaattgataagtgaatatccgttgttatattctagtaagttctttttaaccttaatttattaaatatatattggttagatgcg

SEQ ID NO: 331093 - DNA, 1650 bp, Homo sapiens
  misc_feature (1248)..(1248): n is a, c, g, or t
  misc_feature (1250)..(1251): n is a, c, g, or t
ctccctcctccctctctccctccctctggcgtctccagccgactttcgcttcccgtcagcagcctttggcggaagagtgtcccgcctcttccgctctacagcggaggtggctgtggcggtggcgctggtggctgcggcggcggcggcggcagcggcgctcgagcggttcctgtcagggtcagccggcgggccccctgggtggtccacctgcaaatcgcggagcggcgccccagggatcgatggcgatgaactataacgcgaaggatgaagtggacggtgggcccccgtgtgctccggggggcaccgcgaagactcggagaccggataacacggccttcaaacagcaacggctgccagcttggcagcccatccttacggctggcacggtgctacctattttcttcatcatcggtctcatcttcattcccatcggcattggcatttttgtcacctccaacaacatccgcgagatcgagattgattataccggaacagagccttccagtccctgtaataaatgtttatctccggatgtgacaccttgcttttgtaccattaacttcacactggaaaagtcatttgagggcaacgtgtttatgtattatggactgtctaatttctatcaaaaccatcgtcgttacgtgaaatctcgagatgatagtcaactaaatggagattctagtgctttgcttaatcccagtaaggaatgtgaaccttatcgaagaaatgaagacaaaccaattgctccttgtggagctattgccaacagcatgtttaatgatacattagaattgtttctcattggcaatgattcttatcctatacctatcgctttgaaaaagaaaggtattgcttggtggacagataaaaatgtgaaattcagaaatccccctggaggagacaacctggaagaacgatttaaaggtacaacaaagcctgtgaactggcttaaaccagtttacatgctggattctgacccagataataatggattcataaatgaggattttattgtttggatgcgtactgcagcattacctacttttcgcaagttgtatcgtcttatagaaaggaaaagtgatttacatccaacattaccagctggccgatactctttgaatgtcacatacagcagcagcatatctccctattatagaccagaatacaggaatatcgagcacttaagtaacttagctgactttacacaggtaataataaagagttgaggttcataaccagaaaaaaaanannaaaaaaaaaaggggggggggcgaatgatacaataacattatcggcagagggagaggacacaactaaaggccgccaaccccccgcaccttcttttatgatatgcaagacggtgcatactagatatgagacgtgactttattaatatcaataaaggcgcggaggagagtgactacaacaacacgccggcgaagcggaaaacagcgaaccgggccaggacaactgagcgagaaaaaaccccacgtcgaggcgggggcaaaagagagagggcacacccacgaccaagacccaacccacgcacgacacccaaacacagagcacggcgtgaacgacacaacacaccacaacaccgggcgcgaccaacaccacccgccgaccgacaccacgaaaacccaccggcca

SEQ ID NO: 331094 - DNA, 3814 bp, Homo sapiens
ctccctcctccctctctccctccctctggcgtctccagccgactttcgcttcccgtcagcagcctttggcggaagagtgtcccgcctcttccgctctacagcggaggtggctgtggcggtggcgctggtggctgcggcggcggcggcggcagcggcgctcgagcggttcctgtcagggtcagccggcgggccccctgggtggtccacctgcaaatcgcggagcggcgccccagggatcgatggcgatgaactataacgcgaaggatgaagtggacggtgggcccccgtgtgctccggggggcaccgcgaagactcggagaccggataacacggccttcaaacagcaacggctgccagcttggcagcccatccttacggctggcacggtgctacctattttcttcatcatcggtctcatcttcattcccatcggcattggcatttttgtcacctccaacaacatccgcgagatcgagattgattataccggaacagagccttccagtccctgtaataaatgtttatctccggatgtgacaccttgcttttgtaccattaacttcacactggaaaagtcatttgagggcaacgtgtttatgtattatggactgtctaatttctatcaaaaccatcgtcgttacgtgaaatctcgagatgatagtcaactaaatggagattctagtgctttgcttaatcccagtaaggaatgtgaaccttatcgaagaaatgaagacaaaccaattgctccttgtggagctattgccaacagcatgtttaatgatacattagaattgtttctcattggcaatgattcttatcctatacctatcgctttgaaaaagaaaggtattgcttggtggacagataaaaatgtgaaattcagaaatccccctggaggagacaacctggaagaacgatttaaaggtacaacaaagcctgtgaactggcttaaaccagtttacatgctggattctgacccagataataatggattcataaatgaggattttattgtttggatgcgtactgcagcattacctacttttcgcaagttgtatcgtcttatagaaaggaaaagtgatttacatccaacattaccagctggccgatactctttgaatgtcacatacaattaccctgtacattattttgatggacgaaaacggatgatcttgagcactatttcatggatgggaggaaaaaatccatttttggggattgcttacatcgctgttggatccatctccttccttctgggagttgtactgctagtaattaatcataaatatagaaacagtagtaatacagctgacattaccatttaattttatattatgaaagcaaatcatctgcatgtgcatcaaggccagtcctattcaacctagctttcgaatgctgatatctggttagtatgtcattttgaagttggcacataacttttctaaaaaaaagcagtctttgttgtttgcttcttccctacggatgacttctaaaaatatatgacgggtataaaaaaattagctatattgatcatatcaacactgtaactgctgaaatggcattctaatgtttgctttttattcggacaggccacatgatgcatagagcctctttcatgtgacttgtgtctactgcttaaatctttatgctgtgttgatgatattatattgacatatgaagctgtatatgtgtatgtattttgtggagaaagggattacaagatgtatgagtataatgacttgctaacctttcaggattcagagaaagatgaagaaagaccatatctaaataatacacttcatcattttcatgtgtataaatgcttaaagtaccatctttgttgaggtggttcatgtatccagtttatccagtacagttatttgtcaagcttagctttgatttcaaaggacacgcttaccttgtctggcataagaattaatgctcatgtctgcagtggttgggtaggtcctgcttaggagaattaaaaaattcctctttccgtttggttgaatgttgcagtcaggaaccccaactcacttggaatgtttttatatgtaatcatttcccttgaagcttatactttataagggaagaaagaattcaggtgatatgggaaaactgcttggcagaccttcatcttctgcctcaactgtaaaccacatgtaaatgcttaatggagactgttttcattcttgtgatatttaacattcagaaaattacttcagctttggaaatactcaggctgtttttattctgcaggtaagtgttttgacttaagtactaatattccagaaatttttgaaagcagtaaccttaatttcctatgtatttcattccacttttgcatataggtcaaatagcaatgtgtatgcacattctctttagttaaggcaccaattgttttggttggttttcctaagacatactttaaaaagatgttctataaatttcctagttaaattatggggattttggagtatgtacatgataaattataatacgtatatggttgaagttattttattttttactaatgaattattttaatattccttattgaataaatgctgtaacttgtttgctatggaacttattcttaaagttctagttaaaaataatttttccacatgcatgaaaatatgtattaatcagaggtggcttaattacattgaaattgcttttttgttgttgtttttttactgaaataactcatgtttgtgtagaagaatgcctgtttactcagagtttatattttccttcagttatattttaaatcaaaaggtctgggtaatgtatacttttgattaatatatactttttttaaaaaacaaaaaacaatgtaatggttaatagtagaaatgtgccacacttttcaagttttatataacatatgaaattcagttaaaagaatgtgtgtttcataatgacttttaactggtaaaaatattacttgcacgaagtacttgatgtatggttatcctgaaatttcggagtatttggtgtgttctttgtctaaaaatagtctgttttgtcagtccttcagaatattatttattctgaagattgtccctcttgcacttggcagtttattttcggggatacattgttgggggagaggggtttctgccactctttccagattgagtctgtgctgtttaaggaggactaccatcctgcaactctttttctaattggggcacagaggatgtcgctaaagaaaagttgaagagccctttcagcactttctcatctgtggagaagatggaatcttaaaatacatttggagttttatctgttttacaagtccattgatggcctaagttcctcctgttttctgctgtttgatctctaaggaactcctgttgctaaatatgaagagtatggaacattcatatagtctctgtgaagcatggggggagggaagacatttctttttcttataggctttatgctcaaatgtcatagtctcctttcaaagaattgtgttgcattttaaatgcacccagcttaagtagaagacattgaaggatgcattaattttcaggaactattttgaattatgaaaagattcccaattgaaaaaattattcaacaagtaaaagctaagaaatttcattgaaatcataaggcagtttaagcataaattgataaaaatagctgtgtactactaattaatagaaaatcattcaaccaagagaagagtcaagtgaatatcgtttgtttatttgctagtgagtttctttgtaacgttgattttattaaatgataatatttggttagtatgtcctatgttaataaaaatgaacaaaattaa

SEQ ID NO: 331095 - DNA, 4092 bp, Homo sapiens
gtttcagagtgttttaggtatccactttctctaaggaagtgcttagttatatttttctcttgcagattgattataccggaacagagccttccagtccctgtaataaatgtttatctccggatgtgacaccttgcttttgtaccattaacttcacactggaaaagtcatttgagggcaacgtgtttatgtattatggactgtctaatttctatcaaaaccatcgtcgttacgtgaaatctcgagatgatagtcaactaaatggagattctagtgctttgcttaatcccagtaaggaatgtgaaccttatcgaagaaatgaagacaaaccaattgctccttgtggagctattgccaacagcatgtttaatgatacattagaattgtttctcattggcaatgattcttatcctatacctatcgctttgaaaaagaaaggtattgcttggtggacagataaaaatgtgaaattcagaaatccccctggaggagacaacctggaagaacgatttaaaggtacaacaaagcctgtgaactggcttaaaccagtttacatgctggattctgacccagataataatggattcataaatgaggattttattgtttggatgcgtactgcagcattacctacttttcgcaagttgtatcgtcttatagaaaggaaaagtgatttacatccaacattaccagctggccgatactctttgaatgtcacatacaattaccctgtacattattttgatggacgaaaacggatgatcttgagcactatttcatggatgggaggaaaaaatccatttttggggattgcttacatcgctgttggatccatctccttccttctgggagttgtactgctagtaattaatcataaatatagaaacagtagtaatacagctgacattaccatttaattttatattatgaaagcaaatcatctgcatgtgcatcaaggccagtcctattcaacctagctttcgaatgctgatatctggttagtatgtcattttgaagttggcacataacttttctaaaaaaaagcagtctttgttgtttgcttcttccctacggatgacttctaaaaatatatgacgggtataaaaaaattagctatattgatcatatcaacactgtaactgctgaaatggcattctaatgtttgctttttattcggacaggccacatgatgcatagagcctctttcatgtgacttgtgtctactgcttaaatctttatgctgtgttgatgatattatattgacatatgaagctgtatatgtgtatgtattttgtggagaaagggattacaagatgtatgagtataatgacttgctaacctttcaggattcagagaaagatgaagaaagaccatatctaaataatacacttcatcattttcatgtgtataaatgcttaaagtaccatctttgttgaggtggttcatgtatccagtttatccagtacagttatttgtcaagcttagctttgatttcaaaggacacgcttaccttgtctggcataagaattaatgctcatgtctgcagtggttgggtaggtcctgcttaggagaattaaaaaattcctctttccgtttggttgaatgttgcagtcaggaaccccaactcacttggaatgtttttatatgtaatcatttcccttgaagcttatactttataagggaagaaagaattcaggtgatatgggaaaactgcttggcagaccttcatcttctgcctcaactgtaaaccacatgtaaatgcttaatggagactgttttcattcttgtgatatttaacattcagaaaattacttcagctttggaaatactcaggctgtttttattctgcaggtaagtgttttgacttaagtactaatattccagaaatttttgaaagcagtaaccttaatttcctatgtatttcattccacttttgcatataggtcaaatagcaatgtgtatgcacattctctttagttaaggcaccaattgttttggttggttttcctaagacatactttaaaaagatgttctataaatttcctagttaaattatggggattttggagtatgtacatgataaattataatacgtatatggttgaagttattttattttttactaatgaattattttaatattccttattgaataaatgctgtaacttgtttgctatggaacttattcttaaagttctagttaaaaataatttttccacatgcatgaaaatatgtattaatcagaggtggcttaattacattgaaattgcttttttgttgttgtttttttactgaaataactcatgtttgtgtagaagaatgcctgtttactcagagtttatattttccttcagttatattttaaatcaaaaggtctgggtaatgtatacttttgattaatatatactttttttaaaaaacaaaaaacaatgtaatggttaatagtagaaatgtgccacacttttcaagttttatataacatatgaaattcagttaaaagaatgtgtgtttcataatgacttttaactggtaaaaatattacttgcacgaagtacttgatgtatggttatcctgaaatttcggagtatttggtgtgttctttgtctaaaaatagtctgttttgtcagtccttcagaatattatttattctgaagattgtccctcttgcacttggcagtttattttcggggatacattgttgggggagaggggtttctgccactctttccagattgagtctgtgctgtttaaggaggactaccatcctgcaactctttttctaattggggcacagaggatgtcgctaaagaaaagttgaagagccctttcagcactttctcatctgtggagaagatggaatcttaaaatacatttggagttttatctgttttacaagtccattgatggcctaagttcctcctgttttctgctgtttgatctctaaggaactcctgttgctaaatatgaagagtatggaacattcatatagtctctgtgaagcatggggggagggaagacatttctttttcttataggctttatgctcaaatgtcatagtctcctttcaaagaattgtgttgcattttaaatgcacccagcttaagtagaagacattgaaggatgcattaattttcaggaactattttgaattatgaaaagattcccaattgaaaaaattattcaacaagtaaaagctaagaaatttcattgaaatcataaggcagtttaagcataaattgataaaaatagctgtgtactactaattaatagaaaatcattcaaccaagagaagagtcaagtgaatatcgtttgtttatttgctagtgagtttctttgtaacgttgattttattaaatgataatatttggttagtatgtcctatgttaataaaaatgaacaaaattaattttgctatgttcaggtgtcttgataaaataacaatgctccagtgttgttgcttacatttagcactaaattttaacacagggtcagtgagtccaggttttaacttcttcatgcctggatgggataaaatgtaattcattgttaaattaattcatatttgtatttattaatcactgtgacaacattaaccatttgttcttaccaggaagtggtcagattatcatctgagttacagttagactggctaagtttggtattagatcaaggggaatgtccagtaaacagagaggtaagcatgatggaaataatgaagtggggtacacaggaaaaacctgactagtgaggaggagcagctgagagatagggtcagtgaatgcggttcagcctgctacctctcctgtcttcatagaaccattgccttagaattattgtatgacacgttttttgttggttaagctgtaaggttttgttctttgtgaacatgggtattttgaggggagggtggagggagtagggaagtggtccttttacaagaattttgatgcataagtgtctattgtagggtttggatgatctagtaaagtgttttagaacccctttttatcccatgcaccattcagtaaacataaaaatcacaattctgctaatgtcatttggaacttcaaaataaatatcttgtctaaaaacaaa

SEQ ID NO: 331096 - DNA, 4453 bp, Homo sapiens
ctccctcctccctctctccctccctctggcgtctccagccgactttcgcttcccgtcagcagcctttggcggaagagtgtcccgcctcttccgctctacagcggaggtggctgtggcggtggcgctggtggctgcggcggcggcggcggcagcggcgctcgagcggttcctgtcagggtcagccggcgggccccctgggtggtccacctgcaaatcgcggagcggcgccccagggatcgatggcgatgaactataacgcgaaggatgaagtggacggtgggcccccgtgtgctccggggggcaccgcgaagactcggagaccggataacacggccttcaaacagcaacggctgccagcttggcagcccatccttacggctggcacggtgctacctattttcttcatcatcggtctcatcttcattcccatcggcattggcatttttgtcacctccaacaacatccgcgagatcgagattgattataccggaacagagccttccagtccctgtaataaatgtttatctccggatgtgacaccttgcttttgtaccattaacttcacactggaaaagtcatttgagggcaacgtgtttatgtattatggactgtctaatttctatcaaaaccatcgtcgttacgtgaaatctcgagatgatagtcaactaaatggagattctagtgctttgcttaatcccagtaaggaatgtgaaccttatcgaagaaatgaagacaaaccaattgctccttgtggagctattgccaacagcatgtttaatgatacattagaattgtttctcattggcaatgattcttatcctatacctatcgctttgaaaaagaaaggtattgcttggtggacagataaaaatgtgaaattcagaaatccccctggaggagacaacctggaagaacgatttaaaggtacaacaaagcctgtgaactggcttaaaccagtttacatgctggattctgacccagataataatggattcataaatgaggattttattgtttggatgcgtactgcagcattacctacttttcgcaagttgtatcgtcttatagaaaggaaaagtgatttacatccaacattaccagctggccgatactctttgaatgtcacatacaattaccctgtacattattttgatggacgaaaacggatgatcttgagcactatttcatggatgggaggaaaaaatccatttttggggattgcttacatcgctgttggatccatctccttccttctgggagttgtactgctagtaattaatcataaatatagaaacagtagtaatacagctgacattaccatttaattttatattatgaaagcaaatcatctgcatgtgcatcaaggccagtcctattcaacctagctttcgaatgctgatatctggttagtatgtcattttgaagttggcacataacttttctaaaaaaaagcagtctttgttgtttgcttcttccctacggatgacttctaaaaatatatgacgggtataatctaatgtttgctttttattcggacaggccacatgatgcatagagcctctttcatgtgacttgtgtctactgcttaaatctttatgctgtgttgatgatattatattgacatatgaagctgtatatgtgtatgtattttgtggagaaagggattacaagatgtatgagtataatgacttgctaacctttcaggattcagagaaagatgaagaaagaccatatctaaataatacacttcatcattttcatgtgtataaatgcttaaagtaccatctttgttgaggtggttcatgtatccagtttatccagtacagttatttgtcaagcttagctttgatttcaaaggacacgcttaccttgtctggcataagaattaatgctcatgtctgcagtggttgggtaggtcctgcttaggagaattaaaaaattcctctttccgtttggttgaatgttgcagtcaggaaccccaactcacttggaatgtttttatatgtaatcatttcccttgaagcttatactttataagggaagaaagaattcaggtgatatgggaaaactgcttggcagaccttcatcttctgcctcaactgtaaaccacatgtaaatgcttaatggagactgttttcattcttgtgatatttaacattcagaaaattacttcagctttggaaatactcaggctgtttttattctgcaggtaagtgttttgacttaagtactaatattccagaaatttttgaaagcagtaaccttaatttcctatgtatttcattccacttttgcatataggtcaaatagcaatgtgtatgcacattctctttagttaaggcaccaattgttttggttggttttcctaagacatactttaaaaagatgttctataaatttcctagttaaattatggggattttggagtatgtacatgataaattataatacgtatatggttgaagttattttattttttactaatgaattattttaatattccttattgaataaatgctgtaacttgtttgctatggaacttattcttaaagttctagttaaaaataatttttccacatgcatgaaaatatgtattaatcagaggtggcttaattacattgaaattgcttttttgttgttgtttttttactgaaataactcatgtttgtgtagaagaatgcctgtttactcagagtttatattttccttcagttatattttaaatcaaaaggtctgggtaatgtatacttttgattaatatatactttttttaaaaaacaaaaaacaatgtaatggttaatagtagaaatgtgccacacttttcaagttttatataacatatgaaattcagttaaaagaatgtgtgtttcataatgacttttaactggtaaaaatattacttgcacgaagtacttgatgtatggttatcctgaaatttcggagtatttggtgtgttctttgtctaaaaatagtctgttttgtcagtccttcagaatattatttattctgaagattgtccctcttgcacttggcagtttattttcggggatacattgttgggggagaggggtttctgccactctttccagattgagtctgtgctgtttaaggaggactaccatcctgcaactctttttctaattggggcacagaggatgtcgctaaagaaaagttgaagagccctttcagcactttctcatctgtggagaagatggaatcttaaaatacatttggagttttatctgttttacaagtccattgatggcctaagttcctcctgttttctgctgtttgatctctaaggaactcctgttgctaaatatgaagagtatggaacattcatatagtctctgtgaagcatggggggagggaagacatttctttttcttataggctttatgctcaaatgtcatagtctcctttcaaagaattgtgttgcattttaaatgcacccagcttaagtagaagacattgaaggatgcattaattttcaggaactattttgaattatgaaaagattcccaattgaaaaaattattcaacaagtaaaagctaagaaatttcattgaaatcataaggcagtttaagcataaattgataaaaatagctgtgtactactaattaatagaaaatcattcaaccaagagaagagtcaagtgaatatcgtttgtttatttgctagtgagtttctttgtaacgttgattttattaaatgataatatttggttagtatgtcctatgttaataaaaatgaacaaaattaattttgctatgttcaggtgtcttgataaaataacaatgctccagtgttgttgcttacatttagcactaaattttaacacagggtcagtgagtccaggttttaacttcttcatgcctggatgggataaaatgtaattcattgttaaattaattcatatttgtatttattaatcactgtgacaacattaaccatttgttcttaccaggaagtggtcagattatcatctgagttacagttagactggctaagtttggtattagatcaaggggaatgtccagtaaacagagaggtaagcatgatggaaataatgaagtggggtacacaggaaaaacctgactagtgaggaggagcagctgagagatagggtcagtgaatgcggttcagcctgctacctctcctgtcttcatagaaccattgccttagaattattgtatgacacgttttttgttggttaagctgtaaggttttgttctttgtgaacatgggtattttgaggggagggtggagggagtagggaagtggtccttttacaagaattttgatgcataagtgtctattgtagggtttggatgatctagtaaagtgttttagaacccctttttatcccatgcaccattcagtaaacataaaaatcacaattctgctaatgtcatttggaacttcaaaataaatatcttgtctaaaaacaaa

SEQ ID NO: 331097 - DNA, 6220 bp, Homo sapiens
  misc_feature (2783)..(2783): n is a, c, g, or t
  misc_feature (2794)..(2794): n is a, c, g, or t
  misc_feature (5818)..(5818): n is a, c, g, or t
  misc_feature (5820)..(5821): n is a, c, g, or t
ctccctcctccctctctccctccctctggcgtctccagccgactttcgcttcccgtcagcagcctttggcggaagagtgtcccgcctcttccgctctacagcggaggtggctgtggcggtggcgctggtggctgcggcggcggcggcggcagcggcgctcgagcggttcctgtcagggtcagccggcgggccccctgggtggtccacctgcaaatcgcggagcggcgccccagggatcgatggcgatgaactataacgcgaaggatgaagtggacggtgggcccccgtgtgctccggggggcaccgcgaagactcggagaccggataacacggccttcaaacagcaacggctgccagcttggcagcccatccttacggctggcacggtgctacctattttcttcatcatcggtctcatcttcattcccatcggcattggcatttttgtcacctccaacaacatccgcgagatcgagattgattataccggaacagagccttccagtccctgtaataaatgtttatctccggatgtgacaccttgcttttgtaccattaacttcacactggaaaagtcatttgagggcaacgtgtttatgtattatggactgtctaatttctatcaaaaccatcgtcgttacgtgaaatctcgagatgatagtcaactaaatggagattctagtgctttgcttaatcccagtaaggaatgtgaaccttatcgaagaaatgaagacaaaccaattgctccttgtggagctattgccaacagcatgtttaatgatacattagaattgtttctcattggcaatgattcttatcctatacctatcgctttgaaaaagaaaggtattgcttggtggacagataaaaatgtgaaattcagaaatccccctggaggagacaacctggaagaacgatttaaaggtacaacaaagcctgtgaactggcttaaaccagtttacatgctggattctgacccagataataatggattcataaatgaggattttattgtttggatgcgtactgcagcattacctacttttcgcaagttgtatcgtcttatagaaaggaaaagtgatttacatccaacattaccagctggccgatactctttgaatgtcacatacagcagcagcatatctccctattatagaccagaatacaggaatatcgagcacttaagtaacttagctgactttacacaggtaataataaagagttgaggttcataaccaggctgttgactccaaaggccataattttactctcagctaccaacatagcctgcgtcttagctagttcactcagttacaccaacccatatctgcatagatgcagtcttttttaggagggaaatactcagtaatttcttttattctaaccaaagtctttgcatcttttaatctggagtctatattttacatacactgtgagtgaagagatctctcaatattagaattgtaaatgtttgctgatctttgcatttttatttccataatccaaatgagtcataatccatatgggttttggttttaaaatggattagtaaatggttaaattaatagacccaatttcaaaataaggttttttttgaattctactctcttgatgttgcacctgaatacacaagtaaatatggcctgctatggcaggctaaaagtgaccaagtttttgaaactaaatccacattggagcagttttggacagacagacccacttcaagtgctggtagaaataacattatcctgaggggatagtcaaactagagagtagctctgttaaaattagcatccagaaaatctctagagagtaagggcaaatttagcaacctgtagcctaaggcacaatgaagggaagtctgtgaagcactgaggaatttttagttgatagatgatttccatacaggaattctgcagcagggtcccaggtttgaaagaactatctaaaggaatgcatgatatatggcagattgagaagacttgataagacaggaatttggacctgcaaaacatcaagggttaattatcaaaattgggcataaggtgggaactaaagactagaatgatggcagaagcctgtttctttaggtttgggagactagagagagacaagcatgggtaatttgatactgtatcccacagaatgttgggttagctagaggtcttaaaatcattcctgccttagtttagggttaatttaagaagttagcagaactgaacctgccattgggagttagggacccatagggacccatctgtggggatggagagttgaagaaactagagaaacagatggggcctaaccctagattcaaaagatgcttttgaaaaagttgtaaactttttgcatggagacttggttctgtcttctttgctgccttacctcttgcaaaattctacaactggtccatgtagataattcatctagtacactggtgccctgtttcctaaatctccttaacagcccacccttcactgccactgttagctatcagctgtgtcacagagtgagttttgccattgctccaaatcagcaagttaaaacttttttattaccatgctttttgatcttttgctcagagccttttcatagtctcataactacactcttgatacatgtgttctttgagctcatggagacttctagttcctgatttttccattttctcctggtctgtcagtctccttgtgtgggcttcattgttcacttgaagtatttttttcacattgcattcctttgaggccttttgccccttccatgtaatgagagcaaaagcaccngagaaactacntaacctttacatttatttgttttggtaaaatattttggcttttactactaacatttagtttgctaaatcagtctttcaagataatactttgtgtgtgtgtgtgtgatttagaacgtaggagtgaggtacctgtatatcctagaattacacaaatgaattaccaacaattaaatggcaacttttaaaattgtattttaaacatcaagtaaccagagatggaaaaatcttcctataccctcttcagattaccctgtacattattttgatggacgaaaacggatgatcttgagcactatttcatggatgggaggaaaaaatccatttttggggattgcttacatcgctgttggatccatctccttccttctgggagttgtactgctagtaattaatcataaatatagaaacagtagtaatacagctgacattaccatttaattttatattatgaaagcaaatcatctgcatgtgcatcaaggccagtcctattcaacctagctttcgaatgctgatatctggttagtatgtcattttgaagttggcacataacttttctaaaaaaaagcagtctttgttgtttgcttcttccctacggatgacttctaaaaatatatgacgggtataaaaaaattagctatattgatcatatcaacactgtaactgctgaaatggcattctaatgtttgctttttattcggacaggccacatgatgcatagagcctctttcatgtgacttgtgtctactgcttaaatctttatgctgtgttgatgatattatattgacatatgaagctgtatatgtgtatgtattttgtggagaaagggattacaagatgtatgagtataatgacttgctaacctttcaggattcagagaaagatgaagaaagaccatatctaaataatacacttcatcattttcatgtgtataaatgcttaaagtaccatctttgttgaggtggttcatgtatccagtttatccagtacagttatttgtcaagcttagctttgatttcaaaggacacgcttaccttgtctggcataagaattaatgctcatgtctgcagtggttgggtaggtcctgcttaggagaattaaaaaattcctctttccgtttggttgaatgttgcagtcaggaaccccaactcacttggaatgtttttatatgtaatcatttcccttgaagcttatactttataagggaagaaagaattcaggtgatatgggaaaactgcttggcagaccttcatcttctgcctcaactgtaaaccacatgtaaatgcttaatggagactgttttcattcttgtgatatttaacattcagaaaattacttcagctttggaaatactcaggctgtttttattctgcaggtaagtgttttgacttaagtactaatattccagaaatttttgaaagcagtaaccttaatttcctatgtatttcattccacttttgcatataggtcaaatagcaatgtgtatgcacattctctttagttaaggcaccaattgttttggttggttttcctaagacatactttaaaaagatgttctataaatttcctagttaaattatggggattttggagtatgtacatgataaattataatacgtatatggttgaagttattttattttttactaatgaattattttaatattccttattgaataaatgctgtaacttgtttgctatggaacttattcttaaagttctagttaaaaataatttttccacatgcatgaaaatatgtattaatcagaggtggcttaattacattgaaattgcttttttgttgttgtttttttactgaaataactcatgtttgtgtagaagaatgcctgtttactcagagtttatattttccttcagttatattttaaatcaaaaggtctgggtaatgtatacttttgattaatatatactttttttaaaaaacaaaaaacaatgtaatggttaatagtagaaatgtgccacacttttcaagttttatataacatatgaaattcagttaaaagaatgtgtgtttcataatgacttttaactggtaaaaatattacttgcacgaagtacttgatgtatggttatcctgaaatttcggagtatttggtgtgttctttgtctaaaaatagtctgttttgtcagtccttcagaatattatttattctgaagattgtccctcttgcacttggcagtttattttcggggatacattgttgggggagaggggtttctgccactctttccagattgagtctgtgctgtttaaggaggactaccatcctgcaactctttttctaattggggcacagaggatgtcgctaaagaaaagttgaagagccctttcagcactttctcatctgtggagaagatggaatcttaaaatacatttggagttttatctgttttacaagtccattgatggcctaagttcctcctgttttctgctgtttgatctctaaggaactcctgttgctaaatatgaagagtatggaacattcatatagtctctgtgaagcatggggggagggaagacatttctttttcttataggctttatgctcaaatgtcatagtctcctttcaaagaattgtgttgcattttaaatgcacccagcttaagtagaagacattgaaggatgcattaattttcaggaactattttgaattatgaaaagattcccaattgaaaaaattattcaacaagtaaaagctaagaaatttcattgaaatcataaggcagtttaagcataaattgataaaaatagctgtgtactactaattaatagaaaatcattcaaccaagagaagagtcaagtgaatatcgtttgtttatttgctagtgagtttctttgtaacgttgattttattaaatgataatatttggttagtatgtcctatgttaataaaaatgaacaaaattaaaaaaaaaaaaaaaaaaaaaaaaaaaaaaaaaaaaaaaaaaaaaaaaaaaaaaaaaaaaaaaaaaaaaaaaaaaaaaaaaaaaaaaaaaaaaaaaaanannaaaaaaaaaaggggggggggcgaatgatacaataacattatcggcagagggagaggacacaactaaaggccgccaaccccccgcaccttcttttatgatatgcaagacggtgcatactagatatgagacgtgactttattaatatcaataaaggcgcggaggagagtgactacaacaacacgccggcgaagcggaaaacagcgaaccgggccaggacaactgagcgagaaaaaaccccacgtcgaggcgggggcaaaagagagagggcacacccacgaccaagacccaacccacgcacgacacccaaacacagagcacggcgtgaacgacacaacacaccacaacaccgggcgcgaccaacaccacccgccgaccgacaccacgaaaacccaccggcca

SEQ ID NO: 331098 - DNA, 4729 bp, Homo sapiens
  misc_feature (2783)..(2783): n is a, c, g, or t
  misc_feature (2794)..(2794): n is a, c, g, or t
ctccctcctccctctctccctccctctggcgtctccagccgactttcgcttcccgtcagcagcctttggcggaagagtgtcccgcctcttccgctctacagcggaggtggctgtggcggtggcgctggtggctgcggcggcggcggcggcagcggcgctcgagcggttcctgtcagggtcagccggcgggccccctgggtggtccacctgcaaatcgcggagcggcgccccagggatcgatggcgatgaactataacgcgaaggatgaagtggacggtgggcccccgtgtgctccggggggcaccgcgaagactcggagaccggataacacggccttcaaacagcaacggctgccagcttggcagcccatccttacggctggcacggtgctacctattttcttcatcatcggtctcatcttcattcccatcggcattggcatttttgtcacctccaacaacatccgcgagatcgagattgattataccggaacagagccttccagtccctgtaataaatgtttatctccggatgtgacaccttgcttttgtaccattaacttcacactggaaaagtcatttgagggcaacgtgtttatgtattatggactgtctaatttctatcaaaaccatcgtcgttacgtgaaatctcgagatgatagtcaactaaatggagattctagtgctttgcttaatcccagtaaggaatgtgaaccttatcgaagaaatgaagacaaaccaattgctccttgtggagctattgccaacagcatgtttaatgatacattagaattgtttctcattggcaatgattcttatcctatacctatcgctttgaaaaagaaaggtattgcttggtggacagataaaaatgtgaaattcagaaatccccctggaggagacaacctggaagaacgatttaaaggtacaacaaagcctgtgaactggcttaaaccagtttacatgctggattctgacccagataataatggattcataaatgaggattttattgtttggatgcgtactgcagcattacctacttttcgcaagttgtatcgtcttatagaaaggaaaagtgatttacatccaacattaccagctggccgatactctttgaatgtcacatacagcagcagcatatctccctattatagaccagaatacaggaatatcgagcacttaagtaacttagctgactttacacaggtaataataaagagttgaggttcataaccaggctgttgactccaaaggccataattttactctcagctaccaacatagcctgcgtcttagctagttcactcagttacaccaacccatatctgcatagatgcagtcttttttaggagggaaatactcagtaatttcttttattctaaccaaagtctttgcatcttttaatctggagtctatattttacatacactgtgagtgaagagatctctcaatattagaattgtaaatgtttgctgatctttgcatttttatttccataatccaaatgagtcataatccatatgggttttggttttaaaatggattagtaaatggttaaattaatagacccaatttcaaaataaggttttttttgaattctactctcttgatgttgcacctgaatacacaagtaaatatggcctgctatggcaggctaaaagtgaccaagtttttgaaactaaatccacattggagcagttttggacagacagacccacttcaagtgctggtagaaataacattatcctgaggggatagtcaaactagagagtagctctgttaaaattagcatccagaaaatctctagagagtaagggcaaatttagcaacctgtagcctaaggcacaatgaagggaagtctgtgaagcactgaggaatttttagttgatagatgatttccatacaggaattctgcagcagggtcccaggtttgaaagaactatctaaaggaatgcatgatatatggcagattgagaagacttgataagacaggaatttggacctgcaaaacatcaagggttaattatcaaaattgggcataaggtgggaactaaagactagaatgatggcagaagcctgtttctttaggtttgggagactagagagagacaagcatgggtaatttgatactgtatcccacagaatgttgggttagctagaggtcttaaaatcattcctgccttagtttagggttaatttaagaagttagcagaactgaacctgccattgggagttagggacccatagggacccatctgtggggatggagagttgaagaaactagagaaacagatggggcctaaccctagattcaaaagatgcttttgaaaaagttgtaaactttttgcatggagacttggttctgtcttctttgctgccttacctcttgcaaaattctacaactggtccatgtagataattcatctagtacactggtgccctgtttcctaaatctccttaacagcccacccttcactgccactgttagctatcagctgtgtcacagagtgagttttgccattgctccaaatcagcaagttaaaacttttttattaccatgctttttgatcttttgctcagagccttttcatagtctcataactacactcttgatacatgtgttctttgagctcatggagacttctagttcctgatttttccattttctcctggtctgtcagtctccttgtgtgggcttcattgttcacttgaagtatttttttcacattgcattcctttgaggccttttgccccttccatgtaatgagagcaaaagcaccngagaaactacntaacctttacatttatttgttttggtaaaatattttggcttttactactaacatttagtttgctaaatcagtctttcaagataatactttgtgtgtgtgtgtgtgatttagaacgtaggagtgaggtacctgtatatcctagaattacacaaatgaattaccaacaattaaatggcaacttttaaaattgtattttaaacatcaagtaaccagagatggaaaaatcttcctataccctcttcagattaccctgtacattattttgatggacgaaaacggatgatcttgagcactatttcatggatgggaggaaaaaatccatttttggggattgcttacatcgctgttggatccatctccttccttctgggagttgtactgctagtaattaatcataaatatagaaacagtagtaatacagctgacattaccatttaattttatattatgaaagcaaatcatctgcatgtgcatcaaggccagtcctattcaacctagctttcgaatgctgatatctggttagtatgtcattttgaagttggcacataacttttctaaaaaaaagcagtctttgttgtttgcttcttccctacggatgacttctaaaaatatatgacgggtataaaaaaattagctatattgatcatatcaacactgtaactgctgaaatggcattctaatgtttgctttttattcggacaggccacatgatgcatagagcctctttcatgtgacttgtgtctactgcttaaatctttatgctgtgttgatgatattatattgacatatgaagctgtatatgtgtatgtattttgtggagaaagggattacaagatgtatgagtataatgacttgctaacctttcaggattcagagaaagatgaagaaagaccatatctaaataatacacttcatcattttcatgtgtataaatgcttaaagtaccatctttgttgaggtggttcatgtatccagtttatccagtacagttatttgtcaagcttagctttgatttcaaaggacacgcttaccttgtctggcataagaattaatgctcatgtctgcagtggttgggtaggtcctgcttaggagaattaaaaaattcctctttccgtttggttgaatgttgcagtcaggaaccccaactcacttggaatgtttttatatgtaatcatttcccttgaagcttatactttataagggaagaaagaattcaggtgatatgggaaaactgcttggcagaccttcatcttctgcctcaactgtaaaccacatgtaaatgcttaatggagactgttttcattcttgtgatatttaacattcagaaaattacttcagctttggaaatactcaggctgtttttattctgcaggtaagtgttttgacttaagtactaatattccagaaatttttgaaagcagtaaccttaatttcctatgtatttcattccacttttgcatataggtcaaatagcaatgtgtatgcacattctctttagttaaggcaccaattgttttggttggttttcctaagacatactttaaaaagatgttctataaatttcctagttaaattatggggattttggagtatgtacatgataaattataatacgtatatggttgaagttattttattttttactaatgaattattttaatattccttattgaataaatgctgtaacttgtttgctatggaacttattcttaaagttctagttaaaaataatttttccacatgcatgaaaatatgtattaatcagaggtggcttaattacattgaaattgcttttttgttgttgtttttttactgaaataactcatgtttgtgtagaagaatgcctgtttactcagagtttatattttccttcagttatattttaaatcaaaaggtctgggtaatgtatacttttgattaatatatacttttttt

SEQ ID NO: 331099 - DNA, 237 bp, Homo sapiens
tgatggtgccgtacatatcagaacttcttttttatggctaagtattccattgtatggctatgccacaatctgtttacttagtcatatgtccacagctacttgagatgtttatagtttttagctatttttgaataaggctgctatgaatacttatgtacatttctttgtgtggacatgtattttgatttttcttaggtaaatacccaggcgtgggatggagggtcatatggtaaatat

SEQ ID NO: 331100 - DNA, 117 bp, Homo sapiens
tccagtgtggacagggaagggagaaagtgctgtggaagaaagaaaatgactggagcaggatctcagagaggcttgtgccaaagttgggtacccaagacccagctggtatctgtcaga

SEQ ID NO: 331101 - DNA, 330 bp, Homo sapiens
ctggaattcaggagtcactatgtgggacactgtgagccggtagaatattctaaaactcagaaatacatattaatcctcagaaattagaaatttcttttccaagtttttcattttccatttcttggactatttgctgttacaatctgtgtttactataatctttccaaattaaatattagttttgtctctgttctacttatttgatttattcagtcattccctcccacttttcaattattcagcctgttaaaagtacaactgtttcttttctggaaaaaataagccaaagctagaaattgttcaagcaggagattttgtttgtggagtgaa

SEQ ID NO: 331102 - DNA, 310 bp, Homo sapiens
gggcaaggaaaggataacatagcaggtccttctagtgcatctgagaaggttcatcttaaggacttttctggtgatgaccagaagctgggggccagagcagaaaagcacaaggggttccccaggaaagaggatcactcagatggctgtggtaaggagccagggtgtgagagagggtgacccttgggctcaggctgggtgtgttacctgggtccagggagaggcaggtgcccaggaaaagatgggtggtccagggacaggcctgctgcctatgggagcaggtgagggatgcgtgaattctcctggtcccacg

SEQ ID NO: 331103 - DNA, 293 bp, Homo sapiens
tgcatattattcccagcagctgcaaaaggcaagcccagccctcctggaatcagcagtcctgcccaaagttataatttggccatgggtaagattcaagcccgctaacctgttggaatgcagctgtcaggaggtgatggacaggaagaggaggcggccagcttcctcatggttccagcagagaactggcctaaaaaacgaggaaagcttctgggactctttgctctgagtagaaagggatttaatagtgctttccctacttgtgtgtagaggtgggcaacagccagtgccttgca

SEQ ID NO: 331104 - DNA, 384 bp, Homo sapiens
actggcaagcatccttaggaaaccagaactcaaatgatgtagggaagttaccaaaggctgcttagtgctgggactcagaagctgcaaggacgtatctctccagaaccatcaggtcaggtgtagggaggcaagagatgttccaatctagtgacaaggtcttagagtgagggaatgtcttgtccccaccatgactcacccctgagttcctccctatcctgtatcttcctccagaagtttagggcccagagtgtggctgccagagtcacctagagccactgcatacacaaaggcatcctacaacccacagagcagtctttcttgctgtaaagaggggtccctaatctgtcccagcacagagctcgccttgttttgttttttgttttt

SEQ ID NO: 331105 - DNA, 171 bp, Homo sapiens
ccgggctagagccgactgactgcaagtgaggggcaggccctcagagaggagacttccctgcggagcccactctgctggtttctgtgtgcttcatttggctctttgcttctgcagataacctagacccactgacgctgcgacctaacactccgcttcctatgctgccctgtc

SEQ ID NO: 331106 - DNA, 279 bp, Homo sapiens
caactatcttgtgcgtcttataatggatgtgaatattctccattagctgccttggcaactactgatgcctccttgaaaaaatattgaacttgtaaacagattccatttaatagatagatgggtttcattataggaattgaggatatcagcactaagctagttagtaaccttagtaaatgatgagacttggtgttaggctgggtaagaggagatatcaccttatgtctctgtaataaattctagagaagctatgtatttttcacctctatcacatgcttg

SEQ ID NO: 331107 - DNA, 132 bp, Homo sapiens
acaaaacatagcatttcactacaaaatgaactctctccagggaccccaataccacctgtaatttagatgaaaaggcccaaagagaaggcttttctttcatggcttaaaccctggcccattctatcactaata

SEQ ID NO: 331108 - DNA, 453 bp, Homo sapiens
aaatggacttgggcaaccctatcaaaatcaactggccataggtgtgtgggtttatttctgaactatcaattttattctattggtcaacatatttatccttatgccagtatgacactgttttgataatgtggttttgtattaagttttgaagttaggaattgtgagtccttccgctttgttcttcattttcaaggttattttgactattcagggccccttgcaatttaatatgaagttgaggattgagttttccacttctgccaaaaaaaggctgttggaattttgatagggattgcattgaatctgtagataactttgggtagtattgacaccttaaatatattgtcttcctactcatgacttaataagggatgtttttccatttatttaggtcttctttgattttttcagcaatgttttgtagttttcagtgtacaaaactttcacatgttt

SEQ ID NO: 331109 - DNA, 1775 bp, Homo sapiens
ttctatgaggccagtcaccctagttttgattctggaaagaacgtgtgtaggtcaaaaggagttggctgatcaaacgttcttattttcccccttgaattctgacatcctgattctgaatttctccaacagtaatccataagatgctatatttctgaagtattggcctgattgagcacatcaaaattccatttctttccgtttctcatctggtgttttcagacataactaacactgaggaatagaatggaagtagagtataagacacttttgaaagcttgtattttcatatactctatttggttctgttgtaacagattagctccagggtttataatcccaacctatagactgtttatacaggtttttaatcccacctatcctgttgtttgttctgtagcacataacacctcctaacatcatctctaatgttgtgctttattatgtatgttatatatagatttgtctcagattagaatgtgaattccccaagggcagagagttctttgtattttgctcacggatacatccaaaagcctaaaatggtgtcttggcatgtaatagaagtttaaagtgttccataaatgataaatgaatgaaggaatagttgccatccaggtgaatctaaaataaaggctgttaccttgctaccttctcacctaatactattttccctcttctcttgagggagaaacaaactgttgctacaaatctcactcttcaggagatatatcccccccatttactctttgtcaaagcttaacagtgtcaacaccatttgcataatatagtaattattgtctaaacaagaacaaatatatacattagtaggtgaattttcagttgcacaatcttttagtttgcataactaaggaatatgaaaatatctttagtctaggcgtagtgtctcgtgcctataatctcagaactgtgggaggccgaagcagatggatcacttgagcctaggagtttgagactgtcttggggcagtgcagaccctgtttctattttaaaaaaataaataaaatggcctggtatggtggcatgtgcctgtggtcccagctgcttgagaggctgaggtgggaagattgcttgagcctgagagtttgaggctgcagtgaactatgatcacgccactgtactccaggctgggagacagtgagatacttaaaaaaaagaaaaagtatcttcaaaaatgttctgacgtaatctgtgctgcctagcattttgttctccaagctgagtggaataatgcctttcatttacatgttaaatggaagcctatttttaggctaaatgtaagtcttaaagtactgagcagaaatatcttccacatcctattgttgcattaaatccctactgatattttaatggtaattgtgatagtacctgaataactattgtgtaagaataaagttaatgtaaaaaaatttttaagtgtgtagtcttactgagtacatttgcttttcatggtatcttttctctgtttatattcaagttttatgagcaatatgatgatgatgaaattggagctctggataatgcagaattggaaggttctattcaagtggacagcaatcgcttacaggaagttttgaatgactactataaagagaaggcagagaagtatagtgacttttccttccttgtttagctgttcttttttttaaaaaagaaaaaattccaaagaaaggtctatagtataactgaattgaggaaaaaattaacctagtcaaaatacatattgagaaaatgaaaaaggaaaaaagaaaagggga

SEQ ID NO: 331110 - DNA, 743 bp, Homo sapiens
gtgtggtgaggcctacagaagcggccttcagctggaccttggtctccccgccggacttcgagggtgtcatcgccgcccctgttgggggtgagcgccgcgcggctgcagcatgcctcacaggaagaaaaagccctttatagagaagaagaaagctgtgtcttttcacttggtccaccggagccaacgagatcctttagcagcagatgagagtgcaccccagagggttctattgcccacacaaaaaatagacaatgaagaaaggcgagcagaacagaggaagtatggagtgttctttgatgacgactatgactacctgcagcacctgaaggaaccatctgggccttcagagcttattccctcaagtaccttcagtgcacacaacaggagagaggagaaagaagaaacgctagtaattccaagcactggaattaagttgccttcatcagtgtttgcttcagagtttgaggaagatgttggattgttaaataaagcagctccagtttcaggacctcgactggattttgatcctgacattgttgcagctcttgatgatgattttgactttgatgatccagataatctgcttgaggatgactttattcttcaggccaataaggcaacaggagaggaagagggaatggatatacagtatgtgtggtttgtttcaaagcagagatgatgacctaagtgttactgcttcagtgggatggtaaccatagaacgttacagttggaagagacctt

SEQ ID NO: 331111 - DNA, 396 bp, Homo sapiens
gtgtggtgaggcctacagaagcggccttcagctggaccttggtctccccgccggacttcgagggtgtcatcgccgcccctgttgggggtgagcgccgcgcggctgcagcatgcctcacaggaagaaaaagccctttatagagaagaagaaagctgtgtcttttcacttggtccaccggagccaacgagatcctttagcagcagatgagagtgcaccccagagggttctattgcccacacaaaaagtaggtcctgttctttagccagtcagtttgtaggtagacaatagttttttttttctttttttttttttaaataaatagagtcttagcacgttgcccaggctggtctcgaactcctggacttaagcagtcctcccagcttggcctccaaaagt

SEQ ID NO: 331112 - DNA, 2422 bp, Homo sapiens
ttctatgaggccagtcaccctagttttgattctggaaagaacgtgtgtaggtcaaaaggagttggctgatcaaacgttcttattttcccccttgaattctgacatcctgattctgaatttctccaacagtaatccataagatgctatatttctgaagtattggcctgattgagcacatcaaaattccatttctttccgtttctcatctggtgttttcagacataactaacactgaggaatagaatggaagtagagtataagacacttttgaaagcttgtattttcatatactctatttggttctgttgtaacagattagctccagggtttataatcccaacctatagactgtttatacaggtttttaatcccacctatcctgttgtttgttctgtagcacataacacctcctaacatcatctctaatgttgtgctttattatgtatgttatatatagatttgtctcagattagaatgtgaattccccaagggcagagagttctttgtattttgctcacggatacatccaaaagcctaaaatggtgtcttggcatgtaatagaagtttaaagtgttccataaatgataaatgaatgaaggaatagttgccatccaggtgaatctaaaataaaggctgttaccttgctaccttctcacctaatactattttccctcttctcttgagggagaaacaaactgttgctacaaatctcactcttcaggagatatatcccccccatttactctttgtcaaagcttaacagtgtcaacaccatttgcataatatagtaattattgtctaaacaagaacaaatatatacattagtaggtgaattttcagttgcacaatcttttagtttgcataactaaggaatatgaaaatatctttagtctaggcgtagtgtctcgtgcctataatctcagaactgtgggaggccgaagcagatggatcacttgagcctaggagtttgagactgtcttggggcagtgcagaccctgtttctattttaaaaaaataaataaaatggcctggtatggtggcatgtgcctgtggtcccagctgcttgagaggctgaggtgggaagattgcttgagcctgagagtttgaggctgcagtgaactatgatcacgccactgtactccaggctgggagacagtgagatacttaaaaaaaagaaaaagtatcttcaaaaatgttctgacgtaatctgtgctgcctagcattttgttctccaagctgagtggaataatgcctttcatttacatgttaaatggaagcctatttttaggctaaatgtaagtcttaaagtactgagcagaaatatcttccacatcctattgttgcattaaatccctactgatattttaatggtaattgtgatagtacctgaataactattgtgtaagaataaagttaatgtaaaaaaatttttaagtgtgtagtcttactgagtacatttgcttttcatggtatcttttctctgtttatattcaagttttatgagcaatatgatgatgatgaaattggagctctggataatgcagaattggaaggttctattcaagtggacagcaatcgcttacaggaagttttgaatgactactataaagagaaggcagagaattgtgtaaaattgaatacccttgaacccttggaggatcaagacctgccaatgaatgagcttgatgagtctgaggaggaagaaatgattactgtagtccttgaagaagccaaagagaagtgggattgtgaatctatttgtagtacatactcaaatttatataaccatccacagcttatcaagtatcaaccaaagcccaaacaaattcgaatatcttctaaaacaggaatacctctcaatgtcttaccaaagaaaggactcacagcaaagcaaactgaaagaatacagatgattaatggcagtgatcttcctaaagtatcaactcagccacgttctaaaaatgaaagcaaagaagataaaagagcaagaaagcaagctataaaagaagagcgcaaggaacgaagagtggagaagaaagctaacaaattagcatttaaactggagaaaagaaggcaagaaaaagagctgctgaacttgaagaagaatgttgagggtctaaagctatagacagtggagcatacagggcaaggcactttattaggggctcctcatctttggttattgactagaaacttcagaaagacaaaactgtttgccatttttactggcagataagaggaaaatacaatatttgtattatttttatactagtaagtgtcccctgccaaccatcttgtaaatattgtaatactttaatttttaatattataagcttacatttgctctgaagtaaatgacttcatgaatgtgaaatgtttgataaattaaaggaaaatatcttcataacgtgaaaaaaaattg

SEQ ID NO: 331113 - DNA, 827 bp, Homo sapiens
tcttcacttttaaaaactcgtctaaaagttgtgtaaaattgaatacccttgaacccttggaggatcaagacctgccaatgaatgagcttgatgagtctgaggaggaagaaatgattactgtagtccttgaagaagccaaagagaagtgggattgtgaatctatttgtagtacatactcaaatttatataaccatccacagcttatcaagtatcaaccaaagcccaaacaaattcgaatatcttctaaaacaggaatacctctcaatgtcttaccaaagaaaggactcacagcaaagcaaactgaaagaatacagatgattaatggcagtgatcttcctaaagtatcaactcagccacgttctaaaaatgaaagcaaagaagataaaagagcaagaaagcaagctataaaagaagagcgcaaggaacgaagagtggagaagaaagctaacaaattagcatttaaactggagaaaagaaggcaagaaaaagagctgctgaacttgaagaagaatgttgagggtctaaagctatagacagtggagcatacagggcaaggcactttattaggggctcctcatctttggttattgactagaaacttcagaaagacaaaactgtttgccatttttactggcagataagaggaaaatacaatatttgtattatttttatactagtaagtgtcccctgccaaccatcttgtaaatattgtaatactttaatttttaatattataagcttacatttgctctgaagtaaatgacttcatgaatgtgaaatgtttgataaattaaaggaaaatatcttcataacgtgaaaaaaaattg

SEQ ID NO: 331114 - DNA, 277 bp, Homo sapiens
caagacctgccaatgaatgagcttgatgagtctgaggaggaagaaatgattactgtagtccttgaagaagccaaagagaagtgggattgtgaatctatttgtagtaagtatattcactttatgatagtaattttaaagtattaaagtatatcaactttaggctgggtgcggtgcctcacgcctgtagtaatcccagcactttgggaggccgaggcgggtgggtcacctgatgtcaggagttcaagaccagcctggccaacatggtgaaaccccgtgt

SEQ ID NO: 331115 - DNA, 400 bp, Homo sapiens
tctttgtctttttcccatcagccaaaatgttcatgtgccatctgcctcctacttggaaagctgtactcattgtaatattcccatgccttatccttggaaggcttactgattccattttgtttatagatagtgaagaaagtactaattccatttcgtttatagatagacaatgaagaaaggcgagcagaacagaggaagtatggagtgttctttgatgacgactatgactacctgcagcacctgaaggaaccatctgggccttcagagcttattccctcaagtaccttcagtgcacacaacaggagagaggagaaagaagaaacgctagtaattccagtaaggcttttcagcaatttaattgtgggagtgaggtgaagaaatcatttttgaatcaagatat

SEQ ID NO: 331116 - DNA, 1831 bp, Homo sapiens
gtgtggtgaggcctacagaagcggccttcagctggaccttggtctccccgccggacttcgagggtgtcatcgccgcccctgttgggggtgagcgccgcgcggctgcagcatgcctcacaggaagaaaaagccctttatagagaagaagaaagctgtgtcttttcacttggtccaccggagccaacgagatcctttagcagcagatgagagtgcaccccagagggttctattgcccacacaaaaaatagacaatgaagaaaggcgagcagaacagaggaagtatggagtgttctttgatgacgactatgactacctgcagcacctgaaggaaccatctgggccttcagagcttattccctcaagtaccttcagtgcacacaacaggagagaggagaaagaagaaacgctagtaattccaagcactggaattaagttgccttcatcagtgtttgcttcagagtttgaggaagatgttggattgttaaataaagcagctccagtttcaggacctcgactggattttgatcctgacattgttgcagctcttgatgatgattttgactttgatgatccagataatctgcttgaggatgactttattcttcaggccaataaggcaacaggagaggaagagggaatggatatacagaaatctgagaatgaagatgacagcgagtgggaagatgtggatgatgagaagggagatagcaatgatgactatgactctgcaggcctattgtcagatgaagactgtatgtctgtgcccggaaaaactcacagagctatagcagatcacttgttctggagtgaggaaacaaagagtcgcttcacggagtattcgatgacttcctcagtcatgaggagaaatgaacagctgaccctacatgatgagaggtttgagaagttttatgagcaatatgatgatgatgaaattggagctctggataatgcagaattggaaggttctattcaagtggacagcaatcgcttacaggaagttttgaatgactactataaagagaaggcagagaattgtgtaaaattgaatacccttgaacccttggaggatcaagacctgccaatgaatgagcttgatgagtctgaggaggaagaaatgattactgtagtccttgaagaagccaaagagaagtgggattgtgaatctatttgtagtacatactcaaatttatataaccatccacagcttatcaagtatcaaccaaagcccaaacaaattcgaatatcttctaaaacaggaatacctctcaatgtcttaccaaagaaaggactcacagcaaagcaaactgaaagaatacagatgattaatggcagtgatcttcctaaagtatcaactcagccacgttctaaaaatgaaagcaaagaagataaaagagcaagaaagcaagctataaaagaagagcgcaaggaacgaagagtggagaagaaagctaacaaattagcatttaaactggagaaaagaaggcaagaaaaagagctgctgaacttgaagaagaatgttgagggtctaaagctatagacagtggagcatacagggcaaggcactttattaggggctcctcatctttggttattgactagaaacttcagaaagacaaaactgtttgccatttttactggcagataagaggaaaatacaatatttgtattatttttatactagtaagtgtcccctgccaaccatcttgtaaatattgtaatactttaatttttaatattataagcttacatttgctctgaagtaaatgacttcatgaatgtgaaatgtttgataaattaaaggaaaatatcttcataacgtgaaaaaaaattg

SEQ ID NO: 331117 - DNA, 1393 bp, Homo sapiens
agagcatttaatctgagacttctgtattttagagcagaaaatgtgagattcattgcttttcctaccaaaccagattgatcaaacaccctcactcttcctgcctagacaagaacccttcctgaaataccttccaattttacttgtgtaaagtggttttgttctgttactttttaagttgttttggtaggtaatttatgacctttactttaggaaatctgagaatgaagatgacagcgagtgggaagatgtggatgatgagaagggagatagcaatgatgactatgactctgcaggcctattgtcagatgaagactgtatgtctgtgcccggaaaaactcacagagctatagcagatcacttgttctggagtgaggaaacaaagagtcgcttcacggagtattcgatgacttcctcagtcatgaggagaaatgaacagctgaccctacatgatgagaggtttgagaagttttatgagcaatatgatgatgatgaaattggagctctggataatgcagaattggaaggttctattcaagtggacagcaatcgcttacaggaagttttgaatgactactataaagagaaggcagagaattgtgtaaaattgaatacccttgaacccttggaggatcaagacctgccaatgaatgagcttgatgagtctgaggaggaagaaatgattactgtagtccttgaagaagccaaagagaagtgggattgtgaatctatttgtagtacatactcaaatttatataaccatccacagcttatcaagtatcaaccaaagcccaaacaaattcgaatatcttctaaaacaggaatacctctcaatgtcttaccaaagaaaggactcacagcaaagcaaactgaaagaatacagatgattaatggcagtgatcttcctaaagtatcaactcagccacgttctaaaaatgaaagcaaagaagataaaagagcaagaaagcaagctataaaagaagagcgcaaggaacgaagagtggagaagaaagctaacaaattagcatttaaactggagaaaagaaggcaagaaaaagagctgctgaacttgaagaagaatgttgagggtctaaagctatagacagtggagcatacagggcaaggcactttattaggggctcctcatctttggttattgactagaaacttcagaaagacaaaactgtttgccatttttactggcagataagaggaaaatacaatatttgtattatttttatactagtaagtgtcccctgccaaccatcttgtaaatattgtaatactttaatttttaatattataagcttacatttgctctgaagtaaatgacttcatgaatgtgaaatgtttgataaattaaaggaaaatatcttcataacgtgaaaaaaaattg

SEQ ID NO: 331118 - DNA, 444 bp, Homo sapiens
ctaaacacagtccgtattcctacataggaattattttgtgtaattttcctttctaataaaaattttattttatttatttatttttcagacgggttcttgctgtgttgcccaggctggagtgtagtggcatgatcatagctcactgcagcctcaaccttctgggctagagtgatcctcttgcctcagcctcccaactagctgggactacaggtgcacaccactatgcctggataatttttttattttatttaattaatttatttatttctgagacggagtctcgctctgttgcctaggctggagtgcagtggcatgatctcggctcactgcaaccttcgcctcccgagttcaagcaattctcctgtctcagcctcccgagtagctgggactgcaggcacccaccaccacacctggctaacttttgtatttttagtagagacgggg

SEQ ID NO: 331119 - DNA, 388 bp, Homo sapiens
tcactacaacctccgcctcctgggttcaagtgattctcctgcctcagcctcccaagtagctgggattataggcatgtgccaccacacccacctaatttttggtatttttagtagaaactgggtttcaccacattggccagactggtcttaaactactaacctcaggtgatctgtccgcctcagcctcccaaaatgctgggattacagatgtgagccactgtgcccagcctctttttttagtgtatttaaggtaattgattgaaagtttttgtctagtcattcaaatgtctaggcttcctcaggaacagtttctattaatttctttatttttaaaaaattttttttaattttcttttttttttagatggagtctcactctatagcctag

SEQ ID NO: 331120 - DNA, 675 bp, Homo sapiens
cggggagggatgggtgaagaagctggagctgccaacatctagtttattccttttacttaaactagaggcattaaaaaaaaaaaggtccaaatattttgggcctctgccaccaaaccacaggcagttctctggtctgcactggagtttggatgactgacaagactcagtgaaaaacaagtgctatttgttttcctgtgcctagtatttaactggaaatcagaaggctaaatttccaatcagttgctaaatagccccagatgtgtgctcagtgcagcactaggaagggacacgcacagcccataccaccgtgcatgtccagctgttaccttttcatgaagccaagtgatgtgtaactgagggttgtagtgtctgtccaaaaacgccctaagaataactcagacattcaagtttgcttgtggagaagggaactttttttaaaaaaaattctgtattctattgtgttacatttaaaaatctggaaataatttttttctttgctaatttccttctttcccttctttggcagttcccccacccccatgtttagaaaaaaacacagaattagcataccgggtatgatggtttatgtatgtgcttgttcattcatccaacacacagtttttagtgcctgactgtgaactgtgctagctgtggaggatctagggaaaactgggg

SEQ ID NO: 331121 - DNA, 300 bp, Homo sapiens
taccctcctgatctttcccctgaaacctgctttgcctacagtactgtccatctccgtttggaacaatgccatccttctgggcagtaaaaccgaaaaaatctgaaagccacctttggttcctttctgttccatcaacatatccttcaaaatctattcaggaactaaacacttattgccacttctccaaacaaccaccatccctcatctaactatctaaattactcaccagcctcttcacgggtttccctgcctctgccctggttcccctttaatgtattttcagtgcaaagaccagagtga

SEQ ID NO: 331122 - DNA, 489 bp, Homo sapiens
gctgaggcaggaagatcactttaatcctggaggagaaggttgcagtgagctgaaatctcaccactgcactccagcctgagcgacacagcaagactctctctcaaaaaaaaaacaaaaaacaaacaaacaaaaaaaacccaggactagttcatcaagaagcaaaataatatgacaaaccctacttaaatgatttcatctggtttcaaccactgccagctggtttgatccagtttcagctggtttcaaatgacttcatccagtttcagccaggttaattcagcttcagctggttgtgaacagtttgtggctcctttcaaccagtttcaggtggtttcagccaaggtcatccaatgttggctggctccaactgatttaactcctgtttcaactggattcagctgatttccactctccttaaggctgtgctgtccaattcagtagctcctagctacatgcagctctttacatttaaattgattaaaattaaag

SEQ ID NO: 331123 - DNA, 264 bp, Homo sapiens
ctcaatcgatcagcccacctcagcttcccaaagagctaggattagaggtgtgagccacagcccctggcctttaatcgaattttaaagtaagcattgcttaaaacatgtcactcatcaacagcagaacattcagaatacctagggcagcagttttcaaattgtgggctgagaaccttgggattctgagactttgtcagagaataaataccctctacttactgaaaagggaatttttaaaacctagcaccacaggaatctctttta

SEQ ID NO: 331124 - DNA, 168 bp, Homo sapiens
catggtggcaggtccagagccacctgtggtgaccagcaccaacagtgcagtaggtgaaacagagttagttactgggaacaaaagcaatactaatggaaacagccttcccatgagtataaggagctggactagtctcccttgttctaatggacatcctccttacgtgga

SEQ ID NO: 331125 - DNA, 219 bp, Homo sapiens
gaagacggtggggccaggccacgtggagcccagcatgggttctgcctttctctggaatgatttttaagcagaaatgtgccaacatccaatttacaatttcaaaagcttgcccgtctgtgggagagtgaggaaataaaactaaggcgccaatgtggatgggaatggtagcaggaaatgatcatgagcctacaattattcactatctactttgtgcagaga

SEQ ID NO: 331126 - DNA, 422 bp, Homo sapiens
gttgtggaatcataggtagggtgctggataataacaagggttggagaagaaagaagttttccctaaaagacacttggcagatgacttgccaacataaagaacttagttctgttatctaagatctatctggatgttttctttacccatgtttgttggggttttttgtttttgagacagggtcttgctctgttgaaggggtgggttgcccctccacacctgtgggtgtttcttgttaggtgaaacgagagacttagaaaagaaaaagacacaaagtatagagaaagaaataaggggactcaggggaccagcgttcagtatacggaggatccggccggcttctgaggtcccttagtatttattggtcattcttgggtgtttctcggagagggggatgtggcagggtcataggataatagtggaga

SEQ ID NO: 331127 - DNA, 500 bp, Homo sapiens
ctgacattttaatacatctggctcctaggactgattaaagagacattttatttgttgaaatatgcacattttcttcatgaaattggttttcttttttatgtgtgacttttcttgcaaaagcttacaaggcacatgcttttgatagcagtgttacatttttaattaatattttagatgtaaaaggtgacagtttaaaagattgttttattagtgggttatccttaaaagcaagtggcatttggttttattttacaatagagtttaatcttacatgttttttgttaaagtaatgttaccaaaaaatctcttattgaactatttgtggtgaactttttaaggatgtttaagatttcacatgcagtttaactgatcacagatgaagttgtaaattaatacctcatgagcgtatttgactgcagggcattgttgtgaatcaaaaccgctttgttcctgtaaactgtgaaaggggtttaagcatatggattaaaattgcatggtga

SEQ ID NO: 331128 - DNA, 603 bp, Homo sapiens
caatttctctcagaagtctgatagccaaagaaatgtctcaagatttcagtcaaatacacacatggcatgcacacacccataaacacacacacaaagaaacaggctaaaaagaaagtgatagcaactgcatcattaaaggccatcgtgtatcctgttaatctcatcttttctgctacttctttcattccaatagcgatggcagacttttttcagggggaataattactcttcgggatatataaatggagcagaaaggtggcgggcaaatttaaacaactggaattgggggccaggttcttcaggggaaaggaagtttgaagaagctttcaccaaaagaaaaaaatatagaaggggcttatctaacaatcagaatagcctgcaatatgagaactagaggattatttcctttaaaaaaaataacttaaaagatctgtgggccacaataacctaataagcaaggacatgttgggatgtgaggacggctgtgcaggtgagcacttggcagctgccactggtgttttcacccaggtacaggcagacggtgttccattaaaggagcaggcaaaagagagctgtcaatttgcttgctgttgaaatgtacat

SEQ ID NO: 331129 - DNA, 388 bp, Homo sapiens
tttgaaaaataaagtaggagggctggatgaataaaaaactagtatagaggatataccccacgatgaacttttgcgtttaactatagattgactagaaataatttctgaggccgggcgcgatggctcacgcctgtaatcccagcactttgggaggccaaggcgggcggatcacgaggtcaggagttcgagaccagcctgaccaacatgatgaaaccccgtctctactaaaaatgcaaaaattagccgggcgtggtgacgcacgcctgtaatcccagctactcaggaggctgaggcaggagaatcacttgaaccagggaggcagaggttgcagtgagctgagctcacactactgcattctagcctgggcgacagagcgagactctgtctc

SEQ ID NO: 331130 - DNA, 1002 bp, Homo sapiens
aggtgcaaataagggtttggtggctcctcccaacctttctccaggacagcctgggagactggactgctgggagggtctagggtcaaaagcatgtcccaaagggtgtatcctaattctccaagtgagacagtgactgccccttaatcctgccagcctcgagggccacatggctttggcctcacttggccttaggatttgtctgcagagaagagaaaatccaggtagctgtggttccaatgaggtggtggtttattttctctcaggtagaagaatttcagaggctggtggtctcggctggaatgggtggctccacaaagtcatcaggcacccagctttcttctgtcactcttcttcgtcatccttagcacagaccttctatctttaaagaagcctcatgattcaagatagctgctacagtgccagccatcgtgtcatgttttaggcaggcagagagagaggatgaagggcgaaaggacgcgtcttctagctgagttggtcctttaagatctttcctggaagcttcatccaagggcttctacatacctctctgtgaccattctgtctgcaagagatagagaatcataaagtcttttatctgaggaatttgctgcccagatggaatcagggttattttggaaagaaagaagggcagaatcgcttgttgggcaggcaacctgctgtctgtcctacaggtctcaacttgtcacactctcgggccatttggctctgcctctgggagggaggagactgggttggggaagagtcacagtggaatattcaagttgacctcacagcaaaggtgttggatgaagacagaatgtagatatctgaaaatagatcctgacatgccctcaggattcaggtgtctgacacagaaaaattatttttcgtttgttcctgtgtccaaggctggaagtgtggttacggctctgttcccaagtctgggtcctctaattgaacacgaggaaggttccactctcaaaggctctggccggcggccgc

SEQ ID NO: 331131 - DNA, 1247 bp, Homo sapiens
cctcaggtgatccacccgccttggcctcccgaagtgctgagattacaagtgtgagccactgcacccggcctagaattggcatttctaacaagcttttgggtgggtcttatgcacagctggccccgggagcccctgggctggggacgggttgtgggagcccagcttagcccacaattaggtggggtttctccccagtgaggccccaggctttgccaggctgccggtagcctggtgggcacttggctttgcccccacggcagctctggagcctcaccaagcctccagggcccaccctcctgcccagctctgtgtctggcacctgtgcctccttccttcacacccactttggtgaccctcacggctgcttgtccccttgaggtactgacactcacttcccagggagggtgcccaaccttctgccctaattgagggcagggctatccccgctcaagcaggacactggaatgaaagaactgtggcccattttgctaggattgtttttgctgttatatgggttggtattttcaggaattttcaaggacggggacagaggtcatctttctttatcctgagattctactgatacgctcaacttgcaaaagagtcattgtgagtgtgtgacagtccttttgtgtggatccccaaagaaagcaaggtgttgccagttcctttctcctgcaggattttttttttctatcagtgaaatattattaaaatgtcttaacatttgtttagtgccctatattttataaataacacatctttgtgcttttttattgtgtaatgaatcctcacaactctgaggtgggtgggattgacaccagttcacagaggagagtggggaggtgcagactcatgagcagcatacacggcattcttgttgttttctagataccatcgataatggggtgggtgctgtcgccaacatccctcgaggcgtggtgcggtggcaggacttgtccagggtcccgcagctggtccatggcagagagggtttctgaagactgtacggtgcttctcttaccactgtgggggaagttgtgtccagaccacatggctggtctgtggtggccccatccctagaagcatcctaactctaaatctagatctctttccactttggttccgtcctggcccttgcacagctctgggcccacaagagcctgtggttggccggtcctggatttctcgagcagagtggctggggctggcgactcctacgtacgcttttcctctagagacctctg

SEQ ID NO: 331132 - DNA, 1808 bp, Homo sapiens
cggccggggagggcgcggggcgctcggcttcccgtgttcctctccccgccccagccccgtgggcgcgagaggaggcggggggctccttgtgcaccagagacgcagctgccttgttcgcccggtggggtgtggatcctccgagcggtgctgggaagggggttctctctgcccgcgcgcccaggactctacccagggcggaggtcccgagtgggccgccccccgcagcgccctgggttcgcgggcccagaggctggaggcagcggggagctagggtccttcaccctcccctcgccgcgtgcctccgcaggagtcgggctccccgttccccgcgatggccgcgggccgcagtcgtacggagccgccgcgcggaccccggggcgcccctccctagcggggcgcagctccttcttgttccccgccctgccagcgggatggggggcggcgggtcggccctgagggtctgcgccgaccaccgcgggggcatcaactggctgagcctgagccccgacgggcagcgcctgctgacgggcagcgaggacggcacggcccggctctggagcaccgcggacggccagtgctgcgcgctcctgcaaggtgccttgtggcctctttgtggccaattgtgctcttctgctggcatttcctgttgacgactctcacagcaacagtagacgcttgttaagggccagcggtgcggagaagtgtgccgtcgtcacactatgttaccccacatacagacgtggaaacaggctgggagttaagtaattcgcccaggtcgcacagccagtgaggggtagatggcagtctgagccctctcattgctgtaaaccctgcctgcatgcctgttggtttctatttgtgccctgtactcactcaggaggtcagtgtgcctcgggtgcaccttcccctgggcctgtcccatgcactgtgaggtccctttcagctctggccctcctactgcccaggtagcacacgtagtcccctggatgagccgcgaggctttctgctgtgggtagttctttatcaccgcgggcttttccaccatcatcagtgaactctctgtggcctcgcccaggccttccaacttaggaattttcaaggacggggacagaggtcatctttctttatcctgagattctactgatacgctcaacttgcaaaagagtcattgtgagtgtgtgacagtccttttgtgtggatccccaaagaaagcaaggtgttgccagttcctttctcctgcaggattttttttttctatcagtgaaatattattaaaatgtcttaacatttgtttagtgccctatattttataaataacacatctttgtgcttttttattgtgtaatgaatcctcacaactctgaggtgggtgggattgacaccagttcacagaggagagtggggaggtgcagactcatgagcagcatacacggcattcttgttgttttctagataccatcgataatggggtgggtgctgtcgccaacatccctcgaggcgtggtgcggtggcaggacttgtccagggtcccgcagctggtccatggcagagagggtttctgaagactgtacggtgcttctcttaccactgtgggggaagttgtgtccagaccacatggctggtctgtggtggccccatccctagaagcatcctaactctaaatctagatctctttccactttggttccgtcctggcccttgcacagctctgggcccacaagagcctgtggttggccggtcctggatttctcgagcagagtggctggggctggcgactcctacgtacgcttttcctctagagacctctg

SEQ ID NO: 331133 - DNA, 2032 bp, Homo sapiens
cggccggggagggcgcggggcgctcggcttcccgtgttcctctccccgccccagccccgtgggcgcgagaggaggcggggggctccttgtgcaccagagacgcagctgccttgttcgcccggtggggtgtggatcctccgagcggtgctgggaagggggttctctctgcccgcgcgcccaggactctacccagggcggaggtcccgagtgggccgccccccgcagcgccctgggttcgcgggcccagaggctggaggcagcggggagctagggtccttcaccctcccctcgccgcgtgcctccgcaggagtcgggctccccgttccccgcgatggccgcgggccgcagtcgtacggagccgccgcgcggaccccggggcgcccctccctagcggggcgcagctccttcttgttccccgccctgccagcgggatggggggcggcgggtcggccctgagggtctgcgccgaccaccgcgggggcatcaactggctgagcctgagccccgacgggcagcgcctgctgacgggcagcgaggacggcacggcccggctctggagcaccgcggacggccagtgctgcgcgctcctgcaaggacatgaaagctatgtgaccttctgccagctggaggatgaggctgccttcacatgcagcgccgactgcaccatcaggaggtgggacgtgctgaccgggcagtgtctgcaggtgtaccgaggacacacgtccatcgtgaacaggatcctggttgccaacaaccagctcttcagcagctcctatgaccggacagctcgggtctggagtgtggacaaggggcagatgtcccgggagttccggggccaccgcaactgcgtgctgaccctagcctactctgccccgtgggacctccccagcactccctgcgcggaggaggccgcggccggggggcttctggtgaccggcagcacagatggcacagccaaggtgtggcaggtggccagcggctgctgccaccagacgctgcggggccacacgggtgcagtgctgtgcctagtgctagacacgcccggccacacggccttcacaggcagcaccgacgccaccatccgtgcctgggacatcctgagtggggagcagctgcgggtgttccgggagcaccggggctccgtcatctgtctggagctggtgaaccgactcgtgtactctggcagcgcggacaggaccgtcaagtgctggctggcagacacaggggagtgtgtgcgcacgttcacggcccacagacgcaacgtgagcgccctcaagtaccacgcgggcacctgtagaagaatttcagaggctggtggtctcggctggaatgggtggctccacaaagtcatcaggcacccagctttcttctgtcactcttcttcgtcatccttagcacagaccttctatctttaaagaagcctcatgattcaagatagctgctacagtgccagccatcgtgtcatgttttaggcaggcagagagagaggatgaagggcgaaaggacgcgtcttctagctgagttggtcctttaagatctttcctggaagcttcatccaagggcttctacatacctctctgtgaccattctgtctgcaagagatagagaatcataaagtcttttatctgaggaatttgctgcccagatggaatcagggttattttggaaagaaagaagggcagaatcgcttgttgggcaggcaacctgctgtctgtcctacaggtctcaacttgtcacactctcgggccatttggctctgcctctgggagggaggagactgggttggggaagagtcacagtggaatattcaagttgacctcacagcaaaggtgttggatgaagacagaatgtagatatctgaaaatagatcctgacatgccctcaggattcaggtgtctgacacagaaaaattatttttcgtttgttcctgtgtccaaggctggaagtgtggttacggctctgttcccaagtctgggtcctctaattgaacacgaggaaggttccactctcaaaggctctggccggcggccgc

SEQ ID NO: 331134 - DNA, 1367 bp, Homo sapiens
cggccggggagggcgcggggcgctcggcttcccgtgttcctctccccgccccagccccgtgggcgcgagaggaggcggggggctccttgtgcaccagagacgcagctgccttgttcgcccggtggggtgtggatcctccgagcggtgctgggaagggggttctctctgcccgcgcgcccaggactctacccagggcggaggtcccgagtgggccgccccccgcagcgccctgggttcgcgggcccagaggctggaggcagcggggagctagggtccttcaccctcccctcgccgcgtgcctccgcaggagtcgggctccccgttccccgcgatggccgcgggccgcagtcgtacggagccgccgcgcggaccccggggcgcccctccctagcggggcgcagctccttcttgttccccgccctgccagcgggatggggggcggcgggtcggccctgagggtctgcgccgaccaccgcgggggcatcaactggctgagcctgagccccgacgggcagcgcctgctgacgggcagcgaggacggcacggcccggctctggagcaccgcggacggccagtgctgcgcgctcctgcaaggacatgaaagctatgtgaccttctgccagctggaggatgaggctgccttcacatgcagcgccgactgcaccatcaggaggtgggacgtgctgaccgggcagtgtctgcaggtgtaccgaggacacacgtccatcgtgaacaggatcctggttgccaacaaccagctcttcagcagctcctatgaccggacagctcgggtctggagtgtggacaaggggcagatgtcccgggagttccggggccaccgcaactgcgtgctgaccctagcctactctgccccgtgggacctccccagcactccctgcgcggaggaggccgcggccggggggcttctggtgaccggcagcacagatggcacagccaaggtgtggcaggtggccagcggctgctgccaccagacgctgcggggccacacgggtgcagtgctgtgcctagtgctagacacgcccggccacacggccttcacaggcagcaccgacgccaccatccgtgcctgggacatcctgagtggggagcagctgcgggtgttccgggagcaccggggctccgtcatctgtctggagctggtgaaccgactcgtgtactctggcagcgcggacaggaccgtcaagtgctggctggcagacacaggggagtgtgtgcgcacgttcacggcccacagacgcaacgtgagcgccctcaagtaccacgcgggcaccttgttcacgggcagcggggacgcttgcgcccgggccttcgacgcgcagtctggagagctgcggagggtgttccgg

SEQ ID NO: 331135 - DNA, 218 bp, Homo sapiens
tctagtgtatatactgtcatgcaagcaaacaaacattaataatgagcattatccacaaatagcatgtttatcaaattgctagcctcttacaaccctgtgactcataattcaacttaatctgtttttctgtaatgtcaaaataagcccttttaaagcaatatgtattttttaaacaatgccttgtagcttttttttttttttttttttttttttttttt

SEQ ID NO: 331136 - DNA, 1279 bp, Homo sapiens
ttatcagtacaaataaaattataatgaaaagtctatgaagataatttgttctcagatgcccttcacatatagcaattaattcacaaatgatgagtcactcatgtgccttcatgaaggcaggccctcaagagacccgcaacagaaaggaaagccaccgactggagagaacctgcttcctgagccccaccaagttccaaaaaggagaatggggcttcgtcctcaccctcaaggagttgccaaactgggcttggttattattcacacttgaaaagaatgaggaaggtcagccagtcccctccaggtcgctcgggcttcctccaagctcctcttggttcaaatttgctgtgtcctccagccggcatctctcctctgttccgtaactgacagggcagcgaggtagcttccggatgactcctcccgccatggttcttccgtccatcagctcttccttcctcaactctgtggtatgtggctaggggagtttccaactcccaggggacatttcagttccccaaagataacacagctttgcacagtggatgtttacttgctggtggtcttatctaagatcaacattggcagctgtgcccggagaggcctccagggtccaggtaagtggaggcttcatgtctcaggaggtacctggtcaccacagttaggatttttctgtttggggatttttttttttatgggttggtggctctgaaaaagctgcaagtcttctctgaggactacagacctctctccaccctctccacattcagcctctctgggctccagggccaaaagatgtctacactcaggtggcagacaggcctgtgaagacctcctggtgacatgctcatatgttgctgggactaaaggtgggattttagccaccacagtgggttggtggtgagatgtttaccaacaggaggtactttgtccctcatgtccacttaaagattcagtccaacccggcctgtgcttctgctgtcccaagagactctagaaagctccaatcctccctgaggttgatcttttaagtcagggtaggtggtcattcggcaatcaactgctctactgcctcaatgtcctcctcactggacgtcctgccccaattccatcctgttcagcgcagactgattttcctggaacacaatgttcattatggagccagatggcatatcagaaagagcactgtattaggagtcaagagatccatgggggaatcccagcattgcccctgatggctgtatagctttggggaaagtgaggccctcttggcattcagtttttc

SEQ ID NO: 331137 - DNA, 1359 bp, Homo sapiens
ggcacgaggcagccaccgccgcaatcatgggcttgtgctggaaaagatgaaatggggaaaatggtgtcagtaattaacactgtggatacctcccatgaggacatgattcacgacgcccagatggactactatggcacccgcctggcaacctgctcatcagacaggtccgtcaaaatctttgatgtgcgcaatggagggcagatccttatcgccgacctcaggggtcatgagggtcctgtgtggcaagtggcctgggctcaccccatgtacggcaacatcctggcatcgtgctcctatgaccggaaagtcattatctggagagaggaaaacggcacctgggagaagagccacgagcatgcgggacacgactcctcagtgaactcggtgtgctgggccccccatgactacggcctgatcctggcctgtgggagctcggatggggccatctccctgctgacttacaccggggaaggccaatgggaagtaaagaagatcaacaacgctcacaccattggctgcaatgccgtcagctgggcccctgctgttgtacctggaagcctcatagaccacccatcggggcagaaacccaattacatcaagaggtttgcatcaggtggctgtgacaacctcatcaagctgtggaaggaggaggaggacggccagtggaaggaggagcagaagctagaagcgcacagtgactgggttcgagatgtggcctgggccccctccatcggcctgcccaccagcaccatcgccagctgctcccaggatggtcgtgtgttcatttggacctgtgatgatgcctcaagcaatacgtggtcccctaaattgttgcacaagttcaacgatgtggtgtggcatgtgagctggtccatcacagccaacatcctggctgtctctggtggagacaataaggtgaccctgtggaaggagtcagttgatgggcagtgggtgtgcatcagtgatgtcaacaagggccagggctccgtatcagcatcagtgacagagggccagcagaacgagcagtgacaagacaggtggggcctggctccccacccgccagctccaggactgccccttcctgggccaactaaccaaacaactgggaagagcccccaactccaacaggattattttcccaggaggagttacagatgcagccacagattgatcatctgccttaacgtgatcggagatgctttgtaatctactgtccagctgaaagcactcatgttacgaggaagaaactacaagtgatgttcaaatctattttgggtcatttttatgtacctttgggttcaggcattatttggggggttttgtttccaaaggaactaaataaagtcatattgcttataa

SEQ ID NO: 331138 - DNA, 1187 bp, Homo sapiens
attacaggtggctgctagtttttttgtgtgtatttttagtagagatgagatggggtttcaccagttcaggctggtcgcgaactcctggcctcaggtgatccacccatctcagcctcccaaagtgctgagattacaggcgtgagccaccatgcccgacctagactgattttttttaatgcagcctcctaattttctctccaggggcaaaccttttcagctcttagctatttcttatacagtttacttcagtgtagaaacaacatattgaactgttaccttcctctaccacagtagttttcaaactgcagtgttgttaaacctgttaaaacagattgccagccccacccccagagcttcctaatcagttgttccaggccccaagaatctgcagttgtagcaagctcccaggtgaccgatgctctgctctggtctggggaccacactttgcgaaccctgctccccgccaccccatatcctctcgctgtagctctgtcacagtttgctgaaaacagtatcctgtgttgacatcatcatccacagctgctgttattgttacttctttttttctgtgagtttttattcctggactctcattttggtgagatttcagtggaggagggacatgctctgttcacccacaagcctctgggcagtggttcttgatgaggatgaggctcatatttaggggacagcagagggaagggcacagacccgtgataatctgcttgtgcactgactcgcaggtgaccctgtggaaggagtcagttgatgggcagtgggtgtgcatcagtgatgtcaacaagggccagggctccgtatcagcatcagtgacagagggccagcagaacgagcagtgacaagacaggtggggcctggctccccacccgccagctccaggactgccccttcctgggccaactaaccaaacaactgggaagagcccccaactccaacaggattattttcccaggaggagttacagatgcagccacagattgatcatctgccttaacgtgatcggagatgctttgtaatctactgtccagctgaaagcactcatgttacgaggaagaaactacaagtgatgttcaaatctattttgggtcatttttatgtacctttgggttcaggcattatttggggggttttgtttccaaaggaactaaataaagtcatattgcttataa

SEQ ID NO: 331139 - DNA, 547 bp, Homo sapiens
tgaatgcttactgtagcatgggtgaaggagtgagtgaacaaacaaatgcagtcaagaacttgagatggttgtattctaactgccatgagttaatttaccagtgatatctttggttctaggtgtcagtaattaacactgtggatacctcccatgaggacatgattgtaagtattaatatcaccctccctggaggggtgtggacatgggcatttttgtgggagggaagcaatttggggttttcattacccctttctgttgatcattcatggatccagggtggctttgcagtggttgcctatcagcctgtaatctcggggtatggcaggctccctagcagtgccctctgagttgtcaggactgtggcagtctaatcactctctgctgggaggaacctgggaataatttgtagttctaggctgtcagtcttccagccaacacaataacctgctctcggatgaaggctgagtgggtacggaggcttgacaatagtcttcccacctgtcttcctcctgctgtcactccttcaccccagctaggaaggggggtg

SEQ ID NO: 331140 - DNA, 868 bp, Homo sapiens
agtctgtcgcaggtctctgattgactgtgcccttggtaccctgccctccccgccttcctgtgcactttgtaacctatacagctcggcacatggaggaaactccttattgtccttacttgcctttgcagacttcggggacctggtttttagagagtctagaatctgatgagagaacctgtgcttacttggtgtgtacctcttgaactgctttgcagccatcctcttccactgtctgcctttctgaaatcacaagtcaaactttatacctacagggcttgtgctggaaaagatgaaatggggaaaatggtaagaaatgtctgttccacactgaaacttcttttaagtcctcttttctatcccaagaatttaagagaagagtggttgagcaaagaaaaaaaataacagcttttgttcatttacttattcattcagcaaatagtcgctgagttccttctatttgcaaagcactgtgctggatgatttgaggggatttgaaactgcagatggctcagaccatggctccaaggagctcaccttctagtggggagaagaaacagcataaagtgttgtatgtgttccttgctgaagatatgcaagagagtccagccatttgagggtctgagaatcttcaagaaaggtgatggatggccctttttgagctggacctcaaagaatagataggagggagatgaccatgacaccatgttccagccctacaaactgttcaactctggatcccactacgtgacggaccagggagcagcctcaggaaacactcgaatcaagtctcccagtctgaagtaataaccccgttatgcataaactgcctggaacatcagaggctctgtcatccaggaaaggaacacca

SEQ ID NO: 331141 - DNA, 297 bp, Homo sapiens
gggaaaatgggttagaagttagggcagtggttacttatagtggaagagggagctgtgattaggaagggcataatgacagggcttttcaggcaggtggcagaatttttgtttcttgatctattactttataataaaagatttttcttaaaaaaaagctccaatgtaccattctttcatgtgtttagaaaatgtcctgtttcttaaacttgtgggagttcttaatttctacttttagcgcacactgcagaaaaatgcacacactgttgggatccttgagggagaattctgagcagtgga

SEQ ID NO: 331142 - DNA, 1331 bp, Homo sapiens
ggccgagacctggagcagccaccgccgcaatcatggtgtcagtaattaacactgtggatacctcccatgaggacatgattcacgacgcccagatggactactatggcacccgcctggcaacctgctcatcagacaggtccgtcaaaatctttgatgtgcgcaatggagggcagatccttatcgccgacctcaggggtcatgagggtcctgtgtggcaagtggcctgggctcaccccatgtacggcaacatcctggcatcgtgctcctatgaccggaaagtcattatctggagagaggaaaacggcacctgggagaagagccacgagcatgcgggacacgactcctcagtgaactcggtgtgctgggccccccatgactacggcctgatcctggcctgtgggagctcggatggggccatctccctgctgacttacaccggggaaggccaatgggaagtaaagaagatcaacaacgctcacaccattggctgcaatgccgtcagctgggcccctgctgttgtacctggaagcctcatagaccacccatcggggcagaaacccaattacatcaagaggtttgcatcaggtggctgtgacaacctcatcaagctgtggaaggaggaggaggacggccagtggaaggaggagcagaagctagaagcgcacagtgactgggttcgagatgtggcctgggccccctccatcggcctgcccaccagcaccatcgccagctgctcccaggatggtcgtgtgttcatttggacctgtgatgatgcctcaagcaatacgtggtcccctaaattgttgcacaagttcaacgatgtggtgtggcatgtgagctggtccatcacagccaacatcctggctgtctctggtggagacaataaggtgaccctgtggaaggagtcagttgatgggcagtgggtgtgcatcagtgatgtcaacaagggccagggctccgtatcagcatcagtgacagagggccagcagaacgagcagtgacaagacaggtggggcctggctccccacccgccagctccaggactgccccttcctgggccaactaaccaaacaactgggaagagcccccaactccaacaggattattttcccaggaggagttacagatgcagccacagattgatcatctgccttaacgtgatcggagatgctttgtaatctactgtccagctgaaagcactcatgttacgaggaagaaactacaagtgatgttcaaatctattttgggtcatttttatgtacctttgggttcaggcattatttggggggttttgtttccaaaggaactaaataaagtcatattgcttataa

SEQ ID NO: 331143 - DNA, 1421 bp, Homo sapiens
gcgcgttgctgcccggaggctcctacgccacggcccgtcgggcccggcgccggaagtgagctgttccgaggcgccgccgggagctgccacgtccgagacctggagcagccaccgccgcaatcatggtgtcagtaattaacactgtggatacctcccatgaggacatgattcacgacgcccagatggactactatggcacccgcctggcaacctgctcatcagacaggtccgtcaaaatctttgatgtgcgcaatggagggcagatccttatcgccgacctcaggggtcatgagggtcctgtgtggcaagtggcctgggctcaccccatgtacggcaacatcctggcatcgtgctcctatgaccggaaagtcattatctggagagaggaaaacggcacctgggagaagagccacgagcatgcgggacacgactcctcagtgaactcggtgtgctgggccccccatgactacggcctgatcctggcctgtgggagctcggatggggccatctccctgctgacttacaccggggaaggccaatgggaagtaaagaagatcaacaacgctcacaccattggctgcaatgccgtcagctgggcccctgctgttgtacctggaagcctcatagaccacccatcggggcagaaacccaattacatcaagaggtttgcatcaggtggctgtgacaacctcatcaagctgtggaaggaggaggaggacggccagtggaaggaggagcagaagctagaagcgcacagtgactgggttcgagatgtggcctgggccccctccatcggcctgcccaccagcaccatcgccagctgctcccaggatggtcgtgtgttcatttggacctgtgatgatgcctcaagcaatacgtggtcccctaaattgttgcacaagttcaacgatgtggtgtggcatgtgagctggtccatcacagccaacatcctggctgtctctggtggagacaataaggtgaccctgtggaaggagtcagttgatgggcagtgggtgtgcatcagtgatgtcaacaagggccagggctccgtatcagcatcagtgacagagggccagcagaacgagcagtgacaagacaggtggggcctggctccccacccgccagctccaggactgccccttcctgggccaactaaccaaacaactgggaagagcccccaactccaacaggattattttcccaggaggagttacagatgcagccacagattgatcatctgccttaacgtgatcggagatgctttgtaatctactgtccagctgaaagcactcatgttacgaggaagaaactacaagtgatgttcaaatctattttgggtcatttttatgtacctttgggttcaggcattatttggggggttttgtttccaaaggaactaaataaagtcatattgcttataa

SEQ ID NO: 331144 - DNA, 1860 bp, Homo sapiens
gcgcgttgctgcccggaggctcctacgccacggcccgtcgggcccggcgccggaagtgagctgttccgaggcgccgccgggagctgccacgtccgagacctggagcagccaccgccgcaatcatggtgagtgttggtactgaggaggcctagcagggtgaaggccacggtcgcggccttcacgggttcctcggccgtcctgagtcccaaatcccaagctggagccgttcagctcccctccaccgcttagagatttggggggctctggccccgtccttgcggaccattccgaggggagtccagaggtgaggccgaggaacctccctgactttgcggggcgcgccgctcctgcgtctcctgccagtctcccttccttcttttcggtcaacaattgaaaacaaaacgaggaacagcagaggagctactgtataccgagccctcagcattgttcgtaatctccgcctgctaacagccttgtgaagaaggtgctattcttctcaacactttacagatgaggacacttgaggttcggagacgtggagcctcttgcacagctgcttaagtggtgtcagtaattaacactgtggatacctcccatgaggacatgattcacgacgcccagatggactactatggcacccgcctggcaacctgctcatcagacaggtccgtcaaaatctttgatgtgcgcaatggagggcagatccttatcgccgacctcaggggtcatgagggtcctgtgtggcaagtggcctgggctcaccccatgtacggcaacatcctggcatcgtgctcctatgaccggaaagtcattatctggagagaggaaaacggcacctgggagaagagccacgagcatgcgggacacgactcctcagtgaactcggtgtgctgggccccccatgactacggcctgatcctggcctgtgggagctcggatggggccatctccctgctgacttacaccggggaaggccaatgggaagtaaagaagatcaacaacgctcacaccattggctgcaatgccgtcagctgggcccctgctgttgtacctggaagcctcatagaccacccatcggggcagaaacccaattacatcaagaggtttgcatcaggtggctgtgacaacctcatcaagctgtggaaggaggaggaggacggccagtggaaggaggagcagaagctagaagcgcacagtgactgggttcgagatgtggcctgggccccctccatcggcctgcccaccagcaccatcgccagctgctcccaggatggtcgtgtgttcatttggacctgtgatgatgcctcaagcaatacgtggtcccctaaattgttgcacaagttcaacgatgtggtgtggcatgtgagctggtccatcacagccaacatcctggctgtctctggtggagacaataaggtgaccctgtggaaggagtcagttgatgggcagtgggtgtgcatcagtgatgtcaacaagggccagggctccgtatcagcatcagtgacagagggccagcagaacgagcagtgacaagacaggtggggcctggctccccacccgccagctccaggactgccccttcctgggccaactaaccaaacaactgggaagagcccccaactccaacaggattattttcccaggaggagttacagatgcagccacagattgatcatctgccttaacgtgatcggagatgctttgtaatctactgtccagctgaaagcactcatgttacgaggaagaaactacaagtgatgttcaaatctattttgggtcatttttatgtacctttgggttcaggcattatttggggggttttgtttccaaaggaactaaataaagtcatattgcttataa

SEQ ID NO: 331145 - DNA, 1599 bp, Homo sapiens
gcgcgttgctgcccggaggctcctacgccacggcccgtcgggcccggcgccggaagtgagctgttccgaggcgccgccgggagctgccacgtccgagacctggagcagccaccgccgcaatcatgacttcggggacctggtttttagagagtctagaatctgatgagagaacctgtgcttacttggtgtgtacctcttgaactgctttgcagccatcctcttccactgtctgcctttctgaaatcacaagtcaaactttatacctacagggcttgtgctggaaaagatgaaatggggaaaatggtgtcagtaattaacactgtggatacctcccatgaggacatgattcacgacgcccagatggactactatggcacccgcctggcaacctgctcatcagacaggtccgtcaaaatctttgatgtgcgcaatggagggcagatccttatcgccgacctcaggggtcatgagggtcctgtgtggcaagtggcctgggctcaccccatgtacggcaacatcctggcatcgtgctcctatgaccggaaagtcattatctggagagaggaaaacggcacctgggagaagagccacgagcatgcgggacacgactcctcagtgaactcggtgtgctgggccccccatgactacggcctgatcctggcctgtgggagctcggatggggccatctccctgctgacttacaccggggaaggccaatgggaagtaaagaagatcaacaacgctcacaccattggctgcaatgccgtcagctgggcccctgctgttgtacctggaagcctcatagaccacccatcggggcagaaacccaattacatcaagaggtttgcatcaggtggctgtgacaacctcatcaagctgtggaaggaggaggaggacggccagtggaaggaggagcagaagctagaagcgcacagtgactgggttcgagatgtggcctgggccccctccatcggcctgcccaccagcaccatcgccagctgctcccaggatggtcgtgtgttcatttggacctgtgatgatgcctcaagcaatacgtggtcccctaaattgttgcacaagttcaacgatgtggtgtggcatgtgagctggtccatcacagccaacatcctggctgtctctggtggagacaataaggtgaccctgtggaaggagtcagttgatgggcagtgggtgtgcatcagtgatgtcaacaagggccagggctccgtatcagcatcagtgacagagggccagcagaacgagcagtgacaagacaggtggggcctggctccccacccgccagctccaggactgccccttcctgggccaactaaccaaacaactgggaagagcccccaactccaacaggattattttcccaggaggagttacagatgcagccacagattgatcatctgccttaacgtgatcggagatgctttgtaatctactgtccagctgaaagcactcatgttacgaggaagaaactacaagtgatgttcaaatctattttgggtcatttttatgtacctttgggttcaggcattatttggggggttttgtttccaaaggaactaaataaagtcatattgcttataa

SEQ ID NO: 331146 - DNA, 1174 bp, Homo sapiens
ggccgagacctggagcagccaccgccgcaatcatggtgtcagtaattaacactgtggatacctcccatgaggacatgattcacgacgcccagatggactactatggcacccgcctggcaacctgctcatcagacaggtccgtcaaaatctttgatgtgcgcaatggagggcagatccttatcgccgacctcaggggtcatgagggtcctgtgtggcaagtggcctgggctcaccccatgtacggcaacatcctggcatcgtgctcctatgaccggaaagtcattatctggagagaggaaaacggcacctgggagaagagccacgagcatgcgggacacgactcctcagtgaactcggtgtgctgggccccccatgactacggcctgatcctggcctgtgggagctcggatggggccatctccctgctgacttacaccggggaaggccaatgggaagtaaagaagatcaacaacgctcacaccattggctgcaatgccgtcagctgggcccctgctgttgtacctggaagcctcatagaccacccatcggggcagaaacccaattacatcaagaggtttgcatcaggtggctgtgacaacctcatcaagctgtggaaggaggaggaggacggccagtggaaggaggagcagaagctagaagcgcacagtgactgggttcgagatgtggcctgggccccctccatcggcctgcccaccagcaccatcgccagctgctcccaggatggtcgtgtgttcatttggacctgtgatgatgcctcaagcaatacgtggtcccctaaattgttgcacaagttcaacgatgtggtgtggcatgtgagctggtccatcacagccaacatcctggctgtctctggtggagacaataagtgccccttcctgggccaactaaccaaacaactgggaagagcccccaactccaacaggattattttcccaggaggagttacagatgcagccacagattgatcatctgccttaacgtgatcggagatgctttgtaatctactgtccagctgaaagcactcatgttacgaggaagaaactacaagtgatgttcaaatctattttgggtcatttttatgtacctttgggttcaggcattatttggggggttttgtttccaaaggaactaaataaagtcatattgcttataa

SEQ ID NO: 331147 - DNA, 1104 bp, Homo sapiens
ggccgagacctggagcagccaccgccgcaatcatggtgtcagtaattaacactgtggatacctcccatgaggacatgattcacgacgcccagatggactactatggcacccgcctggcaacctgctcatcagacaggtccgtcaaaatctttgatgtgcgcaatggagggcagatccttatcgccgacctcaggggtcatgagggtcctgtgtggcaagtggcctgggctcaccccatgtacggcaacatcctggcatcgtgctcctatgaccggaaagtcattatctggagagaggaaaacggcacctgggagaagagccacgagcatgcgggacacgactcctcagtgaactcggtgtgctgggccccccatgactacggcctgatcctggcctgtgggagctcggatggggccatctccctgctgacttacaccggggaaggccaatgggaagtaaagaagatcaacaacgctcacaccattggctgcaatgccgtcagctgggcccctgctgttgtacctggaagcctcatagaccacccatcggggcagaaacccaattacatcaagaggtttgcatcaggtggctgtgacaacctcatcaagctgtggaaggaggaggaggacggccagtggaaggaggagcagaagctagaagcgcacagtgactgggttcgagatgtggcctgggccccctccatcggcctgcccaccagcaccatcgccagctgctcccaggatggtcgtgtgttcatttggacctgtgatgatgcctcaagcaatacgtggtcccctaaattgttgcacaagttcaacgatgtggtgtggcatgtgagctggtccatcacagccaacatcctggctgtctctggtggagacaataaggaggagttacagatgcagccacagattgatcatctgccttaacgtgatcggagatgctttgtaatctactgtccagctgaaagcactcatgttacgaggaagaaactacaagtgatgttcaaatctattttgggtcatttttatgtacctttgggttcaggcattatttggggggttttgtttccaaaggaactaaataaagtcatattgcttataa

SEQ ID NO: 331148 - DNA, 1125 bp, Homo sapiens
ggccgagacctggagcagccaccgccgcaatcatggtgtcagtaattaacactgtggatacctcccatgaggacatgattcacgacgcccagatggactactatggcacccgcctggcaacctgctcatcagacaggtccgtcaaaatctttgatgtgcgcaatggagggcagatccttatcgccgacctcaggggtcatgagggtcctgtgtggcaagtggcctgggctcaccccatgtacggcaacatcctggcatcgtgctcctatgaccggaaagtcattatctggagagaggaaaacggcacctgggagaagagccacgagcatgcgggacacgactcctcagtgaactcggtgtgctgggccccccatgactacggcctgatcctggcctgtgggagctcggatggggccatctccctgctgacttacaccggggaaggccaatgggaagtaaagaagatcaacaacgctcacaccattggctgcaatgccgtcagctgggcccctgctgttgtacctggaagcctcatagaccacccatcggggcagaaacccaattacatcaagaggtttgcatcaggtggctgtgacaacctcatcaagctgtggaaggaggaggaggacggccagtggaaggaggagcagaagctagaagcgcacagtgactgggttcgagatgtggcctgggccccctccatcggcctgcccaccagcaccatcgccagctgctcccaggatggtcgtgtgttcatttggacctgtgatgatgcctcaagcaatacgtggtcccctaaattgttgcacaagttcaacgatgtggtgtggcatgtgagctggtccatcacagccaactaaccaaacaactgggaagagcccccaactccaacaggattattttcccaggaggagttacagatgcagccacagattgatcatctgccttaacgtgatcggagatgctttgtaatctactgtccagctgaaagcactcatgttacgaggaagaaactacaagtgatgttcaaatctattttgggtcatttttatgtacctttgggttcaggcattatttggggggttttgtttccaaaggaactaaataaagtcatattgcttataa

SEQ ID NO: 331149 - DNA, 1308 bp, Homo sapiens
ggccgagacctggagcagccaccgccgcaatcatggtgtcagtaattaacactgtggatacctcccatgaggacatgattcacgacgcccagatggactactatggcacccgcctggcaacctgctcatcagacaggtccgtcaaaatctttgatgtgcgcaatggagggcagatccttatcgccgacctcaggggtcatgagggtcctgtgtggcaagtggcctgggctcaccccatgtacggcaacatcctggcatcgtgctcctatgaccggaaagtcattatctggagagaggaaaacggcacctgggagaagagccacgagcatgcgggacacgactcctcagtgaactcggtgtgctgggccccccatgactacggcctgatcctggcctgtgggagctcggatggggccatctccctgctgacttacaccggggaaggccaatgggaagtaaagaagatcaacaacgctcacaccattggccgtagggccaaaatttgggggacgccgcctggtcattggaaggggcgagaaacggagtagggaggacgacatgagccagacggggggtcgtgcatacgtaggtaagggggtgagttaaggaggggggagggagggtgaggaggagggtgagggaggggggcacggggggggtgtgggagaagagggggagaggcagaggaagaaccagcaccatggcggctgctcccaggatggtcgtgtgttcatttggacctgtgatgatgcctcaagcaatacgtggtcccctaaattgttgcacaagttcaacgatgtggtgtggcatgtgagctggtccatcacagccaacatcctggctgtctctggtggagacaataaggtgaccctgtggaaggagtcagttgatgggcagtgggtgtgcatcagtgatgtcaacaagggccagggctccgtatcagcatcagtgacagagggccagcagaacgagcagtgacaagacaggtggggcctggctccccacccgccagctccaggactgccccttcctgggccaactaaccaaacaactgggaagagcccccaactccaacaggattattttcccaggaggagttacagatgcagccacagattgatcatctgccttaacgtgatcggagatgctttgtaatctactgtccagctgaaagcactcatgttacgaggaagaaactacaagtgatgttcaaatctattttgggtcatttttatgtacctttgggttcaggcattatttggggggttttgtttccaaaggaactaaataaagtcatattgcttataa

SEQ ID NO: 331150 - DNA, 1081 bp, Homo sapiens
ggccgagacctggagcagccaccgccgcaatcatggtgtcagtaattaacactgtggatacctcccatgaggacatgattcacgacgcccagatggactactatggcacccgcctggcaacctgctcatcagacaggtccgtcaaaatctttgatgtgcgcaatggagggcagatccttatcgccgacctcaggggtcatgagggtcctgtgtggcaagtggcctgggctcaccccatgtacggcaacatcctggcatcgtgctcctatgaccggaaagtcattatctggagagaggaaaacggcacctgggagaagagccacgagcatgcgggacacgactcctcagtgaactcggtgtgctgggccccccatgactacggcctgatcctggcctgtgggagctcggatggggccatctccctgctgacttacaccggggaaggccaatgggaagtaaagaagatcaacaacgctcacaccattggccgtagggccaaaatttgggggacgccgcctggtcattggaaggggcgagaaacggagtagggaggacgacatgagccagacggggggtcgtgcatacgtaggtaagggggtgagttaaggaggggggagggagggtgaggaggagggtgagggaggggggcacggggggggtgtgggagaagagggggagaggcagaggaagaaccagcaccatggcggctgctcccaggatggtcgtgtgttcatttggacctgtgatgatgcctcaagcaatacgtggtcccctaaattgttgcacaagttcaacgatgtggtgtggcatgtgagctggtccatcacagccaacatcctggctgtctctggtggagacaataaggaggagttacagatgcagccacagattgatcatctgccttaacgtgatcggagatgctttgtaatctactgtccagctgaaagcactcatgttacgaggaagaaactacaagtgatgttcaaatctattttgggtcatttttatgtacctttgggttcaggcattatttggggggttttgtttccaaaggaactaaataaagtcatattgcttataa

SEQ ID NO: 331151 - DNA, 869 bp, Homo sapiens
ggccgagacctggagcagccaccgccgcaatcatggtgtcagtaattaacactgtggatacctcccatgaggacatgattcacgacgcccagatggactactatggcacccgcctggcaacctgctcatcagacaggtccgtcaaaatctttgatgtgcgcaatggagggcagatccttatcgccgacctcaggggtcatgagggtcctgtgtggcaagtggcctgggctcaccccatgtacggcaacatcctggcatcgtgctcctatgaccggaaagtcattatctggagagaggaaaacggcacctgggagaagagccacgagcatgcgggacacgactcctcagtgaactcggtgtgctgggccccccatgactacggcctgatcctggcctgtgggagctcggatggggccatctccctgctgacttacaccggggaaggccaatgggaagtaaagaagatcaacaacgctcacaccgtgagtccatcccctgcctttcatgcagtgagagcgcctgccttgccccgtgtctgctgcagcctccctagagggtggcacgggagggtccccgctgggcagtgggccggggagtggtcagctgaccagacatgattgctctagagcagctttgagcctctctgccctgaagccagaccaggcagggcttggcactgcttccttgttgtgtgctcccaagcaggggagggctggtgcagcagcagcctgctcactgccaccttagctatggttgcctccaggtgacatgccctgcagtagtcattgggaccctgtagaatggagtggtgttattaaaacttttaaaaagtatgtgagctatgcatacatttaagaaagattaatata

SEQ ID NO: 331152 - DNA, 1262 bp, Homo sapiens
gcgcgttgctgcccggaggctcctacgccacggcccgtcgggcccggcgccggaagtgagctgttccgaggcgccgccgggagctgccacgtccgagacctggagcagccaccgccgcaatcatggtgagtgttggtactgaggaggcctagcagggtgaaggccacggtcgcggccttcacgggttcctcggccgtcctgagtcccaaatcccaagctggagccgttcagctcccctccaccgcttagagatttggggggctctggccccgtccttgcggaccattccgaggggagtccagaggtgaggccgaggaacctccctgactttgcggggcgcgccgctcctgcgtctcctgccagtctcccttccttcttttcggtcaacaattgaaaacaaaacgaggaacagcagaggagctactgtataccgagccctcagcattgttcgtaatctccgcctgctaacagccttgtgaagaaggtgctattcttctcaacactttacagatgaggacacttgaggttcggagacgtggagcctcttgcacagctgcttaagtggtagtagagccgagatttgaaccctcctaaccattcctttctgccgcctactgcagctcccagcagagatgattgaactgttgctcggggtagggcccccagggcttgtgctggaaaagatgaaatggggaaaatggtaagaaatgtctgttccacactgaaacttcttttaagtcctcttttctatcccaagaatttaagagaagagtggttgagcaaagaaaaaaaataacagcttttgttcatttacttattcattcagcaaatagtcgctgagttccttctatttgcaaagcactgtgctggatgatttgaggggatttgaaactgcagatggctcagaccatggctccaaggagctcaccttctagtggggagaagaaacagcataaagtgttgtatgtgttccttgctgaagatatgcaagagagtccagccatttgagggtctgagaatcttcaagaaaggtgatggatggccctttttgagctggacctcaaagaatagataggagggagatgaccatgacaccatgttccagccctacaaactgttcaactctggatcccactacgtgacggaccagggagcagcctcaggaaacactcgaatcaagtctcccagtctgaagtaataaccccgttatgcataaactgcctggaacatcagaggctctgtcatccaggaaaggaacacca

SEQ ID NO: 331153 - DNA, 159 bp, Homo sapiens
cgtcaaaatctttgatgtgcgcaatggagggcagatccttatcgccgacctcagggggtaagtgctggcgagcccagggaagggctccaggaatggtgtgggttctcaggccctgcttcaagcgtgggagcaaagcatgggagcccagattcagagcaa

SEQ ID NO: 331154 - DNA, 637 bp, Homo sapiens
aagatttttcttaaaaaaaagctccaatgtaccattctttcatgtgtttagaaaatgtcctgtttcttaaacttgtgggagttcttaatttctacttttagcgcacactgcagaaaaatgcacacactgttgggatccttgagggagaattctgagcagtggaccccatgatgagtgcttcatgtcagccttcacacacactccagtcctgagaagcggaggggagagggacagcaggcttgggtctgcagaagcagtgttctcttgcaaggcagagtcaccatgtgtcccatctttacagattggctgcaatgccgtcagctgggcccctgctgttgtacctggaagcctcatagaccacccatcggggcagaaacccaattacatcaagaggtttgcatcaggtggctgtgacaacctcatcaagctgtggaagtaagtagggatgtgtggccttctctttgaggggacacttctaccctttaccctactcaccatgactcagccacactcacaagaaacaaggtcacctttctttctccctcctgccagtaaaatactgttttcaatctgttggaggacatccttgaaaaacaacacaacacctgttcacctaattcccaactgttggagctga

SEQ ID NO: 331155 - DNA, 1616 bp, Homo sapiens
ggccgagacctggagcagccaccgccgcaatcatggtgtcagtaattaacactgtggatacctcccatgaggacatgattcacgacgcccagatggactactatggcacccgcctggcaacctgctcatcagacaggtccgtcaaaatctttgatgtgcgcaatggagggcagatccttatcgccgacctcaggggtcatgagggtcctgtgtggcaagtggcctgggctcaccccatgtacggcaacatcctggcatcgtgctcctatgaccggaaagtcattatctggagagaggaaaacggcacctgggagaagagccacgagcatgcgggacacgactcctcagtgaactcggtgtgctgggccccccatgactacggcctgatcctggcctgtgggagctcggatggggccatctccctgctgacttacaccggggaaggccaatgggaagtaaagaagatcaacaacgctcacaccattggctgcaatgccgtcagctgggcccctgctgttgtacctggaagcctcatagaccacccatcggggcagaaacccaattacatcaagaggtttgcatcaggtggctgtgacaacctcatcaagctgtggaaggaggaggaggacggccagtggaaggaggagcagaagctagaagcgcacagtgactgggttcgagatgtggcctgggccccctccatcggcctgcccaccagcaccatcgccagctgctcccaggatggtcgtgtgttcatttggacctgtgatgatgcctcaagcaatacgtggtcccctaaattgttgcacaagttcaacgatgtggtgtggcatgtgagctggtccatcacagccaacatcctggctgtctctggtggagacaataaggtgaccctgtggaaggagtcagttgatgggcagtgggtgtgcatcagtgatgtcaacaagggccagggctccgtatcagcatcagtgacagagggccagcagaacgagcagtgacaagacaggtggggcctggctccccacccgccagctccaggactgccccttcctgggccaactaaccaaacaactgggaagagcccccaactccaacaggattattttcccaggaggagttacagatgcagccacagattgatcatctgccttaacgtgatcggagatgctttgtaatctactgtccagctgaaagcactcatgttacgaggaagaaactacaagtgatgttcaaatctattttgggtcatttttatgtacctttgggttcaggcattatttggggggttttgtttccaaaggaactaaataaagtcatattgcttataaaaaaaaaaaaaaaaaaaaaaaaaaaaaaaaaaaagggggggggggaagaaagataacccccgagggggccacgtttacgggggtaccagggtttctggacaagggcgcccaatagggggccgaaaaaagcgaagcaagggcggggttaacaacgccggggggacaccggacgggatctctggagaggactactcgggcggcgaaagggacacaacacagggaatagcgcacgacaaaactcagggaagggacaccggaagctggcgaaattggacggtggtggct

SEQ ID NO: 331156 - DNA, 716 bp, Homo sapiens
tctacgactcatcactgccatttgaacttgtcacaagtttgggacatcaggttatgataaagatagacactagaagatcaacaacgctcacaccattggctgcaatgccgtcagctgggcccctgctgttgtacctggaagcctcatagaccacccatcggggcagaaacccaattacatcaagaggtttgcatcaggtggctgtgacaacctcatcaagctgtggaaggaggaggaggacggccagtggaaggaggagcagaagctagaagcgcacagtgactgggttcgagatgtggcctgggccccctccatcggcctgcccaccagcaccatcgccagctgctcccaggatggtcgtgtgttcatttggacctgtgatgatgcctcaagcaatacgtggtcccctaaattgttgcacaagttcaacgatgtggtgtggcatgtgagctggtccatcacagccaacatcctggctgtctctggtggagacaataaggaggagttacagatgcagccacagattgatcatctgccttaacgtgatcggagatgctttgtaatctactgtccagctgaaagcactcatgttacgaggaagaaactacaagtgatgttcaaatctattttgggtcatttttatgtacctttgggttcaggcattatttggggggttttgtttccaaaggaactaaataaagtcatattgcttataa

SEQ ID NO: 331157 - DNA, 1600 bp, Homo sapiens
gcgcgttgctgcccggaggctcctacgccacggcccgtcgggcccggcgccggaagtgagctgttccgaggcgccgccgggagctgccacgtccgagacctggagcagccaccgccgcaatcatggtgagtgttggtactgaggaggcctagcagggtgaaggccacggtcgcggccttcacgggttcctcggccgtcctgagtcccaaatcccaagctggagccgttcagctcccctccaccgcttagagatttggggggctctggccccgtccttgcggaccattccgaggggagtccagaggtgtcagtaattaacactgtggatacctcccatgaggacatgattcacgacgcccagatggactactatggcacccgcctggcaacctgctcatcagacaggtccgtcaaaatctttgatgtgcgcaatggagggcagatccttatcgccgacctcaggggtcatgagggtcctgtgtggcaagtggcctgggctcaccccatgtacggcaacatcctggcatcgtgctcctatgaccggaaagtcattatctggagagaggaaaacggcacctgggagaagagccacgagcatgcgggacacgactcctcagtgaactcggtgtgctgggccccccatgactacggcctgatcctggcctgtgggagctcggatggggccatctccctgctgacttacaccggggaaggccaatgggaagtaaagaagatcaacaacgctcacaccattggctgcaatgccgtcagctgggcccctgctgttgtacctggaagcctcatagaccacccatcggggcagaaacccaattacatcaagaggtttgcatcaggtggctgtgacaacctcatcaagctgtggaaggaggaggaggacggccagtggaaggaggagcagaagctagaagcgcacagtgactgggttcgagatgtggcctgggccccctccatcggcctgcccaccagcaccatcgccagctgctcccaggatggtcgtgtgttcatttggacctgtgatgatgcctcaagcaatacgtggtcccctaaattgttgcacaagttcaacgatgtggtgtggcatgtgagctggtccatcacagccaacatcctggctgtctctggtggagacaataaggtgaccctgtggaaggagtcagttgatgggcagtgggtgtgcatcagtgatgtcaacaagggccagggctccgtatcagcatcagtgacagagggccagcagaacgagcagtgacaagacaggtggggcctggctccccacccgccagctccaggactgccccttcctgggccaactaaccaaacaactgggaagagcccccaactccaacaggattattttcccaggaggagttacagatgcagccacagattgatcatctgccttaacgtgatcggagatgctttgtaatctactgtccagctgaaagcactcatgttacgaggaagaaactacaagtgatgttcaaatctattttgggtcatttttatgtacctttgggttcaggcattatttggggggttttgtttccaaaggaactaaataaagtcatattgcttataa

SEQ ID NO: 331158 - DNA, 1996 bp, Homo sapiens
gcgcgttgctgcccggaggctcctacgccacggcccgtcgggcccggcgccggaagtgagctgttccgaggcgccgccgggagctgccacgtccgagacctggagcagccaccgccgcaatcatggtgagtgttggtactgaggaggcctagcagggtgaaggccacggtcgcggccttcacgggttcctcggccgtcctgagtcccaaatcccaagctggagccgttcagctcccctccaccgcttagagatttggggggctctggccccgtccttgcggaccattccgaggggagtccagaggtgaggccgaggaacctccctgactttgcggggcgcgccgctcctgcgtctcctgccagtctcccttccttcttttcggtcaacaattgaaaacaaaacgaggaacagcagaggagctactgtataccgagccctcagcattgttcgtaatctccgcctgctaacagccttgtgaagaaggtgctattcttctcaacactttacagatgaggacacttgaggttcggagacgtggagcctcttgcacagctgcttaagtggtagtagagccgagatttgaaccctcctaaccattcctttctgccgcctactgcagctcccagcagagatgattgaactgttgctcggggtagggcccccagggcttgtgctggaaaagatgaaatggggaaaatggtgtcagtaattaacactgtggatacctcccatgaggacatgattcacgacgcccagatggactactatggcacccgcctggcaacctgctcatcagacaggtccgtcaaaatctttgatgtgcgcaatggagggcagatccttatcgccgacctcaggggtcatgagggtcctgtgtggcaagtggcctgggctcaccccatgtacggcaacatcctggcatcgtgctcctatgaccggaaagtcattatctggagagaggaaaacggcacctgggagaagagccacgagcatgcgggacacgactcctcagtgaactcggtgtgctgggccccccatgactacggcctgatcctggcctgtgggagctcggatggggccatctccctgctgacttacaccggggaaggccaatgggaagtaaagaagatcaacaacgctcacaccattggctgcaatgccgtcagctgggcccctgctgttgtacctggaagcctcatagaccacccatcggggcagaaacccaattacatcaagaggtttgcatcaggtggctgtgacaacctcatcaagctgtggaaggaggaggaggacggccagtggaaggaggagcagaagctagaagcgcacagtgactgggttcgagatgtggcctgggccccctccatcggcctgcccaccagcaccatcgccagctgctcccaggatggtcgtgtgttcatttggacctgtgatgatgcctcaagcaatacgtggtcccctaaattgttgcacaagttcaacgatgtggtgtggcatgtgagctggtccatcacagccaacatcctggctgtctctggtggagacaataaggtgaccctgtggaaggagtcagttgatgggcagtgggtgtgcatcagtgatgtcaacaagggccagggctccgtatcagcatcagtgacagagggccagcagaacgagcagtgacaagacaggtggggcctggctccccacccgccagctccaggactgccccttcctgggccaactaaccaaacaactgggaagagcccccaactccaacaggattattttcccaggaggagttacagatgcagccacagattgatcatctgccttaacgtgatcggagatgctttgtaatctactgtccagctgaaagcactcatgttacgaggaagaaactacaagtgatgttcaaatctattttgggtcatttttatgtacctttgggttcaggcattatttggggggttttgtttccaaaggaactaaataaagtcatattgcttataa

SEQ ID NO: 331159 - DNA, 1962 bp, Homo sapiens
gcgcgttgctgcccggaggctcctacgccacggcccgtcgggcccggcgccggaagtgagctgttccgaggcgccgccgggagctgccacgtccgagacctggagcagccaccgccgcaatcatggtgagtgttggtactgaggaggcctagcagggtgaaggccacggtcgcggccttcacgggttcctcggccgtcctgagtcccaaatcccaagctggagccgttcagctcccctccaccgcttagagatttggggggctctggccccgtccttgcggaccattccgaggggagtccagaggtgaggccgaggaacctccctgactttgcggggcgcgccgctcctgcgtctcctgccagtctcccttccttcttttcggtcaacaattgaaaacaaaacgaggaacagcagaggagctactgtataccgagccctcagcattgttcgtaatctccgcctgctaacagccttgtgaagaaggtgctattcttctcaacactttacagatgaggacacttgaggttcggagacgtggagcctcttgcacagctgcttaagtggtagtagagccgagatttgaaccctcctaaccattcctttctgccgcctactgcagctcccagcagagatgattgaactgttgctcggggtagggcccccaggtgtcagtaattaacactgtggatacctcccatgaggacatgattcacgacgcccagatggactactatggcacccgcctggcaacctgctcatcagacaggtccgtcaaaatctttgatgtgcgcaatggagggcagatccttatcgccgacctcaggggtcatgagggtcctgtgtggcaagtggcctgggctcaccccatgtacggcaacatcctggcatcgtgctcctatgaccggaaagtcattatctggagagaggaaaacggcacctgggagaagagccacgagcatgcgggacacgactcctcagtgaactcggtgtgctgggccccccatgactacggcctgatcctggcctgtgggagctcggatggggccatctccctgctgacttacaccggggaaggccaatgggaagtaaagaagatcaacaacgctcacaccattggctgcaatgccgtcagctgggcccctgctgttgtacctggaagcctcatagaccacccatcggggcagaaacccaattacatcaagaggtttgcatcaggtggctgtgacaacctcatcaagctgtggaaggaggaggaggacggccagtggaaggaggagcagaagctagaagcgcacagtgactgggttcgagatgtggcctgggccccctccatcggcctgcccaccagcaccatcgccagctgctcccaggatggtcgtgtgttcatttggacctgtgatgatgcctcaagcaatacgtggtcccctaaattgttgcacaagttcaacgatgtggtgtggcatgtgagctggtccatcacagccaacatcctggctgtctctggtggagacaataaggtgaccctgtggaaggagtcagttgatgggcagtgggtgtgcatcagtgatgtcaacaagggccagggctccgtatcagcatcagtgacagagggccagcagaacgagcagtgacaagacaggtggggcctggctccccacccgccagctccaggactgccccttcctgggccaactaaccaaacaactgggaagagcccccaactccaacaggattattttcccaggaggagttacagatgcagccacagattgatcatctgccttaacgtgatcggagatgctttgtaatctactgtccagctgaaagcactcatgttacgaggaagaaactacaagtgatgttcaaatctattttgggtcatttttatgtacctttgggttcaggcattatttggggggttttgtttccaaaggaactaaataaagtcatattgcttataa

SEQ ID NO: 331160 - DNA, 1826 bp, Homo sapiens
gcgcgttgctgcccggaggctcctacgccacggcccgtcgggcccggcgccggaagtgagctgttccgaggcgccgccgggagctgccacgtccgagacctggagcagccaccgccgcaatcatggtgagtgttggtactgaggaggcctagcagggtgaaggccacggtcgcggccttcacgggttcctcggccgtcctgagtcccaaatcccaagctggagccgttcagctcccctccaccgcttagagatttggggggctctggccccgtccttgcggaccattccgaggggagtccagaggtgaggccgaggaacctccctgactttgcggggcgcgccgctcctgcgtctcctgccagtctcccttccttcttttcggtcaacaattgaaaacaaaacgaggaacagcagaggagctactgtataccgagccctcagcattgttcgtaatctccgcctgctaacagccttgtgaagaagctcccagcagagatgattgaactgttgctcggggtagggcccccaggtgtcagtaattaacactgtggatacctcccatgaggacatgattcacgacgcccagatggactactatggcacccgcctggcaacctgctcatcagacaggtccgtcaaaatctttgatgtgcgcaatggagggcagatccttatcgccgacctcaggggtcatgagggtcctgtgtggcaagtggcctgggctcaccccatgtacggcaacatcctggcatcgtgctcctatgaccggaaagtcattatctggagagaggaaaacggcacctgggagaagagccacgagcatgcgggacacgactcctcagtgaactcggtgtgctgggccccccatgactacggcctgatcctggcctgtgggagctcggatggggccatctccctgctgacttacaccggggaaggccaatgggaagtaaagaagatcaacaacgctcacaccattggctgcaatgccgtcagctgggcccctgctgttgtacctggaagcctcatagaccacccatcggggcagaaacccaattacatcaagaggtttgcatcaggtggctgtgacaacctcatcaagctgtggaaggaggaggaggacggccagtggaaggaggagcagaagctagaagcgcacagtgactgggttcgagatgtggcctgggccccctccatcggcctgcccaccagcaccatcgccagctgctcccaggatggtcgtgtgttcatttggacctgtgatgatgcctcaagcaatacgtggtcccctaaattgttgcacaagttcaacgatgtggtgtggcatgtgagctggtccatcacagccaacatcctggctgtctctggtggagacaataaggtgaccctgtggaaggagtcagttgatgggcagtgggtgtgcatcagtgatgtcaacaagggccagggctccgtatcagcatcagtgacagagggccagcagaacgagcagtgacaagacaggtggggcctggctccccacccgccagctccaggactgccccttcctgggccaactaaccaaacaactgggaagagcccccaactccaacaggattattttcccaggaggagttacagatgcagccacagattgatcatctgccttaacgtgatcggagatgctttgtaatctactgtccagctgaaagcactcatgttacgaggaagaaactacaagtgatgttcaaatctattttgggtcatttttatgtacctttgggttcaggcattatttggggggttttgtttccaaaggaactaaataaagtcatattgcttataa

SEQ ID NO: 331161 - DNA, 1327 bp, Homo sapiens
ggccgagacctggagcagccaccgccgcaatcatggtgtcagtaattaacactgtggatacctcccatgaggacatgattcacgacgcccagatggactactatggcacccgcctggcaacctgctcatcagacaggtccgtcaaaatctttgatgtgcgcaatggagggcagatccttatcgccgacctcaggggtcatgagggtcctgtgtggcaagtggcctgggctcaccccatgtacggcaacatcctggcatcgtgctcctatgaccggaaagtcattatctggagagaggaaaacggcacctgggagaagagccacgagcatgcgggacacgactcctcagtgaactcggtgtgctgggccccccatgactacggcctgatcctggcctgtgggagctcggatggggccatctccctgctgacttacaccggggaaggccaatgggaagtaaagaagatcaacaacgctcacaccattggctgcaatgccgtcagctgggcccctgctgttgtacctggaagcctcatagaccacccatcggggcagaaacccaattacatcaagaggtttgcatcaggtggctgtgacaacctcatcaagctgtggaaggaggaggaggacggccagtggaaggaggagcagaagctagaagcgcacagtgactgggttcgagatgtggcctgggccccctccatcggcctgcccaccagcaccatcgccagctgctcccaggatggtcgtgtgttcatttggacctgtgatgatgcctcaagcaatacgtggtcccctaaattgttgcacaagttcaacgatgtggtgtggcatgtgagctggtccatcacagccaacatcctggctgtctctggtggagacaataaggtgaccctgtggaaggagtcagttgatgggcagtgggtgtgcatcagtgatgtcaacaagggccagggctccgtatcagcatcagtgacagagggccagcagaacgagcagtgacaagacaggtggggcctggctccccacccgccagctccaggactgccccttcctgggccaactaaccaaacaactgggaagagcccccaactccaacaggattattttcccaggaggagttacagatgcagccacagattgatcatctgccttaacgtgatcggagatgctttgtaatctactgtccagctgaaagcactcatgttacgaggaagaaactacaagtgatgttcaaatctattttgggtcattttataagcaatatgactttatttagttcctttggaaacaaaaccccccaaataatgcctgaacccaaaggtaca

SEQ ID NO: 331162 - DNA, 2050 bp, Homo sapiens
ggccgagacctggagcagccaccgccgcaatcatggtgtcagtaattaacactgtggatacctcccatgaggacatgattcacgacgcccagatggactactatggcacccgcctggcaacctgctcatcagacaggtccgtcaaaatctttgatgtgcgcaatggagggcagatccttatcgccgacctcaggggtcatgagggtcctgtgtggcaagtggcctgggctcaccccatgtacggcaacatcctggcatcgtgctcctatgaccggaaagtcattatctggagagaggaaaacggcacctgggagaagagccacgagcatgcgggacacgactcctcagtgaactcggtgtgctgggccccccatgactacggcctgatcctggcctgtgggagctcggatggggccatctccctgctgacttacaccggggaaggccaatgggaagtaaagaagatcaacaacgctcacaccattggctgcaatgccgtcagctgggcccctgctgttgtacctggaagcctcatagaccacccatcggggcagaaacccaattacatcaagaggtttgcatcaggtggctgtgacaacctcatcaagctgtggaaggaggaggaggacggccagtggaaggaggagcagaagctagaagcgcacagtgactgggttcgagatgtggcctgggccccctccatcggcctgcccaccagcaccatcgccagctgctcccaggatggtcgtgtgttcatttggacctgtgatgatgcctcaagcaatacgtggtcccctaaattgttgcacaagttcaacgatgtggtgtggcatgtgagctggtccatcacagccaacatcctggctgtctctggtggagacaataaggcaggccctcaagagacccgcaacagaaaggaaagccaccgactggagagaacctgcttcctgagccccaccaagttccaaaaaggagaatggggcttcgtcctcaccctcaaggagttgccaaactgggcttggttattattcacacttgaaaagaatgaggaaggtcagccagtcccctccaggtcgctcgggcttcctccaagctcctcttggttcaaatttgctgtgtcctccagccggcatctctcctctgttccgtaactgacagggcagcgaggtagcttccggatgactcctcccgccatggttcttccgtccatcagctcttccttcctcaactctgtggtatgtggctaggggagtttccaactcccaggggacatttcagttccccaaagataacacagctttgcacagtggatgtttacttgctggtggtcttatctaagatcaacattggcagctgtgcccggagaggcctccagggtccaggtaagtggaggcttcatgtctcaggaggtacctggtcaccacagttaggatttttctgtttggggatttttttttttatgggttggtggctctgaaaaagctgcaagtcttctctgaggactacagacctctctccaccctctccacattcagcctctctgggctccagggccaaaagatgtctacactcaggtggcagacaggcctgtgaagacctcctggtgacatgctcatatgttgctgggactaaaggtgggattttagccaccacagtgggttggtggtgagatgtttaccaacaggaggtactttgtccctcatgtccacttaaagattcagtccaacccggcctgtgcttctgctgtcccaagagactctagaaagctccaatcctccctgaggttgatcttttaagtcagggtaggtggtcattcggcaatcaactgctctactgcctcaatgtcctcctcactggacgtcctgccccaattccatcctgttcagcgcagactgattttcctggaacacaatgttcattatggagccagatggcatatcagaaagagcactgtattaggagtcaagagatccatgggggaatcccagcattgcccctgatggctgtatagctttggggaaagtgaggccctcttggcattcagtttttc

SEQ ID NO: 331163 - DNA, 986 bp, Homo sapiens
  misc_feature (860)..(860): n is a, c, g, or t
  misc_feature (863)..(863): n is a, c, g, or t
  misc_feature (865)..(865): n is a, c, g, or t
  misc_feature (867)..(867): n is a, c, g, or t
  misc_feature (875)..(875): n is a, c, g, or t
  misc_feature (883)..(884): n is a, c, g, or t
ggccgagacctggagcagccaccgccgcaatcatggtgtcagtaattaacactgtggatacctcccatgaggacatgattcacgacgcccagatggactactatggcacccgcctggcaacctgctcatcagacaggtccgtcaaaatctttgatgtgcgcaatggagggcagatccttatcgccgacctcaggggtcatgagggtcctgtgtggcaagtggcctgggctcaccccatgtacggcaacatcctggcatcgtgctcctatgaccggaaagtcattatctggagagaggaaaacggcacctgggagaagagccacgagcatgcgggacacgactcctcagtgaactcggtgtgctgggccccccatgactacggcctgatcctggcctgtgggagctcggatggggccatctccctgctgacttacaccggggaaggccaatgggaagtaaagaagatcaacaacgctcacaccattggctgcaatgccgtcagctgggcccctgctgttgtacctggaagcctcatagaccacccatcggggcagaaacccaattacatcaagaggtttgcatcaggtggctgtgacaacctcatcaagctgtggaaggaggaggaggacggccagtggaaggaggagcagaagctagaagcgcacagtgactgggttcgagatgtggcctgggccccctccatcggcctgcccaccagcaccatcgccagctgctcccaggatggtcgtgtgttcatttggacctgtgatgatgcctcaagcaatacgtggtcccctaaattgttgcacaagttcaacgatgtggtgtggcatgtgagctggtccatcacagccaccggngcncngngggcaccnaggccctnnggggcgcttggcgcgggggctcgatacggcggcctatcgaagggccagggaaagggggtccccctggtcttcggaaaagggccccctttgggtccctgtttg

SEQ ID NO: 331164 - DNA, 695 bp, Homo sapiens
ggccgagacctggagcagccaccgccgcaatcatggtgtcagtaattaacactgtggatacctcccatgaggacatgattcacgacgcccagatggactactatggcacccgcctggcaacctgctcatcagacaggtccgtcaaaatctttgatgtgcgcaatggagggcagatccttatcgccgacctcaggggtcatgagggtcctgtgtggcaagtggcctgggctcaccccatgtacggcaacatcctggcatcgtgctcctatgaccggaaagtcattatctggagagaggaaaacggcacctgggagaagagccacgagcatgcgggacacgactcctcagtgaactcggtgtgctgggccccccatgactacggcctgatcctggcctgtgggagctcggatggggccatctccctgctgacttacaccggggaaggccaatgggaagtaaagaagatcaacaacgctcacaccattggctgcaatgccgtcagctgggcccctgctgttgtacctggaagcctcatagaccacccatcggggcagaaacccaattacatcaagaggtttgcatcaggtggctgtgacaacctcatcaagctgtggaaggaggaggaggacggccagtggaaggaggagcagaagctagaagcgcacatcgcatacggtagccgagctcgaatttac

SEQ ID NO: 331165 - DNA, 585 bp, Homo sapiens
ggccgagacctggagcagccaccgccgcaatcatggtgtcagtaattaacactgtggatacctcccatgaggacatgattcacgacgcccagatggactactatggcacccgcctggcaacctgctcatcagacaggtccgtcaaaatctttgatgtgcgcaatggagggcagatccttatcgccgacctcaggggtcatgagggtcctgtgtggcaagtggcctgggctcaccccatgtacggcaacatcctggcatcgtgctcctatgaccggaaagtcattatctggagagaggaaaacggcacctgggagaagagccacgagcatgcgggacacgactcctcagtgaactcggtgtgctgggccccccatgactacggcctgatcctggcctgtgggagctcggatggggccatctccctgctgacttacaccggggaaggccaatgggaagtaaagaagatcaacaacgctcacaccactggctgcatgccgtcagctgggccactgctcttgcacctgcgagccatcacacctggtagccatcacacctggtagaccatcacacctgtgagccattacc

SEQ ID NO: 331166 - DNA, 186 bp, Homo sapiens
ggagtaggggacgaacctttcaaactttatgttaactgaggaaacagatgggcaaagaaaaaaatgcaagaaggaaagacaaatggccttccacgaagagccagcagacggaggctgttccgtggagacagcgtgggtggaaactttcatgagcagcgtgtgaggtagggggtgggtggagagcgg

SEQ ID NO: 331167 - DNA, 621 bp, Homo sapiens
aggagctgaacatccttggagcaacacatgacatctagaactctacatggtccaaggtctgtctcacaaggaggactgtgtaattaaagctaactacaaactaagctgattctactgtcagatttggtccaaacctacttttcttttaacaacctggtaaccaagtgccatacaagatacactgaactcaaatctacagagactatcaatccttgaacagcaagttcagagcagttgaatatgacaatagccatgtaggatgtgcctgcttcccctctgccatgattttaagtttcctgaggctcccccagtcatctttcctgtacagcctatggaaccatgagccagttaaacctcttttctttataaaatgccaagtctcagctttaatgctatcaatgagaacaagaatatttggcttatcttcaacatcttcataccatcagataactccaaagttaacacaggatacgtcatccacattgctgccagagcattctctctgaaatgattatctgatcatcatcctctcttcttctccacaagctcaaacactttcagtgactgatttgaaaccagttgtaccgtattattaggaaaggcgccttgatgaaaagatca

SEQ ID NO: 331168 - DNA, 167 bp, Homo sapiens
aagatagagaagctaccgaaactccaagactccgatattttctccatcacctttccctggaatagaaattaggatgaaagattattaattcaaaaaaaagcacaaactcagtggtcccagtttcatttgaatcctattcctggcttagccccacgtgtgcactgttt

SEQ ID NO: 331169 - DNA, 247 bp, Homo sapiens
ccccagtgccaagaacagtgcctggcaagtagcgctattcagtaaacatgggccaaattaaagaactcacagttctcttagaaaaatgggaattcaaaaggagagagttctgaaattggtgacttataacctttctcctgtgggcttggagccatctttctgcctttgcatttcaccctccatgggatcattcttttcccctccctcctgaaagcgactccactgtgacagatacctttcacaagtg

SEQ ID NO: 331170 - DNA, 547 bp, Homo sapiens
atatatcaaactgtttactcagaatagtgtcataacagcaaacgactatctgttcatggaaaggtcaaatttcaagtacgcaaataacctatttctttctcccttctttgctgctgaagtttagcttccttttgtttcacacagtaaatggagttggcatgatttctgtgttgcagggtgcctttctgaatattgtgcaaagtctttgtcctagacagtttgactcaatggaatatcacctttcactcttaacttttcccaaacagaaataaggtcaaacttgttttaagctttgactgaattctgaatacaactggtgcttaggagttaaatgaacttacctgtctaaatggcttgaatgagggccacctgcatgttcagtggtttcaggttatctaccttgatattcatctagtaaacctgtctttgaatgtctttccaaaatgctgggaatcctagggcactgtggcactatgtgtgatgtggggtgacatggctgaggatgtgggccttggagggagtcaggtctcagtggatcctggttcta

SEQ ID NO: 331171 - DNA, 354 bp, Homo sapiens
catgccttgattttctctctaactcttagagaagaattttactaattttcaagattttggaaattgagtgctcaatatatattacttctgtccagctccctacctacttcctggtccagccctctggaccactgacaccttttttgtttggtagcacaacttttgaaaaaatataattttgattatacacgttaaatataatcatatatatacatatatatgtacatatgtatgtctatatacatgtgcacacacacgtgtgtgtatatgatttaacatatattcttcctaaggaaatctacaattctaagaaattctcagatgaacttctacaggttttgtgcaacaggtttg

SEQ ID NO: 331172 - DNA, 248 bp, Homo sapiens
ggaatgtgctcaggaaacatgaacttaaagagatatacatttaaagcacattgtttaaaaatagatttatgttttatcaatattaaaaagcactagaaaaaattatttacccctgaaaaattatgctgtcatggtttgggggcagtatttaatcattaattgattttcatattttagactttaaagccagtcctaagtttataagaatttcataagttaaagcacatacagtgctcagaagggtgtct

SEQ ID NO: 331173 - DNA, 341 bp, Homo sapiens
ttgtgattaatagcagatcaggcaaaatcaggactcatgatgttacagacaagaataaaagaaagctccaggaaaactgtttcacagaaaacacagactaaaccctccaaaatggtgaaatgtgagtcccaaatggggctgaacgtagcaaacaaagcaaaagggggcagtgagtttcaagatcacactacgtcagttgctttggatagtatgactttccctggtactaggatctgaaataaatttctcccataggtcctaataagaaggatgctgtgggccaaacgtggtggctcacacctgtaatcccagcattttgggaggccgaggcgggaagatca

SEQ ID NO: 331174 - DNA, 227 bp, Homo sapiens
caagagatctttgggggccccttctagagctgaggcagcaaagctgcctagaaattgggccccagccaagcagagccactgaggtctggcggcccacattgagcaggcgggggtccgggtccatgtggggaggttaatgcagctgcagtgtgcaggcacaggcagcaggtggcagcgtgaccctcagctgtgccacgttacctgtgagccagcagagcagggagttc

SEQ ID NO: 331175 - DNA, 1459 bp, Homo sapiens
cggaacacaacaaaatcatatcaacgcgtggaaaggaaaataaccaccaatctagaattctagaacaaaggtgaaatagacatttccagacacacaaaaaccaaggaaatgcatcaccaacagacccacattaaaggaaatactatagcattctttaggcagaacgaaatgatcccagatagaaacttagagatgcagaaagaattcgatgcctaccccaagactttggaggacttccgggtcaagacctgcgggggcgccaccgtgaccattgtcagtggccttctcatgctgctactgttcctgtccgagctgcagtattacctcaccacggaggtgcatcctgagctctacgtggacaagtcgcggggagataaactgaagatcaacatcgatgtactttttccgcacatgccttgtgcctatctgagtattgatgccatggatgtggccggagaacagcagctggatgtggaacacaacctgttcaagcaacgactagataaagatggcatccccgtgagctcagaggctgagcggcatgagcttgggaaagtcgaggtgacggtgtttgaccctgactccctggaccctgatcgctgtgagagctgctatggtgctgaggcagaagatatcaagtgctgtaacacctgtgaagatgtgcgggaggcatatcgccgtagaggctgggccttcaagaacccagatactattgagcagtgccggcgagagggcttcagccagaagatgcaggagcagaagaatgaaggctgccaggtgtatggcttcttggaagtcaataaggtggccggaaacttccactttgcccctgggaagagcttccagcagtcccatgtgcacgtccatgacttgcagagctttggccttgacaacatcaacatgacccactacatccagcacctgtcatttggggaggactatccaggcattgtgaaccccctggaccacaccaatgtcactgcgccccaagcctccatgatgttccagtactttgtgaaggtggtgcccactgtgtacatgaaggtggacggagaggtactgaggacaaatcagttctctgtgaccagacatgagaaggttgccaatgggctgttgggcgaccaaggccttcccggagtcttcgtcctctatgagctctcgcccatgatggtgaagctgacggagaagcacaggtccttcacccacttcctgacaggtgtgtgcgccatcattgggggcatgttcacagtggctggactcatcgattcgctcatctaccactcagcacgagccatccagaagaaaattgatctagggaagacaacgtagtcaccctcggtgcttcctctgtctcctctttctccctggcctgtggttgtcccccagcctctgccaccctccacctcctcggtcagccccagccccaggttgataaatctattgattgattgtgatagta

SEQ ID NO: 331176 - DNA, 149 bp, Homo sapiens
cggcacgaggccgagggtgactacgttgtcttccctagatcaattttcttctggatggcctgtggttgtcccccagcctctgccaccctccacctcctcggtcagccccagccccaggttgataaatctattgattgattgtgatagta

SEQ ID NO: 331177 - DNA, 797 bp, Homo sapiens
  misc_feature (432)..(432): n is a, c, g, or t
  misc_feature (437)..(437): n is a, c, g, or t
ggtaaagcctgggtgccccaggtttggttgggggtgaaggggcagatgctggcctggccagttaagtgacaaggctctcagcgtcaaaagccaaggcccccactgggccagtgccagctccttgtctctctcccagtggctggactcatcgattcgctcatctaccactcagcacgagccatccagaagaaaattgatctagggaagacaacgtagtcaccctcggtgcttcctctgtctcctctttctccctggcctgtggttgtcccccagcctctgccaccctccacctcctcggtcagccccagccccaggttgataaatctattgattgattgtgatagtaaaaaaaaaaaaaaaaaaaaaaaaaaaaaaaaaaaaaaaaaaaaaaaaaaaaaaaaaaaaaaaaaaaaaaaagaaaacaaaaaaaanaaaanaaaaaaaaaaggggggggggggggcaaaaatatcctggggacgagagacacccccacgcagacgctgttggttagttgttagagggggcgaggcgcaccacaacagggcggcgcgaaataaacattgaaacgaaggccggcgcggccgaccgaacaacaacagatggcgggagcggaccgacgccagaccggaggcgacggtcagctggaacaacccacatcattgtggcgggcaaacaaggaggaccagccacaccccccagaagggactggcgggcggagaaaacaaccaacgagcggcggtggtagagacccacgcaccacgcgggaggcagagacgggccggagcgcaagaccaac

SEQ ID NO: 331178 - DNA, 747 bp, Homo sapiens
ataggtctacggcctgtatcctgggtatctccaatatttaaaagtcaggactggaaggaacgattgggacggattagccattgacgtagaagaaccaagaggtgtcccaaaagccaagtggagagagtttcaagaagagagagtgagcagttgtatcagaagctactgatagtccagtaaaatgaggagtgagaattgaccattgaaattagcaacaaagagattcctggagactttgaaaggaacaattttgatactgttgaggatgaaaatcggatcaaagagcaaaaaaggaagtggagacattacctataggtgacttgggagtttcactgtaagggagagctgagaaatggagtgggatctgaaggagaaagtggtgagatggtgggtttggtggtgagagcaagtgaagttctgttgcttctcttttcttagtggaaattgaaagcaaggacattagctaagtgaagaaataggagggggttttgggagcctaaggagagaggagaaggtctaagtcaccttagagagtgggagagtgaactgattagagaaatgaagtggaattgccaggcagtcctaaaggagcttcaggaaagaagtaggtacagagagttgaatggaaccagggtgtgggttttgctggatttgtaaatgaaagacgagaggaacagggagttgtggttatgtgcagagtattaccagtgacccttgggcttaagcaccttggggtccgccctgcac

SEQ ID NO: 331179 - DNA, 1176 bp, Homo sapiens
  misc_feature (24)..(24): n is a, c, g, or t
aattcgcggccgcgtcgacacggntgcgagcaagacgacagaagggcacggaggtgcatcctgagctctacgtggacaagtcgcggggagataaactgaagatcaacatcgatgtactttttccgcacatgccttgtgcctatctgagtattgatgccatggatgtggccggagaacagcagctggatgtggaacacaacctgttcaagcaacgactagataaagatggcatccccgtgagctcagaggctgagcggcatgagcttgggaaagtcgaggtgacggtgtttgaccctgactccctggaccctgatcgctgtgagagctgctatggtgctgaggcagaagatatcaagtgctgtaacacctgtgaagatgtgcgggaggcatatcgccgtagaggctgggccttcaagaacccagatactattgagcagtgccggcgagagggcttcagccagaagatgcaggagcagaagaatgaaggctgccaggtgtatggcttcttggaagtcaataaggtggccggaaacttccactttgcccctgggaagagcttccagcagtcccatgtgcacgtccatgacttgcagagctttggccttgacaacatcaacatgacccactacatccagcacctgtcatttggggaggactatccaggcattgtgaaccccctggaccacaccaatgtcactgcgccccaagcctccatgatgttccagtactttgtgaaggtggtgcccactgtgtacatgaaggtggacggagaggtactgaggacaaatcagttctctgtgaccagacatgagaaggttgccaatgggctgttgggcgaccaaggccttcccggagtcttcgtcctctatgagctctcgcccatgatggtgaagctgacggagaagcacaggtccttcacccacttcctgacaggtgtgtgcgccatcattgggggcatgttcacagtggctggactcatcgattcgctcatctaccactcagcacgagccatccagaagaaaattgatctagggaagacaacgtagtcaccctcggtgcttcctctgtctcctctttctccctggcctgtggttgtcccccagcctctgccaccctccacctcctcggtcagccccagccccaggttgataaatctattgattgattgtgatagta

SEQ ID NO: 331180 - DNA, 1423 bp, Homo sapiens
  misc_feature (83)..(83): n is a, c, g, or t
gagctcggtacccaagcttttacgcatcaacctatacatctaaatcttggacttcatgtgtgtctacccacagtgcccatggnctatctacttacacaccctctacctggagcttctgtggaaagaagggctgtcctgtgacaatttgcactaacatacttttccagctaaactctagttcaaaggtctgtgagcttgtcactttctggagttaggaaaaggcatatcaacttcttcatcaagggaaccatcctgtcccctgtgaaagattataacagccctttcccaggtaagggatgtattgtgattatctgaaatattgagatttttggtagacctggacaatagcggtaaaagcttaagcttttaccgcacatgccttgtgcctatctgagtattgatgccatggatgtggccggagaacagcagctggatgtggaacacaacctgttcaagcaacgactagataaagatggcatccccgtgagctcagaggctgagcggcatgagcttgggaaagtcgaggtgacggtgtttgaccctgactccctggaccctgatcgctgtgagagctgctatggtgctgaggcagaagatatcaagtgctgtaacacctgtgaagatgtgcgggaggcatatcgccgtagaggctgggccttcaagaacccagatactattgagcagtgccggcgagagggcttcagccagaagatgcaggagcagaagaatgaaggctgccaggtgtatggcttcttggaagtcaataaggtggccggaaacttccactttgcccctgggaagagcttccagcagtcccatgtgcacgtccatgacttgcagagctttggccttgacaacatcaacatgacccactacatccagcacctgtcatttggggaggactatccaggcattgtgaaccccctggaccacaccaatgtcactgcgccccaagcctccatgatgttccagtactttgtgaaggtggtgcccactgtgtacatgaaggtggacggagaggtactgaggacaaatcagttctctgtgaccagacatgagaaggttgccaatgggctgttgggcgaccaaggccttcccggagtcttcgtcctctatgagctctcgcccatgatggtgaagctgacggagaagcacaggtccttcacccacttcctgacaggtgtgtgcgccatcattgggggcatgttcacagtggctggactcatcgattcgctcatctaccactcagcacgagccatccagaagaaaattgatctagggaagacaacgtagtcaccctcggtgcttcctctgtctcctctttctccctggcctgtggttgtcccccagcctctgccaccctccacctcctcggtcagccccagccccaggttgataaatctattgattgattgtgatagta

SEQ ID NO: 331181 - DNA, 1594 bp, Homo sapiens
cggaacacaacaaaatcatatcaacgcgtggaaaggaaaataaccaccaatctagaattctagaacaaaggtgaaatagacatttccagacacacaaaaaccaaggaaatgcatcaccaacagacccacattaaaggaaatactatagcattctttaggcagaacgaaatgatcccagatagaaacttagagatgcagaaagaattcgatgcctaccccaagactttggaggacttccgggtcaagacctgcgggggcgccaccgtgaccattgtcagtggccttctcatgctgctactgttcctgtccgagctgcagtattacctcaccacggaggtgcatcctgagctctacgtggacaagtcgcggggagataaactgaagatcaacatcgatgtactttttccgcacatgccttgtgcctatctgagtattgatgccatggatgtggccggagaacagcagctggatgtggaacacaacctgttcaagcaacgactagataaagatggcatccccgtgagctcagaggctgagcggcatgagcttgggaaagtcgaggtgacggtgtttgaccctgactccctggaccctgatcgctgtgagagctgctatggtgctgaggcagaagatatcaagtgctgtaacacctgtgaagatgtgcgggaggcatatcgccgtagaggctgggccttcaagaacccagatactattgagcagtgccggcgagagggcttcagccagaagatgcaggagcagaagaatgaaggctgccaggtgtatggcttcttggaagtcaataaggtggccggaaacttccactttgcccctgggaagagcttccagcagtcccatgtgcacgtccatgacttgcagagctttggccttgacaacatcaacatgacccactacatccagcacctgtcatttggggaggactatccaggcattgtgaaccccctggaccacaccaatgtcactgcgccccaagcctccatgatgttccagtactttgtgaaggtggtgcccactgtgtacatgaaggtggacggagaggtactgaggacaaatcagttctctgtgaccagacatgagaaggttgccaatgggctgttgggcgaccaaggccttcccggagtcttcgtcctctatgagctctcgcccatgatggtgaagctgacggagaagcacaggtccttcacccacttcctgacaggtgtgtgcgccatcattgggggcatgttcacagtggctggactcatcgattcgctcatctaccactcagcacgagccatccagaagaaaattgatctagggaagacaacgtagtcaccctcggtgcttcctctgtctcctctttctccctggcctgtggttgtcccccagcctctgccaccctccacctcctcggtcagccccagccccaggttgataaatctattgattgattgtgatagtaaaaaacaacccacaacaacactacaccttcgcaggccactctatttccgggcgcccgaatacacgagcgtcaccgacacgggccccagtggtcctacctggtccctgaccccgcgttttcttgatcccaagttgg

SEQ ID NO: 331182 - DNA, 2212 bp, Homo sapiens
cggaacacaacaaaatcatatcaacgcgtggaaaggaaaataaccaccaatctagaattctagaacaaaggtgaaatagacatttccagacacacaaaaaccaaggaaatgcatcaccaacagacccacattaaaggaaatactatagcattctttaggcagaacgaaatgatcccagatagaaacttagagatgcagaaagaattcgatgcctaccccaagactttggaggacttccgggtcaagacctgcgggggcgccaccgtgaccattgtcagtggccttctcatgctgctactgttcctgtccgagctgcagtattacctcaccacggaggtgcatcctgagctctacgtggacaagtcgcggggagataaactgaagatcaacatcgatgtactttttccgcacatgccttgtgcctatctgagtattgatgccatggatgtggccggagaacagcagctggatgtggaacacaacctgttcaagcaacgactagataaagatggcatccccgtgagctcagaggctgagcggcatgagcttgggaaagtcgaggtgacggtgtttgaccctgactccctggaccctgatcgctgtgagagctgctatggtgctgaggcagaagatatcaagtgctgtaacacctgtgaagatgtgcgggaggcatatcgccgtagaggctgggccttcaagaacccagatactattgagcagtgccggcgagagggcttcagccagaagatgcaggagcagaagaatgaaggctgccaggtgtatggcttcttggaagtcaataaggtggccggaaacttccactttgcccctgggaagagcttccagcagtcccatgtgcacgtccatgacttgcagagctttggccttgacaacatcaacatgacccactacatccagcacctgtcatttggggaggactatccaggcattgtgaaccccctggaccacaccaatgtcactgcgccccaagcctccatgatgttccagtactttgtgaaggtggtgcccactgtgtacatgaaggtggacggagaggtactgaggacaaatcagttctctgtgaccagacatgagaaggttgccaatgggctgttgggcgaccaaggccttcccggagtcttcgtcctctatgagctctcgcccatgatggtgaagctgacggagaagcacaggtccttcacccacttcctgacaggtgtgtgcgccatcattgggggcatgttcacagtggctggactcatcgattcgctcatctaccactcagcacgagccatccagaagaaaattgatctagggaagacaacgtagtcaccctcggtgcttcctctgtctcctctttctccctggcctgtggttgtcccccagcctctgccaccctccacctcctcggtcagccccagccccaggttgataaatctattgattgattgtgatagtaaaaaaaaaacaaaaaaaaaaaaaaaaaaaaaaaaaaaaaaaaaaaaaaaaaaaaaaaaaaaaaaaaaaaaaaaaaaaaaaaaaaaaaaagaaaacaaaaaaagagagagagggcggcggcagcggtcctatgatatatctctcttccgtccagaggaggcgcgcgctactcggttcagtccccgccgacctccttattattgtataaaaacgggaggcacgcactcactaataggaggaggtgcttattatttataataagcagagcgaggacgggcggcgcagcgtatatattcacaccacacgcaccgcgaggtccgacgggacagaccaacaccggcccgcttactagcaagaggagctctaaatcttgtaacagacagggacgagcacacacctatcaactacctctttcgggctgcggggcgtgaaggacagaaatatgagtggagaggacacaaacaatccttctcctactgagccatagatctatattaagaccctgcgtagaggggagagtcgctatacatgacatacacctcctcagtcgagcgagagcgtaaagctgacgactgtgagacaacaacaccaccaaacaccaaacataatattctaacgcgcccacaggacgaaaaacagaatcatagccgacgcaacgctggacgtcagcatctaatagccctgaagacacaccaattactatttctacatcacgcagaggcgatcttgatatccaaaataataattaataaga

SEQ ID NO: 331183 - DNA, 1928 bp, Homo sapiens
  misc_feature (1563)..(1563): n is a, c, g, or t
  misc_feature (1568)..(1568): n is a, c, g, or t
cggaacacaacaaaatcatatcaacgcgtggaaaggaaaataaccaccaatctagaattctagaacaaaggtgaaatagacatttccagacacacaaaaaccaaggaaatgcatcaccaacagacccacattaaaggaaatactatagcattctttaggcagaacgaaatgatcccagatagaaacttagagatgcagaaagaattcgatgcctaccccaagactttggaggacttccgggtcaagacctgcgggggcgccaccgtgaccattgtcagtggccttctcatgctgctactgttcctgtccgagctgcagtattacctcaccacggaggtgcatcctgagctctacgtggacaagtcgcggggagataaactgaagatcaacatcgatgtactttttccgcacatgccttgtgcctatctgagtattgatgccatggatgtggccggagaacagcagctggatgtggaacacaacctgttcaagcaacgactagataaagatggcatccccgtgagctcagaggctgagcggcatgagcttgggaaagtcgaggtgacggtgtttgaccctgactccctggaccctgatcgctgtgagagctgctatggtgctgaggcagaagatatcaagtgctgtaacacctgtgaagatgtgcgggaggcatatcgccgtagaggctgggccttcaagaacccagatactattgagcagtgccggcgagagggcttcagccagaagatgcaggagcagaagaatgaaggctgccaggtgtatggcttcttggaagtcaataaggtggccggaaacttccactttgcccctgggaagagcttccagcagtcccatgtgcacgtccatgacttgcagagctttggccttgacaacatcaacatgacccactacatccagcacctgtcatttggggaggactatccaggcattgtgaaccccctggaccacaccaatgtcactgcgccccaagcctccatgatgttccagtactttgtgaaggtggtgcccactgtgtacatgaaggtggacggagaggtactgaggacaaatcagttctctgtgaccagacatgagaaggttgccaatgggctgttgggcgaccaaggccttcccggagtcttcgtcctctatgagctctcgcccatgatggtgaagctgacggagaagcacaggtccttcacccacttcctgacaggtgtgtgcgccatcattgggggcatgttcacagtggctggactcatcgattcgctcatctaccactcagcacgagccatccagaagaaaattgatctagggaagacaacgtagtcaccctcggtgcttcctctgtctcctctttctccctggcctgtggttgtcccccagcctctgccaccctccacctcctcggtcagccccagccccaggttgataaatctattgattgattgtgatagtaaaaaaaaaacaaaaaaaaaaaaaaaaaaaaaaaaaaaaaaaaaaaaaaaaaaaaaaaaaaaaaaaaaaaaaaaaaaaaaaaaaaaaaaagaaaacaaaaaaaanaaaanaaaaaaaaaaggggggggggggggcaaaaatatcctggggacgagagacacccccacgcagacgctgttggttagttgttagagggggcgaggcgcaccacaacagggcggcgcgaaataaacattgaaacgaaggccggcgcggccgaccgaacaacaacagatggcgggagcggaccgacgccagaccggaggcgacggtcagctggaacaacccacatcattgtggcgggcaaacaaggaggaccagccacaccccccagaagggactggcgggcggagaaaacaaccaacgagcggcggtggtagagacccacgcaccacgcgggaggcagagacgggccggagcgcaagaccaac

SEQ ID NO: 331184 - DNA, 2144 bp, Homo sapiens
cggaacacaacaaaatcatatcaacgcgtggaaaggaaaataaccaccaatctagaattctagaacaaaggtgaaatagacatttccagacacacaaaaaccaaggaaatgcatcaccaacagacccacattaaaggaaatactatagcattctttaggcagaacgaaatgatcccagatagaaacttagagatgcagaaagaattcgatgcctaccccaagactttggaggacttccgggtcaagacctgcgggggcgccaccgtgaccattgtcagtggccttctcatgctgctactgttcctgtccgagctgcagtattacctcaccacggaggtgcatcctgagctctacgtggacaagtcgcggggagataaactgaagatcaacatcgatgtactttttccgcacatgccttgtgcctatctgagtattgatgccatggatgtggccggagaacagcagctggatgtggaacacaacctgttcaagcaacgactagataaagatggcatccccgtgagctcagaggctgagcggcatgagcttgggaaagtcgaggtgacggtgtttgaccctgactccctggaccctgatcgctgtgagagctgctatggtgctgaggcagaagatatcaagtgctgtaacacctgtgaagatgtgcgggaggcatatcgccgtagaggctgggccttcaagaacccagatactattgagcagtgccggcgagagggcttcagccagaagatgcaggagcagaagaatgaaggctgccaggtgtatggcttcttggaagtcaataaggtggccggaaacttccactttgcccctgggaagagcttccagcagtcccatgtgcacgtccatgacttgcagagctttggccttgacaacatcaacatgacccactacatccagcacctgtcatttggggaggactatccaggcattgtgaaccccctggaccacaccaatgtcactgcgccccaagcctccatgatgttccagtactttgtgaaggtggtgcccactgtgtacatgaaggtggacggagaggtactgaggacaaatcagttctctgtgaccagacatgagaaggttgccaatgggctgttgggcgaccaaggccttcccggagtcttcgtcctctatgagctctcgcccatgatggtgaagctgacggagaagcacaggtccttcacccacttcctgacaggtgtgtgcgccatcattgggggcatgttcacagtggctggactcatcgattcgctcatctaccactcagcacgagccatccagaagaaaattgatctagggaagacaacgtagtcaccctcggtgcttcctctgtctcctctttctccctggcctgtggttgtcccccagcctctgccaccctccacctcctcggtcagccccagccccaggttgataaatctattgattgattgtgatagtaaaaaaaaaaaaaaaaaaaaaagaaaacaaaaaaagagagagagggcggcggcagcggtcctatgatatatctctcttccgtccagaggaggcgcgcgctactcggttcagtccccgccgacctccttattattgtataaaaacgggaggcacgcactcactaataggaggaggtgcttattatttataataagcagagcgaggacgggcggcgcagcgtatatattcacaccacacgcaccgcgaggtccgacgggacagaccaacaccggcccgcttactagcaagaggagctctaaatcttgtaacagacagggacgagcacacacctatcaactacctctttcgggctgcggggcgtgaaggacagaaatatgagtggagaggacacaaacaatccttctcctactgagccatagatctatattaagaccctgcgtagaggggagagtcgctatacatgacatacacctcctcagtcgagcgagagcgtaaagctgacgactgtgagacaacaacaccaccaaacaccaaacataatattctaacgcgcccacaggacgaaaaacagaatcatagccgacgcaacgctggacgtcagcatctaatagccctgaagacacaccaattactatttctacatcacgcagaggcgatcttgatatccaaaataataattaataaga

SEQ ID NO: 331185 - DNA, 1384 bp, Homo sapiens
cggacgagggagtctgtaggggcgggccggctggcgtcccctttccggccggtccccatggaggcgctggggaagctgaagcagttcgatgcctaccccaagactttggaggacttccgggtcaagacctgcgggggcgccaccgtgaccattgtcagtggccttctcatgctgctactgttcctgtccgagctgcagtattacctcaccacggaggtgcatcctgagctctacgtggacaagtcgcggggagataaactgaagatcaacatcgatgtactttttccgcacatgccttgtgcctatctgagtattgatgccatggatgtggccggagaacagcagctggatgtggaacacaacctgttcaagcaacgactagataaagatggcatccccgtgagctcagaggctgagcggcatgagcttgggaaagtcgaggtgacggtgtttgaccctgactccctggaccctgatcgctgtgagagctgctatggtgctgaggcagaagatatcaagtgctgtaacacctgtgaagatgtgcgggaggcatatcgccgtagaggctgggccttcaagaacccagatactattgagcagtgccggcgagagggcttcagccagaagatgcaggagcagaagaatgaaggctgccaggtgtatggcttcttggaagtcaataaggtggccggaaacttccactttgcccctgggaagagcttccagcagtcccatgtgcacgggtgtgtgtgcaggttaaagatgatagcacggagcctggcttgtgtccatgacttgcagagctttggccttgacaacatcaacatgacccactacatccagcacctgtcatttggggaggactatccaggcattgtgaaccccctggaccacaccaatgtcactgcgccccaagcctccatgatgttccagtactttgtgaaggtggtgcccactgtgtacatgaaggtggacggagaggtactgaggacaaatcagttctctgtgaccagacatgagaaggttgccaatgggctgttgggcgaccaaggccttcccggagtcttcgtcctctatgagctctcgcccatgatggtgaagctgacggagaagcacaggtccttcacccacttcctgacaggtgtgtgcgccatcattgggggcatgttcacagtggctggactcatcgattcgctcatctaccactcagcacgagccatccagaagaaaattgatctagggaagacaacgtagtcaccctcggtgcttcctctgtctcctctttctccctggcctgtggttgtcccccagcctctgccaccctccacctcctcggtcagccccagccccaggttgataaatctattgattgattgtgatagta

SEQ ID NO: 331186 - DNA, 1327 bp, Homo sapiens
cggaacacaacaaaatcatatcaacgcgtggaaaggaaaataaccaccaatctagaattctagaacaaaggtgaaatagacatttccagacacacaaaaaccaaggaaatgcatcaccaacagacccacattaaaggaaatactatagcattctttaggcagaacgaaatgatcccagatagaaacttagagatgcagaaagaattcgatgcctaccccaagactttggaggacttccgggtcaagacctgcgggggcgccaccgtgaccattgtcagtggccttctcatgctgctactgttcctgtccgagctgcagtattacctcaccacggaggtgcatcctgagctctacgtggacaagtcgcggggagataaactgaagatcaacatcgatgtactttttccgcacatgccttgtgcctatctgagtattgatgccatggatgtggccggagaacagcagctggatgtggaacacaacctgttcaagcaacgactagataaagatggcatccccgtgagctcagaggctgagcggcatgagcttgggaaagtcgaggtgacggtgtttgaccctgactccctggaccctgatcgctgtgagagctgctatggtgctgaggcagaagatatcaagtgctgtaacacctgtgaagatgtgcgggaggcatatcgccgtagaggctgggccttcaagaacccagatactattgagcagtgccggcgagagggcttcagccagaagatgcaggagcagaagaatgaaggctgccaggtgtatggcttcttggaagtcaataaggtggccggaaacttccactttgcccctgggaagagcttccagcagtcccatgtgcacgtccatgacttgcagagctttggccttgacaacatcaacatgacccactacatccagcacctgtcatttggggaggactatccaggcattgtgaaccccctggaccacaccaatgtcactgcgccccaagcctccatgatgttccagtactttgtgaaggtggtgcccactgtgtacatgaaggtggacggagaggtactgaggacaaatcagttctctgtgaccagacatgagaaggttgccaatgggctgttgggcgaccaaggccttcccggagtcttcgtcctctatgagctctcgcccatgatggtgaagctgacggagaagcacaggtccttcacccacttcctgacaggtgtgtgcgccatcattgggggcatgttcacagtggctggactcatcgattcgctcatctaccactgtgatagtactcactggtctccgtgtgatccttgccatggccaga

SEQ ID NO: 331187 - DNA, 1555 bp, Homo sapiens
cggaacacaacaaaatcatatcaacgcgtggaaaggaaaataaccaccaatctagaattctagaacaaaggtgaaatagacatttccagacacacaaaaaccaaggaaatgcatcaccaacagacccacattaaaggaaatactatagcattctttaggcagaacgaaatgatcccagatagaaacttagagatgcagaaagaattcgatgcctaccccaagactttggaggacttccgggtcaagacctgcgggggcgccaccgtgaccattgtcagtggccttctcatgctgctactgttcctgtccgagctgcagtattacctcaccacggaggtgcatcctgagctctacgtggacaagtcgcggggagataaactgaagatcaacatcgatgtactttttccgcacatgccttgtgcctatctgagtattgatgccatggatgtggccggagaacagcagctggatgtggaacacaacctgttcaagcaacgactagataaagatggcatccccgtgagctcagaggctgagcggcatgagcttgggaaagtcgaggtgacggtgtttgaccctgactccctggaccctgatcgctgtgagagctgctatggtgctgaggcagaagatatcaagtgctgtaacacctgtgaagatgtgcgggaggcatatcgccgtagaggctgggccttcaagaacccagatactattgagcagtgccggcgagagggcttcagccagaagatgcaggagcagaagaatgaaggctgccaggtgtatggcttcttggaagtcaataaggtggccggaaacttccactttgcccctgggaagagcttccagcagtcccatgtgcacgtccatgacttgcagagctttggccttgacaacatcaacatgacccactacatccagcacctgtcatttggggaggactatccaggcattgtgaaccccctggaccacaccaatgtcactgcgccccaagcctccatgatgttccagtactttgtgaaggtggtgcccactgtgtacatgaaggtggacggagaggctcaacaggaaaggggaaggagcaggggtggggctgatggtggctggagccaggtcctagccctagccctggcccaggctcccctcccaccccaggtactgaggacaaatcagttctctgtgaccagacatgagaaggttgccaatgggctgttgggcgaccaaggccttcccggagtcttcgtcctctatgagctctcgcccatgatggtgaagctgacggagaagcacaggtccttcacccacttcctgacaggtgtgtgcgccatcattgggggcatgttcacagtggctggactcatcgattcgctcatctaccactcagcacgagccatccagaagaaaattgatctagggaagacaacgtagtcaccctcggtgcttcctctgtctcctctttctccctggcctgtggttgtcccccagcctctgccaccctccacctcctcggtcagccccagccccaggttgataaatctattgattgattgtgatagta

SEQ ID NO: 331188 - DNA, 1477 bp, Homo sapiens
cggaacacaacaaaatcatatcaacgcgtggaaaggaaaataaccaccaatctagaattctagaacaaaggtgaaatagacatttccagacacacaaaaaccaaggaaatgcatcaccaacagacccacattaaaggaaatactatagcattctttaggcagaacgaaatgatcccagatagaaacttagagatgcagaaagaattcgatgcctaccccaagactttggaggacttccgggtcaagacctgcgggggcgccaccgtgaccattgtcagtggccttctcatgctgctactgttcctgtccgagctgcagtattacctcaccacggaggtgcatcctgagctctacgtggacaagtcgcggggagataaactgaagatcaacatcgatgtactttttccgcacatgccttgtgcctatctgagtattgatgccatggatgtggccggagaacagcagctggatgtggaacacaacctgttcaagcaacgactagataaagatggcatccccgtgagctcagaggctgagcggcatgagcttgggaaagtcgaggtgacggtgtttgaccctgactccctggaccctgatcgctgtgagagctgctatggtgctgaggcagaagatatcaagtgctgtaacacctgtgaagatgtgcgggaggcatatcgccgtagaggctgggccttcaagaacccagatactattgagcagtgccggcgagagggcttcagccagaagatgcaggagcagaagaatgaaggctgccaggtgtatggcttcttggaagtcaataaggtggccggaaacttccactttgcccctgggaagagcttccagcagtcccatgtgcacgtccatgacttgcagagctttggccttgacaacatcaacatgacccactacatccagcacctgtcatttggggaggactatccaggcattgtgaaccccctggaccacaccaatgtcactgcgccccaagcctccatgatgttccagtactttgtgaaggtggtgcccactgtgtacatgaaggtggacggagaggctcccctcccaccccaggtactgaggacaaatcagttctctgtgaccagacatgagaaggttgccaatgggctgttgggcgaccaaggccttcccggagtcttcgtcctctatgagctctcgcccatgatggtgaagctgacggagaagcacaggtccttcacccacttcctgacaggtgtgtgcgccatcattgggggcatgttcacagtggctggactcatcgattcgctcatctaccactcagcacgagccatccagaagaaaattgatctagggaagacaacgtagtcaccctcggtgcttcctctgtctcctctttctccctggcctgtggttgtcccccagcctctgccaccctccacctcctcggtcagccccagccccaggttgataaatctattgattgattgtgatagta

SEQ ID NO: 331189 - DNA, 1323 bp, Homo sapiens
cggaacacaacaaaatcatatcaacgcgtggaaaggaaaataaccaccaatctagaattctagaacaaaggtgaaatagacatttccagacacacaaaaaccaaggaaatgcatcaccaacagacccacattaaaggaaatactatagcattctttaggcagaacgaaatgatcccagatagaaacttagagatgcagaaagaattcgatgcctaccccaagactttggaggacttccgggtcaagacctgcgggggcgccaccgtgaccattgtcagtggccttctcatgctgctactgttcctgtccgagctgcagtattacctcaccacggaggtgcatcctgagctctacgtggacaagtcgcggggagataaactgaagatcaacatcgatgtactttttccgcacatgccttgtgcctatctgagtattgatgccatggatgtggccggagaacagcagctggatgtggaacacaacctgttcaagcaacgactagataaagatggcatccccgtgagctcagaggctgagcggcatgagcttgggaaagtcgaggtgacggtgtttgaccctgactccctggaccctgatcgctgtgagagctgctatggtgctgaggcagaagatatcaagtgctgtaacacctgtgaagatgtgcgggaggcatatcgccgtagaggctgggccttcaagaacccagatactattgagcagtgccggcgagagggcttcagccagaagatgcaggagcagaagaatgaaggctgccaggtgtatggcttcttggaagtcaataaggtggccggaaacttccactttgcccctgggaagagcttccagcagtcccatgtgcacgtccatgacttgcagagctttggccttgacaacatcaacatgacccactacatccagcacctgtcatttggggaggactatccaggcattgtgaaccccctggaccacaccaatgtcactgcgccccaagcctccatgatgttccagtactttgtgaaggtggtgcccactgtgtacatgaaggtggacggagaggtactgaggacaaatcagttctctgtgaccagacatgagaaggttgccaatgggctgttgggcgaccaaggccttcccggagtcttcgttcagcacgagccatccagaagaaaattgatctagggaagacaacgtagtcaccctcggtgcttcctctgtctcctctttctccctggcctgtggttgtcccccagcctctgccaccctccacctcctcggtcagccccagccccaggttgataaatctattgattgattgtgatagta

SEQ ID NO: 331190 - DNA, 1370 bp, Homo sapiens
cggaacacaacaaaatcatatcaacgcgtggaaaggaaaataaccaccaatctagaattctagaacaaaggtgaaatagacatttccagacacacaaaaaccaaggaaatgcatcaccaacagacccacattaaaggaaatactatagcattctttaggcagaacgaaatgatcccagatagaaacttagagatgcagaaagaattcgatgcctaccccaagactttggaggacttccgggtcaagacctgcgggggcgccaccgtgaccattgtcagtggccttctcatgctgctactgttcctgtccgagctgcagtattacctcaccacggaggtgcatcctgagctctacgtggacaagtcgcggggagataaactgaagatcaacatcgatgtactttttccgcacatgccttgtgcctatctgagtattgatgccatggatgtggccggagaacagcagctggatgtggaacacaacctgttcaagcaacgactagataaagatggcatccccgtgagctcagaggctgagcggcatgagcttgggaaagtcgaggtgacggtgtttgaccctgactccctggaccctgatcgctgtgagagctgctatggtgctgaggcagaagatatcaagtgctgtaacacctgtgaagatgtgcgggaggcatatcgccgtagaggctgggccttcaagaacccagatactattgagcagtgccggcgagagggcttcagccagaagatgcaggagcagaagaatgaaggctgccaggtgtatggcttcttggaagtcaataaggtggccggaaacttccactttgcccctgggaagagcttccagcagtcccatgtgcacgtccatgacttgcagagctttggccttgacaacatcaacatgacccactacatccagcacctgtcatttggggaggactatccaggcattgtgaaccccctggaccacaccaatgtcactgcgccccaagcctccatgatgttccagtactttgtgaaggtggtgcccactgtgtacatgaaggtggacggagagcctctatgagctctcgcccatgatggtgaagctgacggagaagcacaggtccttcacccacttcctgacaggtgtgtgcgccatcattgggggcatgttcacagtggctggactcatcgattcgctcatctaccactcagcacgagccatccagaagaaaattgatctagggaagacaacgtagtcaccctcggtgcttcctctgtctcctctttctccctggcctgtggttgtcccccagcctctgccaccctccacctcctcggtcagccccagccccaggttgataaatctattgattgattgtgatagta

SEQ ID NO: 331191 - DNA, 1662 bp, Homo sapiens
cggacgagggagtctgtaggggcgggccggctggcgtcccctttccggccggtccccatggaggcgctggggaagctgaagcagttcgatgcctaccccaagactttggaggacttccgggtcaagacctgcgggggcgccaccgtgaccattgtcagtggccttctcatgctgctactgttcctgtccgagctgcagtattacctcaccacggaggtgcatcctgagctctacgtggacaagtcgcggggagataaactgaagatcaacatcgatgtactttttccgcacatgccttgtgcctatctgagtattgatgccatggatgtggccggagaacagcagctggatgtggaacacaacctgttcaagcaacgactagataaagatggcatccccgtgagctcagaggctgagcggcatgagcttgggaaagtcgaggtgacggtgtttgaccctgactccctggaccctgatcgctgtgagagctgctatggtgctgaggcagaagatatcaagtgctgtaacacctgtgaagatgtgcgggaggcatatcgccgtagaggctgggccttcaagaacccagatactattgagcagtgccggcgagagggcttcagccagaagatgcaggagcagaagaatgaaggctgccaggtgtatggcttcttggaagtcaataaggtggccggaaacttccactttgcccctgggaagagcttccagcagtcccatgtgcacgtgagtgatctgcactagctggggagatttagatgctggccaccttcttggtgagcttgagtggtcctcttctgcctgctgctcatttgtcttgggcaaccatttggccagagcaggccttcatctcagggcagcagtttggcacagtggctaagagcacaggccgaggagccagactgcctgcattcagataccagtttcagaccttactggctgtgtgactttgagaaggtttcttaatctttttgactcctgttttctactttataaaatgttgatgagggcacttatctcacagggtgtgtgtgcaggttaaagatgatagcacggagcctggcttgtggtaggtacttgttgaaatggtagccccccgtgtccgatgatgacctgtgcatgaggctttgggagaagcagagctaggttggagcacaggttctgccacacctgggctatgtcatatttgggccctatttagttgcttcttctgtaaaatggggatgatgataatagtacccactcacagggctgttggggtgaacaaatgagatttattctcattcatttgttcattcatgcattcacaaaatatttagtaatcacctactagtctagttgctaagggtacagtagtgaacaatctgtgccctcagaacattctagtaaagaaatagacaataagtatataaaatataaatagtccccaattaacaatggttcagcttgcaatttttaacttcatgatgggtattacatgcatttttcacttaacgatattttctttttcttttttgagacagagtctcactctgtcgcccaggctggagtgcagtggcatgatcttgactcactgcaacctccacctcctggattcaagtgattctcctacctcagcctcttgagtagctgggtgtacaggtgcgt

SEQ ID NO: 331192 - DNA, 2420 bp, Homo sapiens
cggaacacaacaaaatcatatcaacgcgtggaaaggaaaataaccaccaatctagaattctagaacaaaggtgaaatagacatttccagacacacaaaaaccaaggaaatgcatcaccaacagacccacattaaaggaaatactatagcattctttaggcagaacgaaatgatcccagatagaaacttagagatgcagaaagaattcgatgcctaccccaagactttggaggacttccgggtcaagacctgcgggggcgccaccgtgaccattgtcagtggccttctcatgctgctactgttcctgtccgagctgcagtattacctcaccacggaggtgcatcctgagctctacgtggacaagtcgcggggagataaactgaagatcaacatcgatgtactttttccgcacatgccttgtgcctatctgagtattgatgccatggatgtggccggagaacagcagctggatgtggaacacaacctgttcaagcaacgactagataaagatggcatccccgtgagctcagaggctgagcggcatgagcttgggaaagtcgaggtgacggtgtttgaccctgactccctggaccctgatcgctgtgagagctgctatggtgctgaggcagaagatatcaagtgctgtaacacctgtgaagatgtgcgggaggcatatcgccgtagaggctgggccttcaagaacccagatactattgagcagtgccggcgagagggcttcagccagaagatgcaggagcagaagaatgaaggctgccaggtgtatggcttcttggaagtcaataaggtggccggaaacttccactttgcccctgggaagagcttccagcagtcccatgtgcacgtccatgacttgcagagctttggccttgacaacatcaacatgacccactacatccagcacctgtcatttggggaggactatccaggcattgtgaaccccctggaccacaccaatgtcactgcgccccaagcctccatgatgttccagtactttgtgaaggtggtgcccactgtgtacatgaaggtggacggagagtgagtcagggagctccctaccagagtctcctgcgcggtgccaagcactggagttcctgcattttgttccgtcagcctggggagtgaaagctgcctcgtcctcacatggcgaataaaagactgaggcacagagagggtgggggatttgccctcccaggcagagtgcaggcctggggctgttagatttaaagcgcctgctctttctgctgccctcaccgcttctatccgttcctccggtgcccaccgtctgcctgcctcactgttctctgtggtctgcctgggctgggggttaggcaaggcaagtctctgtgtacccgctcccaaggctgccctggcctgtggagcagcatctcagcagagtggcaggatgcgaggggctgagggcagaggaagtcaggtcagccttggtgcgtctttggagagctgcttctcagcctggacccccgtgagaacacccaccaaatgctgccaggataggtactgaggacaaatcagttctctgtgaccagacatgagaaggttgccaatgggctgttgggcgaccaaggccttcccggagtcttcgtctctgtctcctctttctccctggcctgtggttgtcccccagcctctgccaccctccacctcctcggtcagccccagccccaggttgataaatctattgattgattgtgatagtaaaaaaaaaaaaaaaaaaaaaagaaaacaaaaaaagagagagagggcggcggcagcggtcctatgatatatctctcttccgtccagaggaggcgcgcgctactcggttcagtccccgccgacctccttattattgtataaaaacgggaggcacgcactcactaataggaggaggtgcttattatttataataagcagagcgaggacgggcggcgcagcgtatatattcacaccacacgcaccgcgaggtccgacgggacagaccaacaccggcccgcttactagcaagaggagctctaaatcttgtaacagacagggacgagcacacacctatcaactacctctttcgggctgcggggcgtgaaggacagaaatatgagtggagaggacacaaacaatccttctcctactgagccatagatctatattaagaccctgcgtagaggggagagtcgctatacatgacatacacctcctcagtcgagcgagagcgtaaagctgacgactgtgagacaacaacaccaccaaacaccaaacataatattctaacgcgcccacaggacgaaaaacagaatcatagccgacgcaacgctggacgtcagcatctaatagccctgaagacacaccaattactatttctacatcacgcagaggcgatcttgatatccaaaataataattaataaga

SEQ ID NO: 331193 - DNA, 1783 bp, Homo sapiens
  misc_feature (1726)..(1726): n is a, c, g, or t
cggaacacaacaaaatcatatcaacgcgtggaaaggaaaataaccaccaatctagaattctagaacaaaggtgaaatagacatttccagacacacaaaaaccaaggaaatgcatcaccaacagacccacattaaaggaaatactatagcattctttaggcagaacgaaatgatcccagatagaaacttagagatgcagaaagaattcgatgcctaccccaagactttggaggacttccgggtcaagacctgcgggggcgccaccgtgaccattgtcagtggccttctcatgctgctactgttcctgtccgagctgcagtattacctcaccacggaggtgcatcctgagctctacgtggacaagtcgcggggagataaactgaagatcaacatcgatgtactttttccgcacatgccttgtgcctatctgagtattgatgccatggatgtggccggagaacagcagctggatgtggaacacaacctgttcaagcaacgactagataaagatggcatccccgtgagctcagaggctgagcggcatgagcttgggaaagtcgaggtgacggtgtttgaccctgactccctggaccctgatcgctgtgagagctgctatggtgctgaggcagaagatatcaagtgctgtaacacctgtgaagatgtgcgggaggcatatcgccgtagaggctgggccttcaagaacccagatactattgagcagtgccggcgagagggcttcagccagaagatgcaggagcagaagaatgaaggctgccaggtgtatggcttcttggaagtcaataaggtggccggaaacttccactttgcccctgggaagagcttccagcagtcccatgtgcacgtccatgacttgcagagctttggccttgacaacatcaacatgacccactacatccagcacctgtcatttggggaggactatccaggcattgtgaaccccctggaccacaccaatgtcactgcgccccaagcctccatgatgttccagtactttgtgaaggtggtgcccactgtgtacatgaaggtggacggagagtgagtcagggagctccctaccagagtctcctgcgcggtgccaagcactggagttcctgcattttgttccgtcagcctggggagtgaaagctgcctcgtcctcacatggcgaataaaagactgaggcacagagagggtgggggatttgccctcccaggcagagtgcaggcctggggctgttagatttaaagcgcctgctctttctgctgccctcaccgcttctatccgttcctccggtgcccaccgtctgcctgcctcactgttctctgtggtctgcctgggctgggggttaggcaaggcaagtctctgtgtacccgctcccaaggctgccctggcctgtggagcagcatctcagcagagtggcaggatgcgaggggctgagggcagaggaagtcaggtcagccttggtgcgtctttggagagctgcttctcagcctggacccccgtgagaacacccaccaaatgctgccaggataggtactgaggacaaatcagttctctgtgaccagacatgagaaggttgccaatgggctgttgggcgaccaaggccttcccggagtcttcgtcctctatgagctctcgcccatgatggtgaagctgacggagaagcacagcctttcacccaatttcctgacaagtgttttgcgccatcaattgggggcatgttcaanagtggcttggattcatcggtttggttcatttaccatttagcaagggccatccaggag

SEQ ID NO: 331194 - DNA, 2255 bp, Homo sapiens
cggacgagggagtctgtaggggcgggccggctggcgtcccctttccggccggtccccatggaggcgctggggaagctgaagcagttcgatgcctaccccaagactttggaggacttccgggtcaagacctgcgggggcgccaccgtgaccattgtcagtggccttctcatgctgctactgttcctgtccgagctgcagtattacctcaccacggaggtgcatcctgagctctacgtggacaagtcgcggggagataaactgaagatcaacatcgatgtactttttccgcacatgccttgtgcctatctgagtattgatgccatggatgtggccggagaacagcagctggatgtggaacacaacctgttcaagcaacgactagataaagatggcatccccgtgagctcagaggctgagcggcatgagcttgggaaagtcgaggtgacggtgtttgaccctgactccctggaccctgatcgctgtgagagctgctatggtgctgaggcagaagatatcaagtgctgtaacacctgtgaagatgtgcgggaggcatatcgccgtagaggctgggccttcaagaacccagatactattgagcagtgccggcgagagggcttcagccagaagatgcaggagcagaagaatgaaggctgccaggtgtatggcttcttggaagtcaataaggtggccggaaacttccactttgcccctgggaagagcttccagcagtcccatgtgcacgtgagtgatctgcactagctggggagatttagatgctggccaccttcttggtgagcttgagtggtcctcttctgcctgctgctcatttgtcttgggcaaccatttggccagagcaggccttcatctcagggcagcagtttggcacagtggctaagagcacaggccgaggagccagactgcctgcattcagataccagtttcagaccttactggctgtgtgactttgagaaggtttcttaatctttttgactcctgttttctactttataaaatgttgatgagggcacttatctcacagggtgtgtgtgcaggttaaagatgatagcacggagcctggcttgtgtccatgacttgcagagctttggccttgacaacatcaacatgacccactacatccagcacctgtcatttggggaggactatccaggcattgtgaaccccctggaccacaccaatgtcactgcgccccaagcctccatgatgttccagtactttgtgaaggtggtgcccactgtcctctatgagctctcgcccatgatggtgaagctgacggagaagcacaggtccttcacccacttcctgacaggtgtgtgcgccatcattgggggcatgttcacagtggctggactcatcgattcgctcatctaccactcagcacgagccatccagaagaaaattgatctagggaagacaacgtagtcaccctcggtgcttcctctgtctcctctttctccctggcctgtggttgtcccccagcctctgccaccctccacctcctcggtcagccccagccccaggttgataaatctattgattgattgtgatagtaaaaaaaaaaaaaaaaaaaaaagaaaacaaaaaaagagagagagggcggcggcagcggtcctatgatatatctctcttccgtccagaggaggcgcgcgctactcggttcagtccccgccgacctccttattattgtataaaaacgggaggcacgcactcactaataggaggaggtgcttattatttataataagcagagcgaggacgggcggcgcagcgtatatattcacaccacacgcaccgcgaggtccgacgggacagaccaacaccggcccgcttactagcaagaggagctctaaatcttgtaacagacagggacgagcacacacctatcaactacctctttcgggctgcggggcgtgaaggacagaaatatgagtggagaggacacaaacaatccttctcctactgagccatagatctatattaagaccctgcgtagaggggagagtcgctatacatgacatacacctcctcagtcgagcgagagcgtaaagctgacgactgtgagacaacaacaccaccaaacaccaaacataatattctaacgcgcccacaggacgaaaaacagaatcatagccgacgcaacgctggacgtcagcatctaatagccctgaagacacaccaattactatttctacatcacgcagaggcgatcttgatatccaaaataataattaataaga

SEQ ID NO: 331195 - DNA, 1391 bp, Homo sapiens
cggacgagggagtctgtaggggcgggccggctggcgtcccctttccggccggtccccatggaggcgctggggaagctgaagcagttcgatgcctaccccaagactttggaggacttccgggtcaagacctgcgggggcgccaccgtgaccattgtcagtggccttctcatgctgctactgttcctgtccgagctgcagtattacctcaccacggaggtgcatcctgagctctacgtggacaagtcgcggggagataaactgaagatcaacatcgatgtactttttccgcacatgccttgtgcctatctgagtattgatgccatggatgtggccggagaacagcagctggatgtggaacacaacctgttcaagcaacgactagataaagatggcatccccgtgagctcagaggctgagcggcatgagcttgggaaagtcgaggtgacggtgtttgaccctgactccctggaccctgatcgctgtgagagctgctatggtgctgaggcagaagatatcaagtgctgtaacacctgtgaagatgtgcgggaggcatatcgccgtagaggctgggccttcaagaacccagatactattgagcagtgccggcgagagggcttcagccagaagatgcaggagcagaagaatgaaggctgccaggtgtatggcttcttggaagtcaataaggtggccggaaacttccactttgcccctgggaagagcttccagcagtcccatgtgcacgtgagtgatctgcactagctggggagatttagatgctggccaccttcttggtgagcttgagtggtcctcttctgcctgctgctcatttgtcttgggcaaccatttggccagagcaggccttcatctcagggcagcagtttggcacagtggctaagagcacaggccgaggagccagactgcctgcattcagataccagtttcagaccttactggctgtgtgactttgagaaggtttcttaatctttttgactcctgttttctactttataaaatgttgatgagggcacttatctcacagggtgtgtgtgcaggttaaagatgatagcacggagcctggcttgtgtccatgacttgcagagctttggccttgacaacatcaacatgacccactacatccagcacctgtcatttggggaggactatccaggcattgtgaaccccctggaccacaccaatgtcactgcgccccaagtcagcacgagccatccagaagaaaattgatctagggaagacaacgtagtcaccctcggtgcttcctctgtctcctctttctccctggcctgtggttgtcccccagcctctgccaccctccacctcctcggtcagccccagccccaggttgataaatctattgattgattgtgatagta

SEQ ID NO: 331196 - DNA, 1066 bp, Homo sapiens
cggaacacaacaaaatcatatcaacgcgtggaaaggaaaataaccaccaatctagaattctagaacaaaggtgaaatagacatttccagacacacaaaaaccaaggaaatgcatcaccaacagacccacattaaaggaaatactatagcattctttaggcagaacgaaatgatcccagatagaaacttagagatgcagaaagaattcgatgcctaccccaagactttggaggacttccgggtcaagacctgcgggggcgccaccgtgaccattgtcagtggccttctcatgctgctactgttcctgtccgagctgcagtattacctcaccacggaggtgcatcctgagctctacgtggacaagtcgcggggagataaactgaagatcaacatcgatgtactttttccgcacatgccttgtgcctatctgagtattgatgccatggatgtggccggagaacagcagctggatgtggaacacaacctgttcaagcaacgactagataaagatggcatccccgtgagctcagaggctgagcggcatgagcttgggaaagtcgaggtgacggtgtttgaccctgactccctggaccctgatcgctgtgagagctgctatggtgctgaggcagaagatatcaagtgctgtaacacctgtgaagatgtgcgggaggcatatcgccgtagaggctgggccttcaagaacccagatactattgagcagtgccggcgagagggcttcagccagaagatgcaggagcagaagaatgaaggctgccaggtgtatggcttcttggaagtcaataaggtggccggaaacttccactttgcccctgggaagagcttccagcagtcccatgtgcacgtccatgacttgcagagctttggccttgacaacatcaacatgacccactacatccagcacctgtcatttggggaggactatccaggcattgtgaaccccctggaccacaccaatgtcactgcgccccaagaaaaagcctccatgatgttaacagtactcaagtgtatgtcgcgctcaacagtgtaaaagttctttcctgtgataa

SEQ ID NO: 331197 - DNA, 1041 bp, Homo sapiens
cggaacacaacaaaatcatatcaacgcgtggaaaggaaaataaccaccaatctagaattctagaacaaaggtgaaatagacatttccagacacacaaaaaccaaggaaatgcatcaccaacagacccacattaaaggaaatactatagcattctttaggcagaacgaaatgatcccagatagaaacttagagatgcagaaagaattcgatgcctaccccaagactttggaggacttccgggtcaagacctgcgggggcgccaccgtgaccattgtcagtggccttctcatgctgctactgttcctgtccgagctgcagtattacctcaccacggaggtgcatcctgagctctacgtggacaagtcgcggggagataaactgaagatcaacatcgatgtactttttccgcacatgccttgtgcctatctgagtattgatgccatggatgtggccggagaacagcagctggatgtggaacacaacctgttcaagcaacgactagataaagatggcatccccgtgagctcagaggctgagcggcatgagcttgggaaagtcgaggtgacggtgtttgaccctgactccctggaccctgatcgctgtgagagctgctatggtgctgaggcagaagatatcaagtgctgtaacacctgtgaagatgtgcgggaggcatatcgccgtagaggctgggccttcaagaacccagatactattgagcagtgccggcgagagggcttcagccagaagatgcaggagcagaagaatgaaggctgccaggtgtatggcttcttggaagtcaataaggtggccgggaacgaccacagagcaccctgggaagaggttccaacagtacaatgcgacacgtccatgactggtcaaagagaactgatttgtcctcagtacctgtccgtccacgttgatgtacacagtgggctaccaccttcacgaagtactggaacatcctggatgacttggggctccaagtaacatttggtgctaggtctcagggagttcacaatgacctggatatgtcctcccaca

SEQ ID NO: 331198 - DNA, 272 bp, Homo sapiens
gaactactggggctggggtgaccgaggaggtggagggtgcagaggctgggggcatgtcacagtggctggactcatcgattcgctcatctaccactcagcacgagccatccagaagaaaattgatctagggaagacaacgtagtcaccctcggtgcttcctctgtctcctctttctccctggcctgtggttgtcccccagcctctgccaccctccacctcctcggtcagccccagccccaggttgataaatctattgattgattgtgatagta

SEQ ID NO: 331199 - DNA, 1290 bp, Homo sapiens
ccactagcctcatgatgttccagtactttgtgaaggtggtgcccactgtgtacatgaaggtggacggagaggtactgaggacaaatcagttctctgtgaccattgtcagtggccttctcatgctgctactgttcctgtccgagctgcagtattacctcaccacggaggtgcatcctgagctctacgtggacaagtcgcggggagataaactgaagatcaacatcgatgtactttttccgcacatgccttgtgcctatctgagtattgatgccatggatgtggccggagaacagcagctggatgtggaacacaacctgttcaagcaacgactagataaagatggcatccccgtgagctcagaggctgagcggcatgagcttgggaaagtcgaggtgacggtgtttgaccctgactccctggaccctgatcgctgtgagagctgctatggtgctgaggcagaagatatcaagtgctgtaacacctgtgaagatgtgcgggaggcatatcgccgtagaggctgggccttcaagaacccagatactattgagcagtgccggcgagagggcttcagccagaagatgcaggagcagaagaatgaaggctgccaggtgtatggcttcttggaagtcaataaggtggccggaaacttccactttgcccctgggaagagcttccagcagtcccatgtgcacgtccatgacttgcagagctttggccttgacaacatcaacatgacccactacatccagcacctgtcatttggggaggactatccaggcattgtgaaccccctggaccacaccaatgtcactgcgccccaagcctccatgatgttccagtactttgtgaaggtggtgcccactgtgtacatgaaggtggacggagaggtactgaggacaaatcagttctctgtgaccagacatgagaaggttgccaatgggctgttgggcgaccaaggccttcccggagtcttcgtcctctatgagctctcgcccatgatggtgaagctgacggagaagcacaggtccttcacccacttcctgacaggtgtgtgcgccatcattgggggcatgttcacagtggctggactcatcgattcgctcatctaccactcagcacgagccatccagaagaaaattgatctagggaagacaacgtagtcaccctcggtgcttcctctgtctcctctttctccctggcctgtggttgtcccccagcctctgccaccctccacctcctcggtcagccccagccccaggttgataaatctattgattgattgtgatagta

SEQ ID NO: 331200 - DNA, 1178 bp, Homo sapiens
  misc_feature (32)..(32): n is a, c, g, or t
gacggggatcgtggtgctgctactgtctgtcnggctgagtattactcccacggaggtgcatcctgagctctacgtggacaagtcgcggggagataaactgaagatcaacatcgatgtactttttccgcacatgccttgtgcctatctgagtattgatgccatggatgtggccggagaacagcagctggatgtggaacacaacctgttcaagcaacgactagataaagatggcatccccgtgagctcagaggctgagcggcatgagcttgggaaagtcgaggtgacggtgtttgaccctgactccctggaccctgatcgctgtgagagctgctatggtgctgaggcagaagatatcaagtgctgtaacacctgtgaagatgtgcgggaggcatatcgccgtagaggctgggccttcaagaacccagatactattgagcagtgccggcgagagggcttcagccagaagatgcaggagcagaagaatgaaggctgccaggtgtatggcttcttggaagtcaataaggtggccggaaacttccactttgcccctgggaagagcttccagcagtcccatgtgcacgtccatgacttgcagagctttggccttgacaacatcaacatgacccactacatccagcacctgtcatttggggaggactatccaggcattgtgaaccccctggaccacaccaatgtcactgcgccccaagcctccatgatgttccagtactttgtgaaggtggtgcccactgtgtacatgaaggtggacggagaggtactgaggacaaatcagttctctgtgaccagacatgagaaggttgccaatgggctgttgggcgaccaaggccttcccggagtcttcgtcctctatgagctctcgcccatgatggtgaagctgacggagaagcacaggtccttcacccacttcctgacaggtgtgtgcgccatcattgggggcatgttcacagtggctggactcatcgattcgctcatctaccactcagcacgagccatccagaagaaaattgatctagggaagacaacgtagtcaccctcggtgcttcctctgtctcctctttctccctggcctgtggttgtcccccagcctctgccaccctccacctcctcggtcagccccagccccaggttgataaatctattgattgattgtgatagta

SEQ ID NO: 331201 - DNA, 1495 bp, Homo sapiens
cggaacacaacaaaatcatatcaacgcgtggaaaggaaaataaccaccaatctagaattctagaacaaaggtgaaatagacatttccagacacacaaaaaccaaggaaatgcatcaccaacagacccacattaaaggaaatactatagcattctttaggcagaacgaaatgatcccagatagaaacttagagatgcagaaagaattcgatgcctaccccaagactttggaggacttccgggtcaagacctgcgggggcgccaccgtgaccattgtcagtggccttctcatgctgctactgttcctgtccgagctgcagtattacctcaccacggaggtgcatcctgagctctacgtggacaagtcgcggggagataaactgaagatcaacatcgatgtactttttccgcacatgccttgtgcctggtcccagtaccttagcctgattttcctgcttccagatctgagtattgatgccatggatgtggccggagaacagcagctggatgtggaacacaacctgttcaagcaacgactagataaagatggcatccccgtgagctcagaggctgagcggcatgagcttgggaaagtcgaggtgacggtgtttgaccctgactccctggaccctgatcgctgtgagagctgctatggtgctgaggcagaagatatcaagtgctgtaacacctgtgaagatgtgcgggaggcatatcgccgtagaggctgggccttcaagaacccagatactattgagcagtgccggcgagagggcttcagccagaagatgcaggagcagaagaatgaaggctgccaggtgtatggcttcttggaagtcaataaggtggccggaaacttccactttgcccctgggaagagcttccagcagtcccatgtgcacgtccatgacttgcagagctttggccttgacaacatcaacatgacccactacatccagcacctgtcatttggggaggactatccaggcattgtgaaccccctggaccacaccaatgtcactgcgccccaagcctccatgatgttccagtactttgtgaaggtggtgcccactgtgtacatgaaggtggacggagaggtactgaggacaaatcagttctctgtgaccagacatgagaaggttgccaatgggctgttgggcgaccaaggccttcccggagtcttcgtcctctatgagctctcgcccatgatggtgaagctgacggagaagcacaggtccttcacccacttcctgacaggtgtgtgcgccatcattgggggcatgttcacagtggctggactcatcgattcgctcatctaccactcagcacgagccatccagaagaaaattgatctagggaagacaacgtagtcaccctcggtgcttcctctgtctcctctttctccctggcctgtggttgtcccccagcctctgccaccctccacctcctcggtcagccccagccccaggttgataaatctattgattgattgtgatagta

SEQ ID NO: 331202 - DNA, 2250 bp, Homo sapiens
cggaacacaacaaaatcatatcaacgcgtggaaaggaaaataaccaccaatctagaattctagaacaaaggtgaaatagacatttccagacacacaaaaaccaaggaaatgcatcaccaacagacccacattaaaggaaatactatagcattctttaggcagaacgaaatgatcccagatagaaacttagagatgcagaaagaattcgatgcctaccccaagactttggaggacttccgggtcaagacctgcgggggcgccaccgtgaccattgtcagtggccttctcatgctgctactgttcctgtccgagctgcagtattacctcaccacggaggtgcatcctgagctctacgtggacaagtcgcggggagataaactgaagatcaacatcgatgtactttttccgcacatgccttgtgcctatctgagtattgatgccatggatgtggccggagaacagcagctggatgtggaacacaacctgttcaagcaacgactagataaagatggcatccccgtgagctcagaggctgagcggcatgagcttgggaaagtcgaggtgacggtgtttgaccctgactccctggaccctgatcgctgtgagagctgctatggtgctgaggcagaagatatcaagtgctgtaacacctgtgaagatgtgcgggaggcatatcgccgtagaggctgggccttcaagaacccagatactattgagcagtgccggcgagagggcttcagccagaagatgcaggagcagaagaatgaaggctgccaggtgtatggcttcttggaagtcaataaggtggccggaaacttccactttgcccctgggaagagcttccagcagtcccatgtgcacgtccatgacttgcagagctttggccttgacaacatcaacatgacccactacatccagcacctgtcatttggggaggactatccaggcattgtgaaccccctggaccacaccaatgtcactgcgccccaagcctccatgatgttccagtactttgtgaaggtggtgcccactgtgtacatgaaggtggacggagaggtactgaggacaaatcagttctctgtgaccagacatgagaaggttgccaatgggctgttgggcgaccaaggccttcccggagtcttcgtcctctatgagctctcgcccatgatggtgaagctgacggagaagcacaggtccttcacccacttcctgacaggtgtgtgcgccatcattgggggcatgttcacagtggctggactcatcgattcgctcatctaccactcagcacgagccatccagaagaaaattgatctagggaagacaacgtagtcaccctcggtgcttcctctgtctcctctttctccctggcctgtggttgtcccccagcctctgccaccctccacctcctcggtcagccccagccccaggttgataaatctattgattgattgtgatagtacagagattcgtcaaacacacaacacaaaacaaaaggcgacgacaacagtaaatcaaccctcaacccgcatccacgaggcgcccaaaaaggcataagagcgatacaccacggcaacacctcgcaccacacagacgagacacactacacaccagccgacgccaaacaaaataagcacaaagcgcacaggaaaccgtacaaaacaacacacggcaccaaagcacggcggcacaaaaccggacacaacacgacggcgagactccaggacccacacggaccccctacacaccaccgaacgacagcagacaacaaacagggacccaccgacaaacaccagacgaaacctccacaagcaacaccgagcacaccccaacaaacacccaaaaggcgacaccccgaaagcaaacgcacccgcacccaactccccccgcacgcaccacagagccatagagggatacagggggatggacatcacgcacccaatcaatccccagacacggagagggacaaacgcagcgcgccgccgctcccacgagcgacacgacccgacgaatccggggcagagaggggacagcaggggaggggcgagcatgcaggatcagaggaggggtggtcagctgcacctggcgagacgcaacgagagaacgacggaaggaccgcaggaggaagggagagacggactgcgacgacggcggagaggtggtacgcgacagaggcgatgcaaggagccaggccggaggcaatctacagtgcgaccaggagaagcgaaaaagcagagagacgggagggcgagg

SEQ ID NO: 331203 - DNA, 1950 bp, Homo sapiens
cggacgagggagtctgtaggggcgggccggctggcgtcccctttccggccggtccccatggaggcgctggggaagctgaagcagttcgatgcctaccccaagactttggaggacttccgggtcaagacctgcgggggcgccaccgtgaccattgtcagtggccttctcatgctgctactgttcctgtccgagctgcagtattacctcaccacggaggtgcatcctgagctctacgtggacaagtcgcggggagataaactgaagatcaacatcgatgtactttttccgcacatgccttgtgcctatctgagtattgatgccatggatgtggccggagaacagcagctggatgtggaacacaacctgttcaagcaacgactagataaagatggcatccccgtgagctcagaggctgagcggcatgagcttgggaaagtcgaggtgacggtgtttgaccctgactccctggaccctgatcgctgtgagagctgctatggtgctgaggcagaagatatcaagtgctgtaacacctgtgaagatgtgcgggaggcatatcgccgtagaggctgggccttcaagaacccagatactattgagcagtgccggcgagagggcttcagccagaagatgcaggagcagaagaatgaaggctgccaggtgtatggcttcttggaagtcaataaggtggccggaaacttccactttgcccctgggaagagcttccagcagtcccatgtgcacgtccatgacttgcagagctttggccttgacaacatcaacatgacccactacatccagcacctgtcatttggggaggactatccaggcattgtgaaccccctggaccacaccaatgtcactgcgccccaagcctccatgatgttccagtactttgtgaaggtggtgcccactgtgtacatgaaggtggacggagagtgagtcagggagctccctaccagagtctcctgcgcggtgccaagcactggagttcctgcattttgttccgtcagcctggggagtgaaagctgcctcgtcctcacatggcgaataaaagactgaggcacagagagggtgggggatttgccctcccaggcagagtgcaggcctggggctgttagatttaaagcgcctgctctttctgctgccctcaccgcttctatccgttcctccggtgcccaccgtctgcctgcctcactgttctctgtggtctgcctgggctgggggttaggcaaggcaagtctctgtgtacccgctcccaaggctgccctggcctgtggagcagcatctcagcagagtggcaggatgcgaggggctgagggcagaggaagtcaggtcagccttggtgcgtctttggagagctgcttctcagcctggacccccgtgagaacacccaccaaatgctgccaggataggtactgaggacaaatcagttctctgtgaccagacatgagaaggttgccaatgggctgttgggcgaccaaggccttcccggagtcttcgtcctctatgagctctcgcccatgatggtgaagctgacggagaagcacaggtccttcacccacttcctgacaggtgtgtgcgccatcattgggggcatgttcacagtggctggactcatcgattcgctcatctaccactcagcacgagccatccagaagaaaattgatctagggaagacaacgtagtcaccctcggtgcttcctctgtctcctctttctccctggcctgtggttgtcccccagcctctgccaccctccacctcctcggtcagccccagccccaggttgataaatctattgattgattgtgatagtaaaaaacaacccacaacaacactacaccttcgcaggccactctatttccgggcgcccgaatacacgagcgtcaccgacacgggccccagtggtcctacctggtccctgaccccgcgttttcttgatcccaagttgg

SEQ ID NO: 331204 - DNA, 869 bp, Homo sapiens
ggcgactctagcggatccctgtattggtggtgcttgcgaagatatcaagtgctgtaacacctgtgaagatgtgcgggaggcatatcgccgtagaggctgggccttcaagaacccagatactattgagcagtgccggcgagagggcttcagccagaagatgcaggagcagaagaatgaaggctgccaggtgtatggcttcttggaagtcaataaggtggccggaaacttccactttgcccctgggaagagcttccagcagtcccatgtgcacgtccatgacttgcagagctttggccttgacaacatcaacatgacccactacatccagcacctgtcatttggggaggactatccaggcattgtgaaccccctggaccacaccaatgtcactgcgccccaagcctccatgatgttccagtactttgtgaaggtggtgcccactgtgtacatgaaggtggacggagaggtactgaggacaaatcagttctctgtgaccagacatgagaaggttgccaatgggctgttgggcgaccaaggccttcccggagtcttcgtcctctatgagctctcgcccatgatggtgaagctgacggagaagcacaggtccttcacccacttcctgacaggtgtgtgcgccatcattgggggcatgttcacagtggctggactcatcgattcgctcatctaccactcagcacgagccatccagaagaaaattgatctagggaagacaacgtagtcaccctcggtgcttcctctgtctcctctttctccctggcctgtggttgtcccccagcctctgccaccctccacctcctcggtcagccccagccccaggttgataaatctattgattgattgtgatagta

SEQ ID NO: 331205 - DNA, 1519 bp, Homo sapiens
cggacgagggagtctgtaggggcgggccggctggcgtcccctttccggccggtccccatggaggcgctggggaagctgaagcagttcgatgcctaccccaagactttggaggacttccgggtcaagacctgcgggggcgccaccgtgaccattgtcagtggccttctcatgctgctactgttcctgtccgagctgcagtattacctcaccacggaggtgcatcctgagctctacgtggacaagtcgcggggagataaactgaagatcaacatcgatgtactttttccgcacatgccttgtgcctatctgagtattgatgccatggatgtggccggagaacagcagctggatgtggaacacaacctgttcaagcaacgactagataaagatggcatccccgtgagctcagaggctgagcggcatgagcttgggaaagtcgaggtgacggtgtttgaccctgactccctggaccctgatcgctgtgagagctgctatggtgctgaggcagaagatatcaagtgctgtaacacctgtgaagatgtgcgggaggcatatcgccgtagaggctgggccttcaagaacccagatactattgagcagtgccggcgagagggcttcagccagaagatgcaggagcagaagaatgaaggctgccaggtgtatggcttcttggaagtcaataaggtggccggaaacttccactttgcccctgggaagagcttccagcagtcccatgtgcacgggtgtgtgtgcaggttaaagatgatagcacggagcctggcttgtgtccatgacttgcagagctttggccttgacaacatcaacatgacccactacatccagcacctgtcatttggggaggactatccaggcattgtgaaccccctggaccacaccaatgtcactgcgccccaagcctccatgatgttccagtactttgtgaaggtggtgcccactgtgtacatgaaggtggacggagaggtactgaggacaaatcagttctctgtgaccagacatgagaaggttgccaatgggctgttgggcgaccaaggccttcccggagtcttcgtcctctatgagctctcgcccatgatggtgaagctgacggagaagcacaggtccttcacccacttcctgacaggtgtgtgcgccatcattgggggcatgttcacagtggctggactcatcgattcgctcatctaccactcagcacgagccatccagaagaaaattgatctagggaagacaacgtagtcaccctcggtgcttcctctgtctcctctttctccctggcctgtggttgtcccccagcctctgccaccctccacctcctcggtcagccccagccccaggttgataaatctattgattgattgtgatagtaaaaaacaacccacaacaacactacaccttcgcaggccactctatttccgggcgcccgaatacacgagcgtcaccgacacgggccccagtggtcctacctggtccctgaccccgcgttttcttgatcccaagttgg

SEQ ID NO: 331206 - DNA, 708 bp, Homo sapiens
ggtcggtaccagtgagtgctcgtcaggtgtatggcttcttggaagtcaataaggtggccggaaacttccactttgcccctgggaagagcttccagcagtcccatgtgcacgtccatgacttgcagagctttggccttgacaacatcaacatgacccactacatccagcacctgtcatttggggaggactatccaggcattgtgaaccccctggaccacaccaatgtcactgcgccccaagcctccatgatgttccagtactttgtgaaggtggtgcccactgtgtacatgaaggtggacggagaggtactgaggacaaatcagttctctgtgaccagacatgagaaggttgccaatgggctgttgggcgaccaaggccttcccggagtcttcgtcctctatgagctctcgcccatgatggtgaagctgacggagaagcacaggtccttcacccacttcctgacaggtgtgtgcgccatcattgggggcatgttcacagtggctggactcatcgattcgctcatctaccactcagcacgagccatccagaagaaaattgatctagggaagacaacgtagtcaccctcggtgcttcctctgtctcctctttctccctggcctgtggttgtcccccagcctctgccaccctccacctcctcggtcagccccagccccaggttgataaatctattgattgattgtgatagta

SEQ ID NO: 331207 - DNA, 1374 bp, Homo sapiens
cggaacacaacaaaatcatatcaacgcgtggaaaggaaaataaccaccaatctagaattctagaacaaaggtgaaatagacatttccagacacacaaaaaccaaggaaatgcatcaccaacagacccacattaaaggaaatactatagcattctttaggcagaacgaaatgatcccagatagaaacttagagatgcagaaagaattcgatgcctaccccaagactttggaggacttccgggtcaagacctgcgggggcgccaccgtgaccattgtcagtggccttctcatgctgctactgttcctgtccgagctgcagtattacctcaccacggaggtgcatcctgagctctacgtggacaagtcgcggggagataaactgaagatcaacatcgatgtactttttccgcacatgccttgtgcctatctgagtattgatgccatggatgtggccggagaacagcagctggatgtggaacacaacctgttcaagcaacgactagataaagatggcatccccgtgagctcagaggctgagcggcatgagcttgggaaagtcgaggtgacggtgtttgaccctgactccctggaccctgatcgctgtgagagctgctatggtgctgaggcagaagatatcaagtgctgtaacacctgtgaagatgtgcgggaggcatatcgccgtagaggctgggccttcaagaacccagatactattgagcagtgccggcgagagggcttcagccagaagatgcaggagcagaagaatgaaggctgccaggtgtatggcttcttggaagtcaataaggtggccggaaacttccactttgcccctgggaagagcttccagcagtcccatgtgcacgtccatgacttgcagagctttggccttgacaacatcaacatgacccactacatccagcacctgtcatttggggaggactatccaggcattgtgaaccccctggaccacaccaatgtcactgcgccccaagcctccatgatgttccagtactttgtgaaggtggtgcccactgtgtacatgaaggtggacggagaggtactgaggacaaatcagttctctgtgaccagacatgagaaggttgccaatgggctgttgggcgaccaaggccttcccggagtcttcgtctccttgtctctctcccagtggctggactcatcgattcgctcatctaccactcagcacgagccatccagaagaaaattgatctagggaagacaacgtagtcaccctcggtgcttcctctgtctcctctttctccctggcctgtggttgtcccccagcctctgccaccctccacctcctcggtcagccccagccccaggttgataaatctattgattgattgtgatagta

SEQ ID NO: 331208 - DNA, 1322 bp, Homo sapiens
cggaacacaacaaaatcatatcaacgcgtggaaaggaaaataaccaccaatctagaattctagaacaaaggtgaaatagacatttccagacacacaaaaaccaaggaaatgcatcaccaacagacccacattaaaggaaatactatagcattctttaggcagaacgaaatgatcccagatagaaacttagagatgcagaaagaattcgatgcctaccccaagactttggaggacttccgggtcaagacctgcgggggcgccaccgtgaccattgtcagtggccttctcatgctgctactgttcctgtccgagctgcagtattacctcaccacggaggtgcatcctgagctctacgtggacaagtcgcggggagataaactgaagatcaacatcgatgtactttttccgcacatgccttgtgcctatctgagtattgatgccatggatgtggccggagaacagcagctggatgtggaacacaacctgttcaagcaacgactagataaagatggcatccccgtgagctcagaggctgagcggcatgagcttgggaaagtcgaggtgacggtgtttgaccctgactccctggaccctgatcgctgtgagagctgctatggtgctgaggcagaagatatcaagtgctgtaacacctgtgaagatgtgcgggaggcatatcgccgtagaggctgggccttcaagaacccagatactattgagcagtgccggcgagagggcttcagccagaagatgcaggagcagaagaatgaaggctgccaggtgtatggcttcttggaagtcaataaggtggccggaaacttccactttgcccctgggaagagcttccagcagtcccatgtgcacgtccatgacttgcagagctttggccttgacaacatcaacatgacccactacatccagcacctgtcatttggggaggactatccaggcattgtgaaccccctggaccacaccaatgtcactgcgccccaagcctccatgatgttccagtactttgtgaaggtggtgcccactgtgtacatgaaggtggacggagaggtccttcacccacttcctgacaggtgtgtgcgccatcattgggggcatgttcacagtggctggactcatcgattcgctcatctaccactcagcacgagccatccagaagaaaattgatctagggaagacaacgtagtcaccctcggtgcttcctctgtctcctctttctccctggcctgtggttgtcccccagcctctgccaccctccacctcctcggtcagccccagccccaggttgataaatctattgattgattgtgatagta

SEQ ID NO: 331209 - DNA, 1101 bp, Homo sapiens
  misc_feature (1074)..(1074): n is a, c, g, or t
cggaacacaacaaaatcatatcaacgcgtggaaaggaaaataaccaccaatctagaattctagaacaaaggtgaaatagacatttccagacacacaaaaaccaaggaaatgcatcaccaacagacccacattaaaggaaatactatagcattctttaggcagaacgaaatgatcccagatagaaacttagagatgcagaaagaattcgatgcctaccccaagactttggaggacttccgggtcaagacctgcgggggcgccaccgtgaccattgtcagtggccttctcatgctgctactgttcctgtccgagctgcagtattacctcaccacggaggtgcatcctgagctctacgtggacaagtcgcggggagataaactgaagatcaacatcgatgtactttttccgcacatgccttgtgcctatctgagtattgatgccatggatgtggccggagaacagcagctggatgtggaacacaacctgttcaagcaacgactagataaagatggcatccccgtgagctcagaggctgagcggcatgagcttgggaaagtcgaggtgacggtgtttgaccctgactccctggaccctgatcgctgtgagagctgctatggtgctgaggcagaagatatcaagtgctgtaacacctgtgaagatgtgcgggaggcatatcgccgtagaggctgggccttcaagaacccagatactattgagcagtgccggcgagagggcttcagccagaagatgcaggagcagaagaatgaaggctgccaggtgtatggcttcttggaagtcaataaggtggccggaaacttccactttgcccctgggaagagcttccagcagtcccatgtgcacgtccatgacttgcagagctttggccttgacaacatcaacatgacccactacatccagcacctgtcatttggggaggactatccaggcattgtgaaccccctggaccacaccaatgtcactgcgccccaagcctccatgatgttccagtactttgtgaaggtggtgcccactgtgtacatgaaggtggacggagagactgaggacaaatcagtnctcatgtctggtcacagaggtcgacgc

SEQ ID NO: 331210 - DNA, 1348 bp, Homo sapiens
cggaacacaacaaaatcatatcaacgcgtggaaaggaaaataaccaccaatctagaattctagaacaaaggtgaaatagacatttccagacacacaaaaaccaaggaaatgcatcaccaacagacccacattaaaggaaatactatagcattctttaggcagaacgaaatgatcccagatagaaacttagagatgcagaaagaattcgatgcctaccccaagactttggaggacttccgggtcaagacctgcgggggcgccaccgtgaccattgtcagtggccttctcatgctgctactgttcctgtccgagctgcagtattacctcaccacggaggtgcatcctgagctctacgtggacaagtcgcggggagataaactgaagatcaacatcgatgtactttttccgcacatgccttgtgcctatctgagtattgatgccatggatgtggccggagaacagcagctggatgtggaacacaacctgttcaagcaacgactagataaagatggcatccccgtgagctcagaggctgagcggcatgagcttgggaaagtcgaggtgacggtgtttgaccctgactccctggaccctgatcgctgtgagagctgctatggtgctgaggcagaagatatcaagtgctgtaacacctgtgaagatgtgcgggaggcatatcgccgtagaggctgggccttcaagaacccagatactattgagcagtgccggcgagagggcttcagccagaagatgcaggagcagaagaatgaaggctgccaggtgtatggcttcttggaagtcaataaggtggccggaaacttccactttgcccctgggaagagcttccagcagtcccatgtgcacgtccatgacttgcagagctttggccttgacaacatcaacatgacccactacatccagcacctgtcatttggggaggactatccaggcattgtgaaccccctggaccacaccaatgtcactgcgccccaagcctccatgatgttccagtactttgtgaaggtggtgcccactgtcctctatgagctctcgcccatgatggtgaagctgacggagaagcacaggtccttcacccacttcctgacaggtgtgtgcgccatcattgggggcatgttcacagtggctggactcatcgattcgctcatctaccactcagcacgagccatccagaagaaaattgatctagggaagacaacgtagtcaccctcggtgcttcctctgtctcctctttctccctggcctgtggttgtcccccagcctctgccaccctccacctcctcggtcagccccagccccaggttgataaatctattgattgattgtgatagta

SEQ ID NO: 331211 - DNA, 1318 bp, Homo sapiens
cggaacacaacaaaatcatatcaacgcgtggaaaggaaaataaccaccaatctagaattctagaacaaaggtgaaatagacatttccagacacacaaaaaccaaggaaatgcatcaccaacagacccacattaaaggaaatactatagcattctttaggcagaacgaaatgatcccagatagaaacttagagatgcagaaagaattcgatgcctaccccaagactttggaggacttccgggtcaagacctgcgggggcgccaccgtgaccattgtcagtggccttctcatgctgctactgttcctgtccgagctgcagtattacctcaccacggaggtgcatcctgagctctacgtggacaagtcgcggggagataaactgaagatcaacatcgatgtactttttccgcacatgccttgtgcctatctgagtattgatgccatggatgtggccggagaacagcagctggatgtggaacacaacctgttcaagcaacgactagataaagatggcatccccgtgagctcagaggctgagcggcatgagcttgggaaagtcgaggtgacggtgtttgaccctgactccctggaccctgatcgctgtgagagctgctatggtgctgaggcagaagatatcaagtgctgtaacacctgtgaagatgtgcgggaggcatatcgccgtagaggctgggccttcaagaacccagatactattgagcagtgccggcgagagggcttcagccagaagatgcaggagcagaagaatgaaggctgccaggtgtatggcttcttggaagtcaataaggtggccggaaacttccactttgcccctgggaagagcttccagcagtcccatgtgcacgtccatgacttgcagagctttggccttgacaacatcaacatgacccactacatccagcacctgtcatttggggaggactatccaggcattgtgaaccccctggaccacaccaatgtcactgcgccccaagcctccatgatgttccagtactttgtgaaggtggtgcccactgtgtacatgaaggtggacggagagatctgagacataatcaggttctttgtgaccgcagacatgagaagtttcacaattggcctgctaggtcgaccaaggcgttacccgagatgtagtatcgtcccgctatgatgcttctcaggcctcatgatgtgtgaagtctagactggagaagcacacgctcgattcatccacttctagacaggtgtgtgctgccatcattgggggcatgttcacagtggctggaatctatcgattcgctctacaatattacatgtacagccag

SEQ ID NO: 331212 - DNA, 1220 bp, Homo sapiens
cggaacacaacaaaatcatatcaacgcgtggaaaggaaaataaccaccaatctagaattctagaacaaaggtgaaatagacatttccagacacacaaaaaccaaggaaatgcatcaccaacagacccacattaaaggaaatactatagcattctttaggcagaacgaaatgatcccagatagaaacttagagatgcagaaagaattcgatgcctaccccaagactttggaggacttccgggtcaagacctgcgggggcgccaccgtgaccattgtcagtggccttctcatgctgctactgttcctgtccgagctgcagtattacctcaccacggaggtgcatcctgagctctacgtggacaagtcgcggggagataaactgaagatcaacatcgatgtactttttccgcacatgccttgtgcctatctgagtattgatgccatggatgtggccggagaacagcagctggatgtggaacacaacctgttcaagcaacgactagataaagatggcatccccgtgagctcagaggctgagcggcatgagcttgggaaagtcgaggtgacggtgtttgaccctgactccctggaccctgatcgctgtgagagctgctatggtgctgaggcagaagatatcaagtgctgtaacacctgtgaagatgtgcgggaggcatatcgccgtagaggctgggccttcaagaacccagatactattgagcagtgccggcgagagggcttcagccagaagatgcaggagcagaagaatgaaggctgccaggtgtatggcttcttggaagtcaataaggtggccggaaacttccactttgcccctgggaagagcttccagcagtcccatgtgcacgtccatgacttgcagagctttggccttgacaacatcaacatgacccactacatccagcacctgtcatttggggaggactatccaggcattgtgaaccccctggaccacaccaatgtcactgcgccccaagctccttgtctctctcccagtggctggactcatcgattcgctcatctaccactcagcacgagccatccagaagaaaattgatctagggaagacaacgtagtcaccctcggtgcttcctctgtctcctctttctccctggcctgtggttgtcccccagcctctgccaccctccacctcctcggtcagccccagccccaggttgataaatctattgattgattgtgatagta

SEQ ID NO: 331213 - DNA, 1160 bp, Homo sapiens
cggaacacaacaaaatcatatcaacgcgtggaaaggaaaataaccaccaatctagaattctagaacaaaggtgaaatagacatttccagacacacaaaaaccaaggaaatgcatcaccaacagacccacattaaaggaaatactatagcattctttaggcagaacgaaatgatcccagatagaaacttagagatgcagaaagaattcgatgcctaccccaagactttggaggacttccgggtcaagacctgcgggggcgccaccgtgaccattgtcagtggccttctcatgctgctactgttcctgtccgagctgcagtattacctcaccacggaggtgcatcctgagctctacgtggacaagtcgcggggagataaactgaagatcaacatcgatgtactttttccgcacatgccttgtgcctatctgagtattgatgccatggatgtggccggagaacagcagctggatgtggaacacaacctgttcaagcaacgactagataaagatggcatccccgtgagctcagaggctgagcggcatgagcttgggaaagtcgaggtgacggtgtttgaccctgactccctggaccctgatcgctgtgagagctgctatggtgctgaggcagaagatatcaagtgctgtaacacctgtgaagatgtgcgggaggcatatcgccgtagaggctgggccttcaagaacccagatactattgagcagtgccggcgagagggcttcagccagaagatgcaggagcagaagaatgaaggctgccaggtgtatggcttcttggaagtcaataaggtggccggaaacttccactttgcccctgggaagagcttccagcagtcccatgtgcacgtccatgacttgcagagctttggccttgacaacgtccttcacccacttcctgacaggtgtgtgcgccatcattgggggcatgttcacagtggctggactcatcgattcgctcatctaccactcagcacgagccatccagaagaaaattgatctagggaagacaacgtagtcaccctcggtgcttcctctgtctcctctttctccctggcctgtggttgtcccccagcctctgccaccctccacctcctcggtcagccccagccccaggttgataaatctattgattgattgtgatagta

SEQ ID NO: 331214 - DNA, 807 bp, Homo sapiens
cggaacacaacaaaatcatatcaacgcgtggaaaggaaaataaccaccaatctagaattctagaacaaaggtgaaatagacatttccagacacacaaaaaccaaggaaatgcatcaccaacagacccacattaaaggaaatactatagcattctttaggcagaacgaaatgatcccagatagaaacttagagatgcagaaagaattcgatgcctaccccaagactttggaggacttccgggtcaagacctgcgggggcgccaccgtgaccattgtcagtggccttctcatgctgctactgttcctgtccgagctgcagtattacctcaccacggaggtgcatcctgagctctacgtggacaagtcgcggggagataaactgaagatcaacatcgatgtactttttccgcacatgccttgtgcctatctgagtattgatgccatggatgtggccggagaacagcagctggatgtggaacacaacctgttcaagcaacgactagataaagatggcatccccgtgagctcagaggctgagcggcatgcagattaatgcaggacaccagtggaaccaacataatttgctataggactggatgtggagtggaggagagcaaagtcatggttgttgattccaacgctttcagcctgagcaaatgaatgacttgagatggagatgactggaggagaaggtttttttggtgggagggaggagtggctattggatatccactgctgtgtaacaaagtactccaaaagttagtagtttgatacaataaaaatgtgttttttcagtttccctgggtca

SEQ ID NO: 331215 - DNA, 6830 bp, Homo sapiens
ggccgggcttgcgcagcgctaggctcctcgccgctcctagtctgcggcggcggcggcggggagggcgcggccgcgggcggggctgagggcggcgggggcgggccgcccgagctgggagggcggcggcgccgaggggaggagagcggcccatggacccgcggggcccggcgccccagactctgcgccgtcgggacggagcccaagatgtcggcctaggccggggcgcgacgacgcggacggggcggcgaggaggcgccgctgctgccggggctcgcagccgccgagcccccgagggcgcgccctgacggactggccgagccggcggtgagaggccggcgcgtcgggagcgggccgcgcggcaccatgtcggccaaggtgcggctcaagaagctggagcagctgctcctggacgggccctggcgcaacgagagcgccctgagcgtggaaacgctgctcgacgtgctcgtctgcctgtacaccgagtgcagccactcggccctgcgccgcgacaagtacgtggccgagttcctcgagtgggctaaaccatttacacagctggtgaaagaaatgcagcttcatcgagaagactttgaaataattaaagtaattggaagaggtgcttttggtgaggttgctgttgtcaaaatgaagaatactgaacgaatttatgcaatgaaaatcctcaacaagtgggagatgctgaaaagagcagagaccgcgtgcttccgagaggagcgcgatgtgctggtgaacggcgactgccagtggatcaccgcgctgcactacgcctttcaggacgagaaccacctgtacttagtcatggattactatgtgggtggtgatttactgaccctgctcagcaaatttgaagacaagcttccggaagatatggcgaggttctacattggtgaaatggtgctggccattgactccatccatcagcttcattacgtgcacagagacattaaacctgacaatgtccttttggacgtgaatggtcatatccgcctggctgactttggatcatgtttgaagatgaatgatgatggcactgtgcagtcctccgtggccgtgggcacacctgactacatctcgccggagatcctgcaggcgatggaggacggcatgggcaaatacgggcctgagtgtgactggtggtctctgggtgtctgcatgtatgagatgctctatggagaaacgccgttttatgcggagtcactcgtggagacctatgggaagatcatgaaccatgaagagcgattccagttcccatcccatgtcacggatgtatctgaagaagcgaaggacctcatccagagactgatctgcagtagagaacgccggctggggcagaatggaatagaggatttcaaaaagcatgcgttttttgaaggtctaaattgggaaaatatacgaaacctagaagcaccttatattcctgatgtgagcagtccctctgacacatccaacttcgacgtggatgacgacgtgctgagaaacacggaaatattacctcctggttctcacacaggcttttctggattacatttgccattcattggttttacattcacaacggaaagctgtttttctgatcgaggctctctgaagagcataatgcagtccaacacattaaccaaagatgaggatgtgcagcgggacctggagcacagcctgcagatggaagcttacgagaggaggattcggaggctggaacaggagaagctggagctgagcaggaagctgcaagagtccacccagaccgtgcagtccctccacggctcatctcgggccctcagcaattcaaaccgagataaagaaatcaaaaagctaaatgaagaaatcgaacgcttgaagaataaaatagcagattcaaacaggctggagcgacagcttgaggacacagtggcgcttcgccaagagcgtgaggactccacgcagcggctgcgggggctggagaagcagcaccgcgtggtccggcaggagaaggaggagctgcacaagcaactggttgaagcctcagagcggttgaaatcccaggccaaggaactcaaagatgcccatcagcagcgaaagctggccctgcaggagttctcggagctgaacgagcgcatggcagagctccgtgcccagaagcagaaggtgtcccggcagctgcgagacaaggaggaggagatggaggtggccacgcagaaggtggacgccatgcggcaggaaatgcggagagctgagaagctcaggaaagagctggaagctcagcttgatgatgctgttgctgaggcctccaaggagcgcaagcttcgtgagcacagcgagaacttctgcaagcaaatggaaagcgagctggaggccctcaaggtgaagcaaggaggccggggagcgggtgccaccttagagcaccagcaagagatttccaaaatcaaatccgagctggagaagaaagtcttattttatgaagaggaattggtcagacgtgaggcctcccatgtgctagaagtgaaaaatgtgaagaaggaggtgcatgattcagaaagccaccagctggccctgcagaaagaaatcttgatgttaaaagataagttagaaaagtcaaagcgagaacggcataacgagatggaggaggcagtaggtacaataaaagataaatacgaacgagaaagagcgatgctgtttgatgaaaacaagaagctaactgctgaaaatgaaaagctctgttcctttgtggataaactcacagctcaaaatagacagctggaggatgagctgcaggatctggcagccaagaaggagtcagtggcccactgggaagctcagattgcggaaatcattcagtgggtcagtgacgagaaagatgcccggggttaccttcaagctcttgcttccaagatgaccgaagagctcgaggctttgaggagttctagtctggggtcaagaacactggacccgctgtggaaggtgcgccgcagccagaagctggacatgtccgcgcggctggagctgcagtcggccctggaggcggagatccgggccaagcagcttgtccaggaggagctcaggaaggtcaaggacgccaacctcaccttggaaagcaaactaaaggattccgaagccaaaaacagagaattattagaagaaatggaaattttgaagaaaaagatggaagaaaaattcagagcagatactgggctcaaacttccagattttcaggattccatttttgagtatttcaacactgctcctcttgcacatgacctgacatttagaaccagctcagctagtgagcaagaaacacaagctccgaagccagaagcgtccccgtcgatgtctgtggctgcatcagagcagcaggaggacatggctcggcccccgcagaggccatccgctgtgccgttgcccaccacgcaggccctggctctggctggaccgaagccaaaagctcaccagttcagcatcaagtccttctccagccctactcagtgcagccactgcacctccctgatggttgggctgatccggcagggctacgcctgcgaggtgtgttcctttgcttgccacgtgtcctgcaaagacggtgccccccaggtgtgcccaatacctcccgagcagtccaagaggcctctgggcgtggacgtgcagcgaggcatcggaacagcctacaaaggccatgtcaaggtcccaaagcccacgggggtgaagaagggatggcagcgcgcatatgcagtcgtctgtgactgcaagctcttcctgtatgatctgcctgaaggaaaatccacccagcctggtgtcattgcgagccaagtcttggatctcagagatgacgagttttccgtgagctcagtcctggcctcagatgtcattcatgctacacgccgagatattccatgtatattcagggtgacggcctctctcttaggtgcaccttctaagaccagctcgctgctcattctgacagaaaatgagaatgaaaagaggaagtgggttgggattctagaaggactccagtccatccttcataaaaaccggctgaggaatcaggtcgtgcatgttcccttggaagcctacgacagctcgctgcctctcatcaaggccatcctgacagctgccatcgtggatgcagacaggattgcagtcggcctagaagaagggctctatgtcatagaggtcacccgagatgtgatcgtccgtgccgctgactgtaagaaggtacaccagatcgagcttgctcccagggagaagatcgtaatcctcctctgtggccggaaccaccatgtgcacctctatccgtggtcgtcccttgatggagcggaaggcagctttgacatcaagcttccggaaaccaaaggctgccagctcatggccacggccacactcaagaggaactctggcacctgcctgtttgtggccgtgaaacggctgatcctttgctatgagatccagagaacgaagccattccacagaaagttcaatgagattgtggctcccggcagcgtgcagtgcctggcggtgctcagggacaggctctgtgtgggctacccttctgggttctgcctgctgagcatccagggggacgggcagcctctaaacctggtaaatcccaatgacccctcgcttgcgttcctctcacaacagtcttttgatgccctttgtgctgtggagctcgaaagcgaggagtacctgctttgcttcagccacatgggactgtacgtggacccgcaaggccggagggcacgcgcgcaggagctcatgtggcctgcggctcctgtcgcctgtagttgcagccccacccacgtcacggtgtacagcgagtatggcgtggacgtctttgatgtgcgcaccatggagtgggtgcagaccatcggcctgcggaggataaggcccctgaactctgaaggcaccctcaacctcctcaactgcgagcctccacgcttgatctacttcaagagcaagttctcgggagcggttctcaacgtgccggacacctccgacaacagcaagaagcagatgctgcgcaccaggagcaaaaggcggttcgtcttcaaggtcccagaggaagagagactgcagcagaggcgagagatgcttagagacccagaattgagatccaaaatgatatccaacccaaccaacttcaaccacgtggcccacatgggcccaggcgacggcatgcaggtgctcatggacctgcctctgagtgctgtgcccccctcccaggaggaaaggccgggccccgctcccaccaacctggctcgccagcctccatccaggaacaagccctacatctcgtggccctcatcaggtggatcggagcctagcgtgactgtgcctctgagaagtatgtctgatccagaccaggactttgacaaagagcctgattcggactccaccaaacactcaactccatcgaatagctccaaccccagcggcccaccgagccccaactccccccacaggagccagctccccctcgaaggcctggagcagccggcctgtgacacctgaagccgccagctcgccacaggggccagggagctggagatggcctccagcgtcagtgccaagactgagcgggccctccagtgttgtccaaggaaatgtagaatcactttgtagatatggagatgaagaagacaaatctttattataatattgatcagttttatgccgcattgttcgtggcagtagaccacatctgttcgtctgcacagctgtgaggcgatgctgttccatctgcacatgaaggacccccatacagcctgtctcccacccctgacaacccgagagggcatatggggccctgccaacaccacttcctcagcagaaacccgtcatgacgcggctgcttcggaagcagacatctggggacacagcctcagtacccagtcttttccctagttcctgaaactttcctaggaccttaagagaatagtaggaggtcctatagcattcccagtgtcactagaattttgaagacaggaaagtggaggttagtctgtggcctttttttcatttagccattgcacagtcagctgcagaagtcctgctgaccacctagtcatggacaaaggcccaggaccagtgacaccctgcgtccctgtgtgcattaagttcattctgggtcgcagccatgaagtgtcaccagtatctactactgtgaagtcagctgtgctgttttccattcgcttccacggcttctgcctcctgccataaaaccagcgagtgtcgtggtgcaggcaggccctgtggcctgctgggctgagggaagtcagagccccagggcgccacgaagcagccactgggataccccaccccgccccgccctgcccgccccccccccaccagtcctgcccccgcatggagcccccgtgattagtagcccgtatgatcacgtagacccacccaacacactcctgcacactggccccggcccacggcacagcaatcccctgcgcgtggatttcacctcaccctttgtaccagatgttgagtgaccagctctgtggccctgtgtcgtcagaggcttgtgattaactgtggcggcagacacagcttgtccacagcttgggccaggcttcccctgtcctcccaccggtcggctgcttggcaaggctgttcaggacgtgcacttccccaagtcggcactgagtggcccagcaccgcctagccctgccaccccactgccctcctgggccttctgctggatgggcacctggggggttctggtttttacttttttaatgtaagtctcagtctttgtaattaattattgaattgtgagaacatttttgaacaatttacctgtcaataaagcagaagacggcagttttaaagtt

SEQ ID NO: 331216 - DNA, 7250 bp, Homo sapiens
ggccgggcttgcgcagcgctaggctcctcgccgctcctagtctgcggcggcggcggcggggagggcgcggccgcgggcggggctgagggcggcgggggcgggccgcccgagctgggagggcggcggcgccgaggggaggagagcggcccatggacccgcggggcccggcgccccagactctgcgccgtcgggacggagcccaagatgtcggcctaggccggggcgcgacgacgcggacggggcggcgaggaggcgccgctgctgccggggctcgcagccgccgagcccccgagggcgcgccctgacggactggccgagccggcggtgagaggccggcgcgtcgggagcgggccgcgcggcaccatgtcggccaaggtgcggctcaagaagctggagcagctgctcctggacgggccctggcgcaacgagagcgccctgagcgtggaaacgctgctcgacgtgctcgtctgcctgtacaccgagtgcagccactcggccctgcgccgcgacaagtacgtggccgagttcctcgagtgggctaaaccatttacacagctggtgaaagaaatgcagcttcatcgagaagactttgaaataattaaagtaattggaagaggtgcttttggtgaggttgctgttgtcaaaatgaagaatactgaacgaatttatgcaatgaaaatcctcaacaagtgggagatgctgaaaagagcagagaccgcgtgcttccgagaggagcgcgatgtgctggtgaacggcgactgccagtggatcaccgcgctgcactacgcctttcaggacgagaaccacctgtacttagtcatggattactatgtgggtggtgatttactgaccctgctcagcaaatttgaagacaagcttccggaagatatggcgaggttctacattggtgaaatggtgctggccattgactccatccatcagcttcattacgtgcacagagacattaaacctgacaatgtccttttggacgtgaatggtcatatccgcctggctgactttggatcatgtttgaagatgaatgatgatggcactgtgcagtcctccgtggccgtgggcacacctgactacatctcgccggagatcctgcaggcgatggaggacggcatgggcaaatacgggcctgagtgtgactggtggtctctgggtgtctgcatgtatgagatgctctatggagaaacgccgttttatgcggagtcactcgtggagacctatgggaagatcatgaaccatgaagagcgattccagttcccatcccatgtcacggatgtatctgaagaagcgaaggacctcatccagagactgatctgcagtagagaacgccggctggggcagaatggaatagaggatttcaaaaagcatgcgttttttgaaggtctaaattgggaaaatatacgaaacctagaagcaccttatattcctgatgtgagcagtccctctgacacatccaacttcgacgtggatgacgacgtgctgagaaacacggaaatattacctcctggttctcacacaggcttttctggattacatttgccattcattggttttacattcacaacggaaagctgtttttctgatcgaggctctctgaagagcataatgcagtccaacacattaaccaaagatgaggatgtgcagcgggacctggagcacagcctgcagatggaagcttacgagaggaggattcggaggctggaacaggagaagctggagctgagcaggaagctgcaagagtccacccagaccgtgcagtccctccacggctcatctcgggccctcagcaattcaaaccgagataaagaaatcaaaaagctaaatgaagaaatcgaacgcttgaagaataaaatagcagattcaaacaggctggagcgacagcttgaggacacagtggcgcttcgccaagagcgtgaggactccacgcagcggctgcgggggctggagaagcagcaccgcgtggtccggcaggagaaggaggagctgcacaagcaactggttgaagcctcagagcggttgaaatcccaggccaaggaactcaaagatgcccatcagcagcgaaagctggccctgcaggagttctcggagctgaacgagcgcatggcagagctccgtgcccagaagcagaaggtgtcccggcagctgcgagacaaggaggaggagatggaggtggccacgcagaaggtggacgccatgcggcaggaaatgcggagagctgagaagctcaggaaagagctggaagctcagcttgatgatgctgttgctgaggcctccaaggagcgcaagcttcgtgagcacagcgagaacttctgcaagcaaatggaaagcgagctggaggccctcaaggtgaagcaaggaggccggggagcgggtgccaccttagagcaccagcaagagatttccaaaatcaaatccgagctggagaagaaagtcttattttatgaagaggaattggtcagacgtgaggcctcccatgtgctagaagtgaaaaatgtgaagaaggaggtgcatgattcagaaagccaccagctggccctgcagaaagaaatcttgatgttaaaagataagttagaaaagtcaaagcgagaacggcataacgagatggaggaggcagtaggtacaataaaagataaatacgaacgagaaagagcgatgctgtttgatgaaaacaagaagctaactgctgaaaatgaaaagctctgttcctttgtggataaactcacagctcaaaatagacagctggaggatgagctgcaggatctggcagccaagaaggagtcagtggcccactgggaagctcagattgcggaaatcattcagtgggtcagtgacgagaaagatgcccggggttaccttcaagctcttgcttccaagatgaccgaagagctcgaggctttgaggagttctagtctggggtcaagaacactggacccgctgtggaaggtgcgccgcagccagaagctggacatgtccgcgcggctggagctgcagtcggccctggaggcggagatccgggccaagcagcttgtccaggaggagctcaggaaggtcaaggacgccaacctcaccttggaaagcaaactaaaggattccgaagccaaaaacagagaattattagaagaaatggaaattttgaagaaaaagatggaagaaaaattcagagcagatactgggctcaaacttccagattttcaggattccatttttgagtatttcaacactgctcctcttgcacatgacctgacatttagaaccagctcagctagtgagcaagaaacacaagctccgaagccagaagcgtccccgtcgatgtctgtggctgcatcagagcagcaggaggacatggctcggcccccgcagaggccatccgctgtgccgttgcccaccacgcaggccctggctctggctggaccgaagccaaaagctcaccagttcagcatcaagtccttctccagccctactcagtgcagccactgcacctccctgatggttgggctgatccggcagggctacgcctgcgaggtgtgttcctttgcttgccacgtgtcctgcaaagacggtgccccccaggtgtgcccaatacctcccgagcagtccaagaggcctctgggcgtggacgtgcagcgaggcatcggaacagcctacaaaggccatgtcaaggtcccaaagcccacgggggtgaagaagggatggcagcgcgcatatgcagtcgtctgtgactgcaagctcttcctgtatgatctgcctgaaggaaaatccacccagcctggtgtcattgcgagccaagtcttggatctcagagatgacgagttttccgtgagctcagtcctggcctcagatgtcattcatgctacacgccgagatattccatgtatattcagggtgacggcctctctcttaggtgcaccttctaagaccagctcgctgctcattctgacagaaaatgagaatgaaaagaggaagtgggttgggattctagaaggactccagtccatccttcataaaaaccggctgaggaatcaggtcgtgcatgttcccttggaagcctacgacagctcgctgcctctcatcaaggccatcctgacagctgccatcgtggatgcagacaggattgcagtcggcctagaagaagggctctatgtcatagaggtcacccgagatgtgatcgtccgtgccgctgactgtaagaaggtacaccagatcgagcttgctcccagggagaagatcgtaatcctcctctgtggccggaaccaccatgtgcacctctatccgtggtcgtcccttgatggagcggaaggcagctttgacatcaagcttccggaaaccaaaggctgccagctcatggccacggccacactcaagaggaactctggcacctgcctgtttgtggccgtgaaacggctgatcctttgctatgagatccagagaacgaagccattccacagaaagttcaatgagattgtggctcccggcagcgtgcagtgcctggcggtgctcagggacaggctctgtgtgggctacccttctgggttctgcctgctgagcatccagggggacgggcagcctctaaacctggtaaatcccaatgacccctcgcttgcgttcctctcacaacagtcttttgatgccctttgtgctgtggagctcgaaagcgaggagtacctgctttgcttcagccacatgggactgtacgtggacccgcaaggccggagggcacgcgcgcaggagctcatgtggcctgcggctcctgtcgcctgtagttgcagccccacccacgtcacggtgtacagcgagtatggcgtggacgtctttgatgtgcgcaccatggagtgggtgcagaccatcggcctgcggaggataaggcccctgaactctgaaggcaccctcaacctcctcaactgcgagcctccacgcttgatctacttcaagagcaagttctcgggagcggttctcaacgtgccggacacctccgacaacagcaagaagcagatgctgcgcaccaggagcaaaaggcggttcgtcttcaaggtcccagaggaagagagactgcagcagaggcgagagatgcttagagacccagaattgagatccaaaatgatatccaacccaaccaacttcaaccacgtggcccacatgggcccaggcgacggcatgcaggtgctcatggacctgcctctgagtgctgtgcccccctcccaggaggaaaggccgggccccgctcccaccaacctggctcgccagcctccatccaggaacaagccctacatctcgtggccctcatcaggtggatcggagcctagcgtgactgtgcctctgagaagtatgtctgatccagaccaggactttgacaaagagcctgattcggactccaccaaacactcaactccatcgaatagctccaaccccagcggcccaccgagccccaactccccccacaggagccagctccccctcgaaggcctggagcagccggcctgtgacacctgaagccgccagctcgccacaggggccagggagctggagatggcctccagcgtcagtgccaagactgagcgggccctccagtgttgtccaaggaaatgtagaatcactttgtagatatggagatgaagaagacaaatctttattataatattgatcagttttatgccgcattgttcgtggcagtagaccacatctgttcgtctgcacagctgtgaggcgatgctgttccatctgcacatgaaggacccccatacagcctgtctcccacccctgacaacccgagagggcatatggggccctgccaacaccacttcctcagcagaaacccgtcatgacgcggctgcttcggaagcagacatctggggacacagcctcagtacccagtcttttccctagttcctgaaactttcctaggaccttaagagaatagtaggaggtcctatagcattcccagtgtcactagaattttgaagacaggaaagtggaggttagtctgtggcctttttttcatttagccattgcacagtcagctgcagaagtcctgctgaccacctagtcatggacaaaggcccaggaccagtgacaccctgcgtccctgtgtgcattaagttcattctgggtcgcagccatgaagtgtcaccagtatctactactgtgaagtcagctgtgctgttttccattcgcttccacggcttctgcctcctgccataaaaccagcgagtgtcgtggtgcaggcaggccctgtggcctgctgggctgagggaagtcagagccccagggcgccacgaagcagccactgggataccccaccccgccccgccctgcccgccccccccccaccagtcctgcccccgcatggagcccccgtgattagtagcccgtatgatcacgtagacccacccaacacactcctgcacactggccccggcccacggcacagcaatcccctgcgcgtggatttcacctcaccctttgtaccagatgttgagtgaccagctctgtggccctgtgtcgtcagaggcttgtgattaactgtggcggcagacacagcttgtccacagcttgggccaggcttcccctgtcctcccaccggtcggctgcttggcaaggctgttcaggacgtgcacttccccaagtcggcactgagtggcccagcaccgcctagccctgccaccccactgccctcctgggccttctgctggatgggcacctggggggttctggtttttacttttttaatgtaagtctcagtctttgtaattaattattgaattgtgagaacatttttgaacaatttacctgtcaataaagcagaagacggcagttttaaagttaaaaaaaaaaaaaaaaacaaaaacaaaaaaaacaacaaaaaaaaacccactctcgcgggcgcatctcttacttgtccgcggtgtgcgggacaaaaagaaagagggtgtacagcgaacaggggcgcgccccgaggggcccccaatgagccgcgtgtgtaccaccgcggaaccccccccagttttttttgctggtggttctacacaagaggagggggggggggataagcaaaaattccggagcggcggcgagggtactcaacacccccccataatattaatgaggggagagaggccctcctcctctcattaatatacaaaagttgcgcccagcaatatgacagccgcgccgggggggttattataaacaccaccctgcggggaagatttgaaagaggagaaaaataacacgggggggacaaa

SEQ ID NO: 331217 - DNA, 7172 bp, Homo sapiens
ggccgggcttgcgcagcgctaggctcctcgccgctcctagtctgcggcggcggcggcggggagggcgcggccgcgggcggggctgagggcggcgggggcgggccgcccgagctgggagggcggcggcgccgaggggaggagagcggcccatggacccgcggggcccggcgccccagactctgcgccgtcgggacggagcccaagatgtcggcctaggccggggcgcgacgacgcggacggggcggcgaggaggcgccgctgctgccggggctcgcagccgccgagcccccgagggcgcgccctgacggactggccgagccggcggtgagaggccggcgcgtcgggagcgggccgcgcggcaccatgtcggccaaggtgcggctcaagaagctggagcagctgctcctggacgggccctggcgcaacgagagcgccctgagcgtggaaacgctgctcgacgtgctcgtctgcctgtacaccgagtgcagccactcggccctgcgccgcgacaagtacgtggccgagttcctcgagtgggctaaaccatttacacagctggtgaaagaaatgcagcttcatcgagaagactttgaaataattaaagtaattggaagaggtgcttttggtgaggttgctgttgtcaaaatgaagaatactgaacgaatttatgcaatgaaaatcctcaacaagtgggagatgctgaaaagagcagagaccgcgtgcttccgagaggagcgcgatgtgctggtgaacggcgactgccagtggatcaccgcgctgcactacgcctttcaggacgagaaccacctgtacttagtcatggattactatgtgggtggtgatttactgaccctgctcagcaaatttgaagacaagcttccggaagatatggcgaggttctacattggtgaaatggtgctggccattgactccatccatcagcttcattacgtgcacagagacattaaacctgacaatgtccttttggacgtgaatggtcatatccgcctggctgactttggatcatgtttgaagatgaatgatgatggcactgtgcagtcctccgtggccgtgggcacacctgactacatctcgccggagatcctgcaggcgatggaggacggcatgggcaaatacgggcctgagtgtgactggtggtctctgggtgtctgcatgtatgagatgctctatggagaaacgccgttttatgcggagtcactcgtggagacctatgggaagatcatgaaccatgaagagcgattccagttcccatcccatgtcacggatgtatctgaagaagcgaaggacctcatccagagactgatctgcagtagagaacgccggctggggcagaatggaatagaggatttcaaaaagcatgcgttttttgaaggtctaaattgggaaaatatacgaaacctagaagcaccttatattcctgatgtgagcagtccctctgacacatccaacttcgacgtggatgacgacgtgctgagaaacacggaaatattacctcctggttctcacacaggcttttctggattacatttgccattcattggttttacattcacaacggaaagctgtttttctgatcgaggctctctgaagagcataatgcagtccaacacattaaccaaagatgaggatgtgcagcgggacctggagcacagcctgcagatggaagcttacgagaggaggattcggaggctggaacaggagaagctggagctgagcaggaagctgcaagagtccacccagaccgtgcagtccctccacggctcatctcgggccctcagcaattcaaaccgagataaagaaatcaaaaagctaaatgaagaaatcgaacgcttgaagaataaaatagcagattcaaacaggctggagcgacagcttgaggacacagtggcgcttcgccaagagcgtgaggactccacgcagcggctgcgggggctggagaagcagcaccgcgtggtccggcaggagaaggaggagctgcacaagcaactggttgaagcctcagagcggttgaaatcccaggccaaggaactcaaagatgcccatcagcagcgaaagctggccctgcaggagttctcggagctgaacgagcgcatggcagagctccgtgcccagaagcagaaggtgtcccggcagctgcgagacaaggaggaggagatggaggtggccacgcagaaggtggacgccatgcggcaggaaatgcggagagctgagaagctcaggaaagagctggaagctcagcttgatgatgctgttgctgaggcctccaaggagcgcaagcttcgtgagcacagcgagaacttctgcaagcaaatggaaagcgagctggaggccctcaaggtgaagcaaggaggccggggagcgggtgccaccttagagcaccagcaagagatttccaaaatcaaatccgagctggagaagaaagtcttattttatgaagaggaattggtcagacgtgaggcctcccatgtgctagaagtgaaaaatgtgaagaaggaggtgcatgattcagaaagccaccagctggccctgcagaaagaaatcttgatgttaaaagataagttagaaaagtcaaagcgagaacggcataacgagatggaggaggcagtaggtacaataaaagataaatacgaacgagaaagagcgatgctgtttgatgaaaacaagaagctaactgctgaaaatgaaaagctctgttcctttgtggataaactcacagctcaaaatagacagctggaggatgagctgcaggatctggcagccaagaaggagtcagtggcccactgggaagctcagattgcggaaatcattcagtgggtcagtgacgagaaagatgcccggggttaccttcaagctcttgcttccaagatgaccgaagagctcgaggctttgaggagttctagtctggggtcaagaacactggacccgctgtggaaggtgcgccgcagccagaagctggacatgtccgcgcggctggagctgcagtcggccctggaggcggagatccgggccaagcagcttgtccaggaggagctcaggaaggtcaaggacgccaacctcaccttggaaagcaaactaaaggattccgaagccaaaaacagagaattattagaagaaatggaaattttgaagaaaaagatggaagaaaaattcagagcagatactgggctcaaacttccagattttcaggattccatttttgagtatttcaacactgctcctcttgcacatgacctgacatttagaaccagctcagctagtgagcaagaaacacaagctccgaagccagaagcgtccccgtcgatgtctgtggctgcatcagagcagcaggagccaaaagctcaccagttcagcatcaagtccttctccagccctactcagtgcagccactgcacctccctgatggttgggctgatccggcagggctacgcctgcgaggtgtgttcctttgcttgccacgtgtcctgcaaagacggtgccccccaggtgtgcccaatacctcccgagcagtccaagaggcctctgggcgtggacgtgcagcgaggcatcggaacagcctacaaaggccatgtcaaggtcccaaagcccacgggggtgaagaagggatggcagcgcgcatatgcagtcgtctgtgactgcaagctcttcctgtatgatctgcctgaaggaaaatccacccagcctggtgtcattgcgagccaagtcttggatctcagagatgacgagttttccgtgagctcagtcctggcctcagatgtcattcatgctacacgccgagatattccatgtatattcagggtgacggcctctctcttaggtgcaccttctaagaccagctcgctgctcattctgacagaaaatgagaatgaaaagaggaagtgggttgggattctagaaggactccagtccatccttcataaaaaccggctgaggaatcaggtcgtgcatgttcccttggaagcctacgacagctcgctgcctctcatcaaggccatcctgacagctgccatcgtggatgcagacaggattgcagtcggcctagaagaagggctctatgtcatagaggtcacccgagatgtgatcgtccgtgccgctgactgtaagaaggtacaccagatcgagcttgctcccagggagaagatcgtaatcctcctctgtggccggaaccaccatgtgcacctctatccgtggtcgtcccttgatggagcggaaggcagctttgacatcaagcttccggaaaccaaaggctgccagctcatggccacggccacactcaagaggaactctggcacctgcctgtttgtggccgtgaaacggctgatcctttgctatgagatccagagaacgaagccattccacagaaagttcaatgagattgtggctcccggcagcgtgcagtgcctggcggtgctcagggacaggctctgtgtgggctacccttctgggttctgcctgctgagcatccagggggacgggcagcctctaaacctggtaaatcccaatgacccctcgcttgcgttcctctcacaacagtcttttgatgccctttgtgctgtggagctcgaaagcgaggagtacctgctttgcttcagccacatgggactgtacgtggacccgcaaggccggagggcacgcgcgcaggagctcatgtggcctgcggctcctgtcgcctgtagttgcagccccacccacgtcacggtgtacagcgagtatggcgtggacgtctttgatgtgcgcaccatggagtgggtgcagaccatcggcctgcggaggataaggcccctgaactctgaaggcaccctcaacctcctcaactgcgagcctccacgcttgatctacttcaagagcaagttctcgggagcggttctcaacgtgccggacacctccgacaacagcaagaagcagatgctgcgcaccaggagcaaaaggcggttcgtcttcaaggtcccagaggaagagagactgcagcagaggcgagagatgcttagagacccagaattgagatccaaaatgatatccaacccaaccaacttcaaccacgtggcccacatgggcccaggcgacggcatgcaggtgctcatggacctgcctctgagtgctgtgcccccctcccaggaggaaaggccgggccccgctcccaccaacctggctcgccagcctccatccaggaacaagccctacatctcgtggccctcatcaggtggatcggagcctagcgtgactgtgcctctgagaagtatgtctgatccagaccaggactttgacaaagagcctgattcggactccaccaaacactcaactccatcgaatagctccaaccccagcggcccaccgagccccaactccccccacaggagccagctccccctcgaaggcctggagcagccggcctgtgacacctgaagccgccagctcgccacaggggccagggagctggagatggcctccagcgtcagtgccaagactgagcgggccctccagtgttgtccaaggaaatgtagaatcactttgtagatatggagatgaagaagacaaatctttattataatattgatcagttttatgccgcattgttcgtggcagtagaccacatctgttcgtctgcacagctgtgaggcgatgctgttccatctgcacatgaaggacccccatacagcctgtctcccacccctgacaacccgagagggcatatggggccctgccaacaccacttcctcagcagaaacccgtcatgacgcggctgcttcggaagcagacatctggggacacagcctcagtacccagtcttttccctagttcctgaaactttcctaggaccttaagagaatagtaggaggtcctatagcattcccagtgtcactagaattttgaagacaggaaagtggaggttagtctgtggcctttttttcatttagccattgcacagtcagctgcagaagtcctgctgaccacctagtcatggacaaaggcccaggaccagtgacaccctgcgtccctgtgtgcattaagttcattctgggtcgcagccatgaagtgtcaccagtatctactactgtgaagtcagctgtgctgttttccattcgcttccacggcttctgcctcctgccataaaaccagcgagtgtcgtggtgcaggcaggccctgtggcctgctgggctgagggaagtcagagccccagggcgccacgaagcagccactgggataccccaccccgccccgccctgcccgccccccccccaccagtcctgcccccgcatggagcccccgtgattagtagcccgtatgatcacgtagacccacccaacacactcctgcacactggccccggcccacggcacagcaatcccctgcgcgtggatttcacctcaccctttgtaccagatgttgagtgaccagctctgtggccctgtgtcgtcagaggcttgtgattaactgtggcggcagacacagcttgtccacagcttgggccaggcttcccctgtcctcccaccggtcggctgcttggcaaggctgttcaggacgtgcacttccccaagtcggcactgagtggcccagcaccgcctagccctgccaccccactgccctcctgggccttctgctggatgggcacctggggggttctggtttttacttttttaatgtaagtctcagtctttgtaattaattattgaattgtgagaacatttttgaacaatttacctgtcaataaagcagaagacggcagttttaaagttaaaaaaaaaaaaaaaaacaaaaacaaaaaaaacaacaaaaaaaaacccactctcgcgggcgcatctcttacttgtccgcggtgtgcgggacaaaaagaaagagggtgtacagcgaacaggggcgcgccccgaggggcccccaatgagccgcgtgtgtaccaccgcggaaccccccccagttttttttgctggtggttctacacaagaggagggggggggggataagcaaaaattccggagcggcggcgagggtactcaacacccccccataatattaatgaggggagagaggccctcctcctctcattaatatacaaaagttgcgcccagcaatatgacagccgcgccgggggggttattataaacaccaccctgcggggaagatttgaaagaggagaaaaataacacgggggggacaaa

SEQ ID NO: 331218 - DNA, 7066 bp, Homo sapiens
ggccgggcttgcgcagcgctaggctcctcgccgctcctagtctgcggcggcggcggcggggagggcgcggccgcgggcggggctgagggcggcgggggcgggccgcccgagctgggagggcggcggcgccgaggggaggagagcggcccatggacccgcggggcccggcgccccagactctgcgccgtcgggacggagcccaagatgtcggcctaggccggggcgcgacgacgcggacggggcggcgaggaggcgccgctgctgccggggctcgcagccgccgagcccccgagggcgcgccctgacggactggccgagccggcggtgagaggccggcgcgtcgggagcgggccgcgcggcaccatgtcggccaaggtgcggctcaagaagctggagcagctgctcctggacgggccctggcgcaacgagagcgccctgagcgtggaaacgctgctcgacgtgctcgtctgcctgtacaccgagtgcagccactcggccctgcgccgcgacaagtacgtggccgagttcctcgagtgggctaaaccatttacacagctggtgaaagaaatgcagcttcatcgagaagactttgaaataattaaagtaattggaagaggtgcttttggtgaggttgctgttgtcaaaatgaagaatactgaacgaatttatgcaatgaaaatcctcaacaagtgggagatgctgaaaagagcagagaccgcgtgcttccgagaggagcgcgatgtgctggtgaacggcgactgccagtggatcaccgcgctgcactacgcctttcaggacgagaaccacctgtacttagtcatggattactatgtgggtggtgatttactgaccctgctcagcaaatttgaagacaagcttccggaagatatggcgaggttctacattggtgaaatggtgctggccattgactccatccatcagcttcattacgtgcacagagacattaaacctgacaatgtccttttggacgtgaatggtcatatccgcctggctgactttggatcatgtttgaagatgaatgatgatggcactgtgcagtcctccgtggccgtgggcacacctgactacatctcgccggagatcctgcaggcgatggaggacggcatgggcaaatacgggcctgagtgtgactggtggtctctgggtgtctgcatgtatgagatgctctatggagaaacgccgttttatgcggagtcactcgtggagacctatgggaagatcatgaaccatgaagagcgattccagttcccatcccatgtcacggatgtatctgaagaagcgaaggacctcatccagagactgatctgcagtagagaacgccggctggggcagaatggaatagaggatttcaaaaagcatgcgttttttgaaggtctaaattgggaaaatatacgaaacctagaagcaccttatattcctgatgtgagcagtccctctgacacatccaacttcgacgtggatgacgacgtgctgagaaacacggaaatattacctcctggttctcacacaggcttttctggattacatttgccattcattggttttacattcacaacggaaagctgtttttctgatcgaggctctctgaagagcataatgcagtccaacacattaaccaaagatgaggatgtgcagcgggacctggagcacagcctgcagatggaagcttacgagaggaggattcggaggctggaacaggagaagctggagctgagcaggaagctgcaagagtccacccagaccgtgcagtccctccacggctcatctcgggccctcagcaattcaaaccgagataaagaaatcaaaaagctaaatgaagaaatcgaacgcttgaagaataaaatagcagattcaaacaggctggagcgacagcttgaggacacagtggcgcttcgccaagagcgtgaggactccacgcagcggctgcgggggctggagaagcagcaccgcgtggtccggcaggagaaggaggagctgcacaagcaactggttgaagcctcagagcggttgaaatcccaggccaaggaactcaaagatgcccatcagcagcgaaagctggccctgcaggagttctcggagctgaacgagcgcatggcagagctccgtgcccagaagcagaaggtgtcccggcagctgcgagacaaggaggaggagatggaggtggccacgcagaaggtggacgccatgcggcaggaaatgcggagagctgagaagctcaggaaagagctggaagctcagcttgatgatgctgttgctgaggcctccaaggagcgcaagcttcgtgagcacagcgagaacttctgcaagcaaatggaaagcgagctggaggccctcaaggtgaagcaaggaggccggggagcgggtgccaccttagagcaccagcaagagatttccaaaatcaaatccgagctggagaagaaagtcttattttatgaagaggaattggtcagacgtgaggcctcccatgtgctagaagtgaaaaatgtgaagaaggaggtgcatgattcagaaagccaccagctggccctgcagaaagaaatcttgatgttaaaagataagttagaaaagtcaaagcgagaacggcataacgagatggaggaggcagtaggtacaataaaagataaatacgaacgagaaagagcgatgctgtttgatgaaaacaagaagctaactgctgaaaatgaaaagctctgttcctttgtggataaactcacagctcaaaatagacagctggaggatgagctgcaggatctggcagccaagaaggagtcagtggcccactgggaagctcagattgcggaaatcattcagtgggtcagtgacgagaaagatgcccggggttaccttcaagctcttgcttccaagatgaccgaagagctcgaggctttgaggagttctagtctggggtcaagaacactggacccgctgtggaaggtgcgccgcagccagaagctggacatgtccgcgcggctggagctgcagtcggccctggaggcggagatccgggccaagcagcttgtccaggaggagctcaggaaggtcaaggacgccaacctcaccttggaaagcaaactaaaggattccgaagccaaaaacagagaattattagaagaaatggaaattttgaagaaaaagatggaagaaaaattcagagcagatactgggctcaaacttccagattttcaggattccatttttgagtatttcaacactgctcctcttgcacatgacctgacatttagaaccagctcagctagtgagcaagaaacacaagctccgaagccagaagcgtccccgtcgatgtctgtggctgcatcagagcagcaggaggacatggctcggcccccgcagaggccatccgctgtgccgttgcccaccacgcaggccctggctctggctggaccgaagccaaaagctcaccagttcagcatcaagtccttctccagccctactcagtgcagccactgcacctccctgatggttgggctgatccggcagggctacgcctgcgaggtgtgttcctttgcttgccacgtgtcctgcaaagacggtgccccccaggtgtgcccaatacctcccgagcagtccaagaggcctctgggcgtggacgtgcagcgaggcatcggaacagcctacaaaggccatgtcaaggtcccaaagcccacgggggtgaagaagggatggcagcgcgcatatgcagtcgtctgtgactgcaagctcttcctgtatgatctgcctgaaggaaaatccacccagcctggtgtcattgcgagccaagtcttggatctcagagatgacgagttttccgtgagctcagtcctggcctcagatgtcattcatgctacacgccgagatattccatgtatattcagggtgacggcctctctcttaggtgcaccttctaagaccagctcgctgctcattctgacagaaaatgagaatgaaaagaggaagtgggttgggattctagaaggactccagtccatccttcataaaaaccggctgaggaatcaggtcgtgcatgttcccttggaagcctacgacagctcgctgcctctcatcaaggccatcctgacagctgccatcgtggatgcagacaggattgcagtcggcctagaagaagggctctatgtcatagaggtcacccgagatgtgatcgtccgtgccgctgactgtaagaaggtacaccagatcgagcttgctcccagggagaagatcgtaatcctcctctgtggccggaaccaccatgtgcacctctatccgtggtcgtcccttgatggagcggaaggcagctttgacatcaagcttccggaaaccaaaggctgccagctcatggccacggccacactcaagaggaactctggcacctgcctgtttgtggccgtgaaacggctgatcctttgctatgagatccagagaacgaagccattccacagaaagttcaatgagattgtggctcccggcagcgtgcagtgcctggcggtgctcagggacaggctctgtgtgggctacccttctgggttctgcctgctgagcatccagggggacgggcagcctctaaacctggttgcagccccacccacgtcacggtgtacagcgagtatggcgtggacgtctttgatgtgcgcaccatggagtgggtgcagaccatcggcctgcggaggataaggcccctgaactctgaaggcaccctcaacctcctcaactgcgagcctccacgcttgatctacttcaagagcaagttctcgggagcggttctcaacgtgccggacacctccgacaacagcaagaagcagatgctgcgcaccaggagcaaaaggcggttcgtcttcaaggtcccagaggaagagagactgcagcagaggcgagagatgcttagagacccagaattgagatccaaaatgatatccaacccaaccaacttcaaccacgtggcccacatgggcccaggcgacggcatgcaggtgctcatggacctgcctctgagtgctgtgcccccctcccaggaggaaaggccgggccccgctcccaccaacctggctcgccagcctccatccaggaacaagccctacatctcgtggccctcatcaggtggatcggagcctagcgtgactgtgcctctgagaagtatgtctgatccagaccaggactttgacaaagagcctgattcggactccaccaaacactcaactccatcgaatagctccaaccccagcggcccaccgagccccaactccccccacaggagccagctccccctcgaaggcctggagcagccggcctgtgacacctgaagccgccagctcgccacaggggccagggagctggagatggcctccagcgtcagtgccaagactgagcgggccctccagtgttgtccaaggaaatgtagaatcactttgtagatatggagatgaagaagacaaatctttattataatattgatcagttttatgccgcattgttcgtggcagtagaccacatctgttcgtctgcacagctgtgaggcgatgctgttccatctgcacatgaaggacccccatacagcctgtctcccacccctgacaacccgagagggcatatggggccctgccaacaccacttcctcagcagaaacccgtcatgacgcggctgcttcggaagcagacatctggggacacagcctcagtacccagtcttttccctagttcctgaaactttcctaggaccttaagagaatagtaggaggtcctatagcattcccagtgtcactagaattttgaagacaggaaagtggaggttagtctgtggcctttttttcatttagccattgcacagtcagctgcagaagtcctgctgaccacctagtcatggacaaaggcccaggaccagtgacaccctgcgtccctgtgtgcattaagttcattctgggtcgcagccatgaagtgtcaccagtatctactactgtgaagtcagctgtgctgttttccattcgcttccacggcttctgcctcctgccataaaaccagcgagtgtcgtggtgcaggcaggccctgtggcctgctgggctgagggaagtcagagccccagggcgccacgaagcagccactgggataccccaccccgccccgccctgcccgccccccccccaccagtcctgcccccgcatggagcccccgtgattagtagcccgtatgatcacgtagacccacccaacacactcctgcacactggccccggcccacggcacagcaatcccctgcgcgtggatttcacctcaccctttgtaccagatgttgagtgaccagctctgtggccctgtgtcgtcagaggcttgtgattaactgtggcggcagacacagcttgtccacagcttgggccaggcttcccctgtcctcccaccggtcggctgcttggcaaggctgttcaggacgtgcacttccccaagtcggcactgagtggcccagcaccgcctagccctgccaccccactgccctcctgggccttctgctggatgggcacctggggggttctggtttttacttttttaatgtaagtctcagtctttgtaattaattattgaattgtgagaacatttttgaacaatttacctgtcaataaagcagaagacggcagttttaaagttaaaaaaaaaaaaaaaaacaaaaacaaaaaaaacaacaaaaaaaaacccactctcgcgggcgcatctcttacttgtccgcggtgtgcgggacaaaaagaaagagggtgtacagcgaacaggggcgcgccccgaggggcccccaatgagccgcgtgtgtaccaccgcggaaccccccccagttttttttgctggtggttctacacaagaggagggggggggggataagcaaaaattccggagcggcggcgagggtactcaacacccccccataatattaatgaggggagagaggccctcctcctctcattaatatacaaaagttgcgcccagcaatatgacagccgcgccgggggggttattataaacaccaccctgcggggaagatttgaaagaggagaaaaataacacgggggggacaaa

SEQ ID NO: 331219 - DNA, 6902 bp, Homo sapiens
ggccgggcttgcgcagcgctaggctcctcgccgctcctagtctgcggcggcggcggcggggagggcgcggccgcgggcggggctgagggcggcgggggcgggccgcccgagctgggagggcggcggcgccgaggggaggagagcggcccatggacccgcggggcccggcgccccagactctgcgccgtcgggacggagcccaagatgtcggcctaggccggggcgcgacgacgcggacggggcggcgaggaggcgccgctgctgccggggctcgcagccgccgagcccccgagggcgcgccctgacggactggccgagccggcggtgagaggccggcgcgtcgggagcgggccgcgcggcaccatgtcggccaaggtgcggctcaagaagctggagcagctgctcctggacgggccctggcgcaacgagagcgccctgagcgtggaaacgctgctcgacgtgctcgtctgcctgtacaccgagtgcagccactcggccctgcgccgcgacaagtacgtggccgagttcctcgagtgggctaaaccatttacacagctggtgaaagaaatgcagcttcatcgagaagactttgaaataattaaagtaattggaagaggtgcttttggtgaggttgctgttgtcaaaatgaagaatactgaacgaatttatgcaatgaaaatcctcaacaagtgggagatgctgaaaagagcagagaccgcgtgcttccgagaggagcgcgatgtgctggtgaacggcgactgccagtggatcaccgcgctgcactacgcctttcaggacgagaaccacctgtacttagtcatggattactatgtgggtggtgatttactgaccctgctcagcaaatttgaagacaagcttccggaagatatggcgaggttctacattggtgaaatggtgctggccattgactccatccatcagcttcattacgtgcacagagacattaaacctgacaatgtccttttggacgtgaatggtcatatccgcctggctgactttggatcatgtttgaagatgaatgatgatggcactgtgcagtcctccgtggccgtgggcacacctgactacatctcgccggagatcctgcaggcgatggaggacggcatgggcaaatacgggcctgagtgtgactggtggtctctgggtgtctgcatgtatgagatgctctatggagaaacgccgttttatgcggagtcactcgtggagacctatgggaagatcatgaaccatgaagagcgattccagttcccatcccatgtcacggatgtatctgaagaagcgaaggacctcatccagagactgatctgcagtagagaacgccggctggggcagaatggaatagaggatttcaaaaagcatgcgttttttgaaggtctaaattgggaaaatatacgaaacctagaagcaccttatattcctgatgtgagcagtccctctgacacatccaacttcgacgtggatgacgacgtgctgagaaacacggaaatattacctcctggttctcacacaggcttttctggattacatttgccattcattggttttacattcacaacggaaagctgtttttctgatcgaggctctctgaagagcataatgcagtccaacacattaaccaaagatgaggatgtgcagcgggacctggagcacagcctgcagatggaagcttacgagaggaggattcggaggctggaacaggagaagctggagctgagcaggaagctgcaagagtccacccagaccgtgcagtccctccacggctcatctcgggccctcagcaattcaaaccgagataaagaaatcaaaaagctaaatgaagaaatcgaacgcttgaagaataaaatagcagattcaaacaggctggagcgacagcttgaggacacagtggcgcttcgccaagagcgtgaggactccacgcagcggctgcgggggctggagaagcagcaccgcgtggtccggcaggagaaggaggagctgcacaagcaactggttgaagcctcagagcggttgaaatcccaggccaaggaactcaaagatgcccatcagcagcgaaagctggccctgcaggagttctcggagctgaacgagcgcatggcagagctccgtgcccagaagcagaaggtgtcccggcagctgcgagacaaggaggaggagatggaggtggccacgcagaaggtggacgccatgcggcaggaaatgcggagagctgagaagctcaggaaagagctggaagctcagcttgatgatgctgttgctgaggcctccaaggagcgcaagcttcgtgagcacagcgagaacttctgcaagcaaatggaaagcgagctggaggccctcaaggtgaagcaaggaggccggggagcgggtgccaccttagagcaccagcaagagatttccaaaatcaaatccgagctggagaagaaagtcttattttatgaagaggaattggtcagacgtgaggcctcccatgtgctagaagtgaaaaatgtgaagaaggaggtgcatgattcagaaagccaccagctggccctgcagaaagaaatcttgatgttaaaagataagttagaaaagtcaaagcgagaacggcataacgagatggaggaggcagtaggtacaataaaagataaatacgaacgagaaagagcgatgctgtttgatgaaaacaagaagctaactgctgaaaatgaaaagctctgttcctttgtggataaactcacagctcaaaatagacagctggaggatgagctgcaggatctggcagccaagaaggagtcagtggcccactgggaagctcagattgcggaaatcattcagtgggtcagtgacgagaaagatgcccggggttaccttcaagctcttgcttccaagatgaccgaagagctcgaggctttgaggagttctagtctggggtcaagaacactggacccgctgtggaaggtgcgccgcagccagaagctggacatgtccgcgcggctggagctgcagtcggccctggaggcggagatccgggccaagcagcttgtccaggaggagctcaggaaggtcaaggacgccaacctcaccttggaaagcaaactaaaggattccgaagccaaaaacagagaattattagaagaaatggaaattttgaagaaaaagatggaagaaaaattcagagcagatactgggctcaaacttccagattttcaggattccatttttgagtatttcaacactgctcctcttgcacatgacctgacatttagaaccagctcagctagtgagcaagaaacacaagctccgaagccagaagcgtccccgtcgatgtctgtggctgcatcagagcagcaggaggacatggctcggcccccgcagaggccatccgctgtgccgttgcccaccacgcaggccctggctctggctggaccgaagccaaaagctcaccagttcagcatcaagtccttctccagccctactcagtgcagccactgcacctccctgatggttgggctgatccggcagggctacgcctgcgaggtgtgttcctttgcttgccacgtgtcctgcaaagacggtgccccccaggtgtgcccaatacctcccgagcagtccaagaggcctctgggcgtggacgtgcagcgaggcatcggaacagcctacaaaggccatgtcaaggtcccaaagcccacgggggtgaagaagggatggcagcgcgcatatgcagtcgtctgtgactgcaagctcttcctgtatgatctgcctgaaggaaaatccacccagcctggtgtcattgcgagccaagtcttggatctcagagatgacgagttttccgtgagctcagtcctggcctcagatgtcattcatgctacacgccgagatattccatgtatattcagggtgacggcctctctcttaggtgcaccttctaagaccagctcgctgctcattctgacagaaaatgagaatgaaaagaggaagtgggttgggattctagaaggactccagtccatccttcataaaaaccggctgaggaatcaggtcgtgcatgttcccttggaagcctacgacagctcgctgcctctcatcaaggccatcctgacagctgccatcgtggatgcagacaggattgcagtcggcctagaagaagggctctatgtcatagaggtcacccgagatgtgatcgtccgtgccgctgactgtaagaaggtacaccagatcgagcttgctcccagggagaagatcgtaatcctcctctgtggccggaaccaccatgtgcacctctatccgtggtcgtcccttgatggagcggaaggcagctttgacatcaagcttccggaaaccaaaggctgccagctcatggccacggccacactcaagaggaactctggcacctgcctgtttgtggccgtgaaacggctgatcctttgctatgagatccagagaacgaagccattccacagaaagttcaatgagattgtggctcccggcagcgtgcagtgcctggcggtgctcagggacaggctctgtgtgggctacccttctgggttctgcctgctgagcatccagggggacgggcagcctctaaacctggtaaatcccaatgacccctcgcttgcgttcctctcacaacagtcttttgatgccctttgtgctgtggagctcgaaagcgaggagtacctgctttgcttcagccacatgggactgtacgtggacccgcaaggccggagggcacgcgcgcaggagctcatgtggcctgcggctcctgtcgcctgtagttgcagccccacccacgtcacggtgtacagcgagtatggcgtggacgtctttgatgtgcgcaccatggagtgggtgcagaccatcggcctgcggaggataaggcccctgaactctgaaggcaccctcaacctcctcaactgcgagcctccacgcttgatctacttcaagagcaagttctcgggagcggttctcaacgtgccggacacctccgacaacagcaagaagcagatgctgcgcaccaggagcaaaaggcggttcgtcttcaaggtcccagaggaagagagactgcagcagaggcgagagatgcttagagacccagaattgagatccaaaatgatatccaacccaaccaacttcaaccacgtggcccacatgggcccaggcgacggcatgcaggtgctcatggacctgcctctgagtgctgtgcccccctcccaggaggaaaggccgggccccgctcccaccaacctggctcgccagcctccatccaggaacaagccctacatctcgtggccctcatcaggtggatcggagcctagcgtgactgtgcctctgagaagtatgtctgatccagaccaggactttgacaaagagcctgattcggactccaccaaacactcaactccatcgaatagctccaaccccagcggcccaccgagccccaactccccccacaggagccagctccccctcgaaggcctggagcagccggcctgtgacacctgaagccgccagctcgccacaggggccagggagctggagatggcctccagcgtcagtgccaagactgagcgggccctccagtgttgtccaaggaaatgtagaatcactttgtagatatggagatgaagaagacaaatctttattataatattgatcagttttatgccgcattgttcgtggcagtagaccacatctgttcgtctgcacagctgtgaggcgatgctgttccatctgcacatgaaggacccccatacagcctgtctcccacccctgacaacccgagagggcatatggggccctgccaacaccacttcctcagcagaaacccgtcatgacgcggctgcttcggaagcagacatctggggacacagcctcagtacccagtcttttccctagttcctgaaactttcctaggaccttaagagaatagtaggaggtcctatagcattcccagtgtcactagaattttgaagacaggaaagtggaggttagtctgtggcctttttttcatttagccattgcacagtcagctgcagaagtcctgctgaccacctagtcatggacaaaggcccaggaccagtgacaccctgcgtccctgtgtgcattaagttcattctgggtcgcagccatgaagtgtcaccagtatctactactgtgaagtcagctgtgctgttttccattcgcttccacggcttctgcctcctgccataaaaccagcgagtgtcgtggtgcaggcaggccctgtggcctgctgggctgagggaagtcagagccccagggcgccacgaagcagccactgggataccccaccccgccccgccctgcccgccccccccccaccagtcctgcccccgcatggagcccccgtgattagtagcccgtatgatcacgtagacccacccaacacactcctgcacactggccccggcccacggcacagcaatcccctgcgcgtggatttcacctcaccctttgtaccagatgttgagtgaccagctctgtggccctgtgtcgtcagaggcttgtgattaactgtggcggcagacacagcttgtccacagcttgggccaggcttcccctgtcctcccaccggtcggctgcttggcaaggctgttcaggacgtgcacttccccaagtcggcactgagtggcccagcaccgcctagccctgccaccccactgccctcctgggccttctgctggatgggcacctggggggttctggtttttacttttttaatgtaagtctcagtctttgtaattaattattgaattgtgagaacatttttgaacaatttacctgtcaataaagcagaagacggcagttttaaagttcctggggggttctggtttttacttttttaatgtaagtctcagtctttgtaattaattattgaattgtgagac

SEQ ID NO: 331220 - DNA, 3536 bp, Homo sapiens
actccggcaggcacaagagccaggaaggagcactgagctggagctctcttgcatttggggcttgccgcctcccagctctgcgtttctgcaagctgatggccaggagccaagctacgctgaggggctgtgggggcagtgagcgtgccacccacacagagggactgagcggaagacgcacaccgctcccttgtcgtgtggcacagctgtgtcactgctcttctaaacgtggagaaagccccttaaactccaaatggccaaaggctttgcagtccttggtttcacatccgtggcaccttgggtggagttgcttctgtaagccaacagatgagcaggtgaggagcacagcgcggaccccagagctccctgcaggacgcccttagcctcgcttgcatatgccctcagaccgggctgcagaggggcttcccacgcccccatagcacgggttcctaggggtctagggtcattagtgtggagggcagacaggcagggttgttgcccagaggtcagcagtggtttctgtgtggtttttaatacctacctggaaaccggacttgccatctcctacggaagaattagcctcaccatactgaacagtcggcccctacctgaatttccaaagtgttgagcctgaattagtagctttcaggataatcacatctcatgagagctaaatgaaaaaccagactttttaaaagtcaccttcaacatctgtactgtagtattcaaaatattagttacggaagtgattgtggagcatttaaacattggattgtgtttgtttaaactttgaaatgaagatgaattccagagtgggaacatgaagtctttggtgacgtgaaccagctgagggcagtgctgccgcctctgcacttgttcaagtgccaaggcttggcctccggcccgagggcaggtgagttcctgagccactgtggctcaccccgccctgctccgtctgcgctaggttgcagccccacccacgtcacggtgtacagcgagtatggcgtggacgtctttgatgtgcgcaccatggagtgggtgcagaccatcggcctgcggagggtaaggcggcctcggtgccctcctgtgcgggcgggcttctcccggtgcagtctgtgcgtggccgcgcttactgtccctccctggtttccaatccagataaggcccctgaactctgaaggcaccctcaacctcctcaactgcgagcctccacgcttgatctacttcaagagcaagttctcgggagcggttctcaacgtgccggacacctccgacaacagcaagaagcagatgctgcgcaccaggagcaaaaggcggttcgtcttcaaggtcccagaggaagagagactgcagcagaggcgagagatgcttagagacccagaattgagatccaaaatgatatccaacccaaccaacttcaaccacgtggcccacatgggcccaggcgacggcatgcaggtgctcatggacctgcctctgagtgctgtgcccccctcccaggaggaaaggccgggccccgctcccaccaacctggctcgccagcctccatccaggaacaagccctacatctcgtggccctcatcaggtggatcggagcctagcgtgactgtgcctctgagaagtatgtctgatccagaccaggactttgacaaagagcctgattcggactccaccaaacactcaactccatcgaatagctccaaccccagcggcccaccgagccccaactccccccacaggagccagctccccctcgaaggcctggagcagccggcctgtgacacctgaagccgccagctcgccacaggggccagggagctggagatggcctccagcgtcagtgccaagactgagcgggccctccagtgttgtccaaggaaatgtagaatcactttgtagatatggagatgaagaagacaaatctttattataatattgatcagttttatgccgcattgttcgtggcagtagaccacatctgttcgtctgcacagctgtgaggcgatgctgttccatctgcacatgaaggacccccatacagcctgtctcccacccctgacaacccgagagggcatatggggccctgccaacaccacttcctcagcagaaacccgtcatgacgcggctgcttcggaagcagacatctggggacacagcctcagtacccagtcttttccctagttcctgaaactttcctaggaccttaagagaatagtaggaggtcctatagcattcccagtgtcactagaattttgaagacaggaaagtggaggttagtctgtggcctttttttcatttagccattgcacagtcagctgcagaagtcctgctgaccacctagtcatggacaaaggcccaggaccagtgacaccctgcgtccctgtgtgcattaagttcattctgggtcgcagccatgaagtgtcaccagtatctactactgtgaagtcagctgtgctgttttccattcgcttccacggcttctgcctcctgccataaaaccagcgagtgtcgtggtgcaggcaggccctgtggcctgctgggctgagggaagtcagagccccagggcgccacgaagcagccactgggataccccaccccgccccgccctgcccgccccccccccaccagtcctgcccccgcatggagcccccgtgattagtagcccgtatgatcacgtagacccacccaacacactcctgcacactggccccggcccacggcacagcaatcccctgcgcgtggatttcacctcaccctttgtaccagatgttgagtgaccagctctgtggccctgtgtcgtcagaggcttgtgattaactgtggcggcagacacagcttgtccacagcttgggccaggcttcccctgtcctcccaccggtcggctgcttggcaaggctgttcaggacgtgcacttccccaagtcggcactgagtggcccagcaccgcctagccctgccaccccactgccctcctgggccttctgctggatgggcacctggggggttctggtttttacttttttaatgtaagtctcagtctttgtaattaattattgaattgtgagaacatttttgaacaatttacctgtcaataaagcagaagacggcagttttaaagttaaaaaaaaaaaaaaaaacaaaaacaaaaaaaacaacaaaaaaaaacccactctcgcgggcgcatctcttacttgtccgcggtgtgcgggacaaaaagaaagagggtgtacagcgaacaggggcgcgccccgaggggcccccaatgagccgcgtgtgtaccaccgcggaaccccccccagttttttttgctggtggttctacacaagaggagggggggggggataagcaaaaattccggagcggcggcgagggtactcaacacccccccataatattaatgaggggagagaggccctcctcctctcattaatatacaaaagttgcgcccagcaatatgacagccgcgccgggggggttattataaacaccaccctgcggggaagatttgaaagaggagaaaaataacacgggggggacaaa

SEQ ID NO: 331221 - DNA, 2204 bp, Homo sapiens
cggtggttacgtcagtgagggggcgggggttgtaaatagacttgacgggcggtccgatataagatatccaacccaaccaacttcaaccacgtggcccacatgggcccaggcgacggcatgcaggtgctcatggacctgcctctgagtgctgtgcccccctcccaggaggaaaggccgggccccgctcccaccaacctggctcgccagcctccatccaggaacaagccctacatctcgtggccctcatcaggtggatcggagcctagcgtgactgtgcctctgagaagtatgtctgatccagaccaggactttgacaaagagcctgattcggactccaccaaacactcaactccatcgaatagctccaaccccagcggcccaccgagccccaactccccccacaggagccagctccccctcgaaggcctggagcagccggcctgtgacacctgaagccgccagctcgccacaggggccagggagctggagatggcctccagcgtcagtgccaagactgagcgggccctccagtgttgtccaaggaaatgtagaatcactttgtagatatggagatgaagaagacaaatctttattataatattgatcagttttatgccgcattgttcgtggcagtagaccacatctgttcgtctgcacagctgtgaggcgatgctgttccatctgcacatgaaggacccccatacagcctgtctcccacccctgacaacccgagagggcatatggggccctgccaacaccacttcctcagcagaaacccgtcatgacgcggctgcttcggaagcagacatctggggacacagcctcagtacccagtcttttccctagttcctgaaactttcctaggaccttaagagaatagtaggaggtcctatagcattcccagtgtcactagaattttgaagacaggaaagtggaggttagtctgtggcctttttttcatttagccattgcacagtcagctgcagaagtcctgctgaccacctagtcatggacaaaggcccaggaccagtgacaccctgcgtccctgtgtgcattaagttcattctgggtcgcagccatgaagtgtcaccagtatctactactgtgaagtcagctgtgctgttttccattcgcttccacggcttctgcctcctgccataaaaccagcgagtgtcgtggtgcaggcaggccctgtggcctgctgggctgagggaagtcagagccccagggcgccacgaagcagccactgggataccccaccccgccccgccctgcccgccccccccccaccagtcctgcccccgcatggagcccccgtgattagtagcccgtatgatcacgtagacccacccaacacactcctgcacactggccccggcccacggcacagcaatcccctgcgcgtggatttcacctcaccctttgtaccagatgttgagtgaccagctctgtggccctgtgtcgtcagaggcttgtgattaactgtggcggcagacacagcttgtccacagcttgggccaggcttcccctgtcctcccaccggtcggctgcttggcaaggctgttcaggacgtgcacttccccaagtcggcactgagtggcccagcaccgcctagccctgccaccccactgccctcctgggccttctgctggatgggcacctggggggttctggtttttacttttttaatgtaagtctcagtctttgtaattaattattgaattgtgagaacatttttgaacaatttacctgtcaataaagcagaagacggcagttttaaagttaaaaaaaaaaaaaaaaacaaaaacaaaaaaaacaacaaaaaaaaacccactctcgcgggcgcatctcttacttgtccgcggtgtgcgggacaaaaagaaagagggtgtacagcgaacaggggcgcgccccgaggggcccccaatgagccgcgtgtgtaccaccgcggaaccccccccagttttttttgctggtggttctacacaagaggagggggggggggataagcaaaaattccggagcggcggcgagggtactcaacacccccccataatattaatgaggggagagaggccctcctcctctcattaatatacaaaagttgcgcccagcaatatgacagccgcgccgggggggttattataaacaccaccctgcggggaagatttgaaagaggagaaaaataacacgggggggacaaa

SEQ ID NO: 331222 - DNA, 5143 bp, Homo sapiens
ggccgggcttgcgcagcgctaggctcctcgccgctcctagtctgcggcggcggcggcggggagggcgcggccgcgggcggggctgagggcggcgggggcgggccgcccgagctgggagggcggcggcgccgaggggaggagagcggcccatggacccgcggggcccggcgccccagactctgcgccgtcgggacggagcccaagatgtcggcctaggccggggcgcgacgacgcggacggggcggcgaggaggcgccgctgctgccggggctcgcagccgccgagcccccgagggcgcgccctgacggactggccgagccggcggtgagaggccggcgcgtcgggagcgggccgcgcggcaccatgtcggccaaggtgcggctcaagaagctggagcagctgctcctggacgggccctggcgcaacgagagcgccctgagcgtggaaacgctgctcgacgtgctcgtctgcctgtacaccgagtgcagccactcggccctgcgccgcgacaagtacgtggccgagttcctcgagtgggctaaaccatttacacagctggtgaaagaaatgcagcttcatcgagaagactttgaaataattaaagtaattggaagaggtgcttttggtgaggttgctgttgtcaaaatgaagaatactgaacgaatttatgcaatgaaaatcctcaacaagtgggagatgctgaaaagagcagagaccgcgtgcttccgagaggagcgcgatgtgctggtgaacggcgactgccagtggatcaccgcgctgcactacgcctttcaggacgagaaccacctgtacttagtcatggattactatgtgggtggtgatttactgaccctgctcagcaaatttgaagacaagcttccggaagatatggcgaggttctacattggtgaaatggtgctggccattgactccatccatcagcttcattacgtgcacagagacattaaacctgacaatgtccttttggacgtgaatggtcatatccgcctggctgactttggatcatgtttgaagatgaatgatgatggcactgtgcagtcctccgtggccgtgggcacacctgactacatctcgccggagatcctgcaggcgatggaggacggcatgggcaaatacgggcctgagtgtgactggtggtctctgggtgtctgcatgtatgagatgctctatggagaaacgccgttttatgcggagtcactcgtggagacctatgggaagatcatgaaccatgaagagcgattccagttcccatcccatgtcacggatgtatctgaagaagcgaaggacctcatccagagactgatctgcagtagagaacgccggctggggcagaatggaatagaggatttcaaaaagcatgcgttttttgaaggtctaaattgggaaaatatacgaaacctagaagcaccttatattcctgatgtgagcagtccctctgacacatccaacttcgacgtggatgacgacgtgctgagaaacacggaaatattacctcctggttctcacacaggcttttctggattacatttgccattcattggttttacattcacaacggaaagctgtttttctgatcgaggctctctgaagagcataatgcagtccaacacattaaccaaagatgaggatgtgcagcgggacctggagcacagcctgcagatggaagcttacgagaggaggattcggaggctggaacaggagaagctggagctgagcaggaagctgcaagagtccacccagaccgtgcagtccctccacggctcatctcgggccctcagcaattcaaaccgagataaagaaatcaaaaagctaaatgaagaaatcgaacgcttgaagaataaaatagcagattcaaacaggctggagcgacagcttgaggacacagtggcgcttcgccaagagcgtgaggactccacgcagcggctgcgggggctggagaagcagcaccgcgtggtccggcaggagaaggaggagctgcacaagcaactggttgaagcctcagagcggttgaaatcccaggccaaggaactcaaagatgcccatcagcagcgaaagctggccctgcaggagttctcggagctgaacgagcgcatggcagagctccgtgcccagaagcagaaggtgtcccggcagctgcgagacaaggaggaggagatggaggtggccacgcagaaggtggacgccatgcggcaggaaatgcggagagctgagaagctcaggaaagagctggaagctcagcttgatgatgctgttgctgaggcctccaaggagcgcaagcttcgtgagcacagcgagaacttctgcaagcaaatggaaagcgagctggaggccctcaaggtgaagcaaggaggccggggagcgggtgccaccttagagcaccagcaagagatttccaaaatcaaatccgagctggagaagaaagtcttattttatgaagaggaattggtcagacgtgaggcctcccatgtgctagaagtgaaaaatgtgaagaaggaggtgcatgattcagaaagccaccagctggccctgcagaaagaaatcttgatgttaaaagataagttagaaaagtcaaagcgagaacggcataacgagatggaggaggcagtaggtacaataaaagataaatacgaacgagaaagagcgatgctgtttgatgaaaacaagaagctaactgctgaaaatgaaaagctctgttcctttgtggataaactcacagctcaaaatagacagctggaggatgagctgcaggatctggcagccaagaaggagtcagtggcccactgggaagctcagattgcggaaatcattcagtgggtcagtgacgagaaagatgcccggggttaccttcaagctcttgcttccaagatgaccgaagagctcgaggctttgaggagttctagtctggggtcaagaacactggacccgctgtggaaggtgcgccgcagccagaagctggacatgtccgcgcggctggagctgcagtcggccctggaggcggagatccgggccaagcagcttgtccaggaggagctcaggaaggtcaaggacgccaacctcaccttggaaagcaaactaaaggattccgaagccaaaaacagagaattattagaagaaatggaaattttgaagaaaaagatggaagaaaaattcagagcagatactgggctcaaacttccagattttcaggattccatttttgagtatttcaacactgctcctcttgcacatgacctgacatttagaaccagctcagctagtgagcaagaaacacaagctccgaagccagaagcgtccccgtcgatgtctgtggctgcatcagagcagcaggaggacatggctcggcccccgcagaggccatccgctgtgccgttgcccaccacgcaggccctggctctggctggaccgaagccaaaagctcaccagttcagcatcaagtccttctccagccctactcagtgcagccactgcacctccctgatggttgggctgatccggcagggctacgcctgcgaggtgtgttcctttgcttgccacgtgtcctgcaaagacggtgccccccaggtgtgcccaatacctcccgagcagtccaagaggcctctgggcgtggacgtgcagcgaggcatcggaacagcctacaaaggccatgtcaaggtcccaaagcccacgggggtgaagaagggatggcagcgcgcatatgcagtcgtctgtgactgcaagctcttcctgtatgatctgcctgaaggaaaatccacccagcctggtgtcattgcgagccaagtcttggatctcagagatgacgagttttccgtgagctcagtcctggcctcagatgtcattcatgctacacgccgagatattccatgtatattcagggtgacggcctctctcttaggtgcaccttctaagaccagctcgctgctcattctgacagaaaatgagaatgaaaagaggaagtgggttgggattctagaaggactccagtccatccttcataaaaaccggctgaggaatcaggtcgtgcatgttcccttggaagcctacgacagctcgctgcctctcatcaaggccatcctgacagctgccatcgtggatgcagacaggattgcagtcggcctagaagaagggctctatgtcatagaggtcacccgagatgtgatcgtccgtgccgctgactgtaagaaggtacaccagatcgagcttgctcccagggagaagatcgtaatcctcctctgtggccggaaccaccatgtgcacctctatccgtggtcgtcccttgatggagcggaaggcagctttgacatcaagcttccggaaaccaaaggctgccagctcatggccacggccacactcaagaggaactctggcacctgcctgtttgtggccgtgaaacggctgatcctttgctatgagatccagagaacgaagccattccacagaaagttcaatgagattgtggctcccggcagcgtgcagtgcctggcggtgctcagggacaggctctgtgtgggctacccttctgggttctgcctgctgagcatccagggggacgggcagcctctaaacctggtaaatcccaatgacccctcgcttgcgttcctctcacaacagtcttttgatgccctttgtgctgtggagctcgaaagcgaggagtacctgctttgcttcagccacatgggactgtacgtggacccgcaaggccggagggcacgcgcgcaggagctcatgtggcctgcggctcctgtcgcctgtagtatgtatatgttttctgttgcatatccctgttgctgcttttcccaccgacagtcagcatgtgttcgattttgctttggtttgtcttccagtcccttagttgagtagtcacagagcatcgggagaggtgggccccatgccagcccgcagcagagagcatggttcagatctcacgtctcagaccagcagtaggcgggctcagcaacctctctccctgagcacatggggccggttcttccagaggcctcagcagaggaccccgtcggcgggcataggcccctgggcagaagggctcggcgaaccgagaacggggcgtggcattcatctctcatttaaaaggccttcctcgtgataatacagaaacttacacagt

SEQ ID NO: 331223 - DNA, 2244 bp, Homo sapiens
ggccgggcttgcgcagcgctaggctcctcgccgctcctagtctgcggcggcggcggcggggagggcgcggccgcgggcggggctgagggcggcgggggcgggccgcccgagctgggagggcggcggcgccgaggggaggagagcggcccatggacccgcggggcccggcgccccagactctgcgccgtcgggacggagcccaagatgtcggcctaggccggggcgcgacgacgcggacggggcggcgaggaggcgccgctgctgccggggctcgcagccgccgagcccccgagggcgcgccctgacggactggccgagccggcggtgagaggccggcgcgtcgggagcgggccgcgcggcaccatgtcggccaaggtgcggctcaagaagctggagcagctgctcctggacgggccctggcgcaacgagagcgccctgagcgtggaaacgctgctcgacgtgctcgtctgcctgtacaccgagtgcagccactcggccctgcgccgcgacaagtacgtggccgagttcctcgagtgggctaaaccatttacacagctggtgaaagaaatgcagcttcatcgagaagactttgaaataattaaagtaattggaagaggtgcttttggtgaggttgctgttgtcaaaatgaagaatactgaacgaatttatgcaatgaaaatcctcaacaagtgggagatgctgaaaagagcagagaccgcgtgcttccgagaggagcgcgatgtgctggtgaacggcgactgccagtggatcaccgcgctgcactacgcctttcaggacgagaaccacctgtacttagtcatggattactatgtgggtggtgatttactgaccctgctcagcaaatttgaagacaagcttccggaagatatggcgaggttctacattggtgaaatggtgctggccattgactccatccatcagcttcattacgtgcacagagacattaaacctgacaatgtccttttggacgtgaatggtcatatccgcctggctgactttggatcatgtttgaagatgaatgatgatggcactgtgcagtcctccgtggccgtgggcacacctgactacatctcgccggagatcctgcaggcgatggaggacggcatgggcaaatacgggcctgagtgtgactggtggtctctgggtgtctgcatgtatgagatgctctatggagaaacgccgttttatgcggagtcactcgtggagacctatgggaagatcatgaaccatgaagagcgattccagttcccatcccatgtcacggatgtatctgaagaagcgaaggacctcatccagagactgatctgcagtagagaacgccggctggggcagaatggaatagaggatttcaaaaagcatgcgttttttgaaggtctaaattgggaaaatatacgaaacctagaagcaccttatattcctgatgtgagcagtccctctgacacatccaacttcgacgtggatgacgacgtgctgagaaacacggaaatattacctcctggttctcacacaggcttttctggattacatttgccattcattggttttacattcacaacggaaagctgtttttctgatcgaggctctctgaagagcataatgcagtccaacacattaaccaaagatgaggatgtgcagcgggacctggagcacagcctgcagatggaagcttacgagaggaggattcggaggctggaacaggagaagctggagctgagcaggaagctgcaagagtccacccagaccgtgcagtccctccacggctcatctcgggccctcagcaattcaaaccgagataaagaaatcaaaaagctaaatgaagaaatcgaacgcttgaagaataaaatagcagattcaaacaggctggagcgacagcttgaggacacagtggcgcttcgccaagagcgtgaggactccacgcagcggctgcgggggctggagaagcagcaccgcgtggtccggcaggagaaggaggagctgcacaagcaactggttgaagcctcagagcggttgaaatcccaggccaagtcggcactgagtggcccagcaccgcctagccctgccaccccactgccctcctgggccttctgctggatgggcacctggggggttctggtttttacttttttaatgtaagtctcagtctttgtaattaattattgaattgtgagaacatttttgaacaatttacctgtcaataaagcagaagacggcagttttaaagtt

SEQ ID NO: 331224 - DNA, 1393 bp, Homo sapiens
ggccgggcttgcgcagcgctaggctcctcgccgctcctagtctgcggcggcggcggcggggagggcgcggccgcgggcggggctgagggcggcgggggcgggccgcccgagctgggagggcggcggcgccgaggggaggagagcggcccatggacccgcggggcccggcgccccagactctgcgccgtcgggacggagcccaagatgtcggcctaggccggggcgcgacgacgcggacggggcggcgaggaggcgccgctgctgccggggctcgcagccgccgagcccccgagggcgcgccctgacggactggccgagccggcggtgagaggccggcgcgtcgggagcgggccgcgcggcaccatgtcggccaaggtgcggctcaagaagctggagcagctgctcctggacgggccctggcgcaacgagagcgccctgagcgtggaaacgctgctcgacgtgctcgtctgcctgtacaccgagtgcagccactcggccctgcgccgcgacaagtacgtggccgagttcctcgagtgggctaaaccatttacacagctggtgaaagaaatgcagcttcatcgagaagactttgaaataattaaagtaattggaagaggtgcttttggtgaggttgctgttgtcaaaatgaagaatactgaacgaatttatgcaatgaaaatcctcaacaagtgggagatgctgaaaagagcagagaccgcgtgcttccgagaggagcgcgatgtgctggtgaacggcgactgccagtggatcaccgcgctgcactacgcctttcaggacgagaaccacctgtacttagtcatggattactatgtgggtggtgatttactgaccctgctcagcaaatttgaagacaagcttccggaagatatggcgaggttctacattggtgaaatggtgctggccattgactccatccatcagcttcattacgtgcacagagacattaaacctgacaatgtccttttggacgtgaatggtcatatccgcctggctgactttggatcatgtttgaagatgaatgatgatggcactgtgcagtcctccgtggccgtgggcacacctgactacatctcgccggagatcctgcaggcgatggaggacggcatgggcaaatacgggcctgagtgtgactggtggtctctgggtgtctgcatgtatgagatgctctatggagaaacgccgttttatgcggagtcactcgtggagacctatgggaagatcatgaaccatgaagagcgattccagttcccatcccatgtcacggatgtatctgaagaagcgaaggacctcatccagagactgagttgcatccaaagaacaccatacctacagtgaagcatgggggaaacatcatgctttggggctgtttttc

SEQ ID NO: 331225 - DNA, 367 bp, Homo sapiens
gtatgaatttttcattaatctttttaacaaagcacatggttaaaactgattgttctaggcatgtcattgtgctgcggcagccatcagcgcacctccagtgtggccctagggtctcaacctccagcctggctccaggtccttgtgcgtcccgtcctggccaagtagcagcctgtgcccgtctcggggagcctcctggctggcttcttcccagacacccctcttcactgaccctcccttctcctacatctgaaactcctcttccactcagtccacgtcccggccactgtcctcacagcgtgtgcactgccaggcgggcgctgtggcaggttaggcatgaaggtgcctctccagtgccccccagccaatt

SEQ ID NO: 331226 - DNA, 431 bp, Homo sapiens
atttgcatccagctgggcacgcgtgcctccccaggctagggcagcgggtgctcaccctgccctcttcctgttcacagcctgattcggactccaccaaacactcaactccatcgaatagctccaaccccagcggcccaccgagccccaactccccccacaggagccagctccccctcgaaggcctggagcagccggcctgtgacacctgaagccgccagctcgccacaggggccagggagctggagatggcctccagcgtcagtgccaagactgagcgggccctccagtgttgtccaaggaaatgtagaatcactttgtagatatggagatgaagaagacaaatctttattataatattgatcagttttatgccgcattgttcgtggcagtagaccacatctgttcgtctgcacagctgtgaggcgatgctg

SEQ ID NO: 331227 - DNA, 430 bp, Homo sapiens
tgcggacagtacagttggccccggctaagcctgagggtcagctccaggagccccacacacacccaaatccttgcagactcaatcccacagtcagccggccctgtggagttcgtgtagagagaaagtcacccccgatactgaagtgtcacatccctggaatgctgtattctcatccacatatggttgaaaagtatctgtgaatgagcccacccacgcattcaaacccatattgttcacggtcggctgtactgactttgtgtatgttacttacccctccacagatgcagacaggattgcagtcggcctagaagaagggctctatgtcatagaggtcacccgagatggtgagtgagcagggcgtttccagcctgggatgtcacaggcccagcctggcctctgcagacagcacagggtcagtagctcctaaggg

SEQ ID NO: 331228 - DNA, 414 bp, Homo sapiens
cctgcacactggccccggcccacggcacagcaatcccctgcgcgtggatttcacctcaccctttgtaccagatgttgagtgaccagctctgtggccctgtgtcgtcagaggcttgtgattaactgtggcggcagacacagcttgtccacagcttgggccaggcttcccctgtcctcccaccggtcggctgcttggcaaggctgttcaggacgtgcacttccccaagtcggcactgagtggcccagcaccgcctagccctgccaccccactgccctcctgggccttctgctggatgggcacctggggggttctggtttttacttttttaatgtaagtctcagtctttgtaattaattattgaattgtgagaacatttttgaacaatttacctgtcaataaagcagaagacggcag

SEQ ID NO: 331229 - DNA, 613 bp, Homo sapiens
  misc_feature (577)..(577): n is a, c, g, or t
ctgttctagaggatccctttttatagcacgctggagtgggtgcagaccatcggctgcggaggataaggcccctgaactctgaaggcaccctcaacctcctcaactgcgagcctccacgcttgatctacttcaagagcaagttctcgggagcggttctcaacgtgccggacacctccgacaacagcaagaagcagatgctgcgcaccaggagcaaaaggcggttcgtcttcaaggtcccagaggaagagagactgcagcagaggcgagagatgcttagagacccagaattgagatccaaaatgatatccaacccaaccaacttcaaccacgtggcccacatgggcccaggcgacggcatgcaggtgctcatggacctgcctctgagtgctgtgcccccctcccaggaggaaaggccgggccccgctcccaccaacctggctcgccagcctccatccaggaacaagccctacatctcgtggccctcatcaggtggatcggagcctagcgtgactgtgcctctgagaagtatgtctgatccagaccaggactttgacaaagagcctgattcggactccancaaacactcaactccagacgatgctgatgggtaccg

SEQ ID NO: 331230 - DNA, 5182 bp, Homo sapiens
ctaccttgtctcgcctctaccctgtctcggctctacccttgtctctcggctctaccttgtctctcggctctaccgtgtcccggcagctgcgagacaaggaggaggagatggaggtggccacgcagaaggtggacgccatgcggcaggaaatgcggagagctgagaagctcaggaaagagctggaagctcagcttgatgatgctgttgctgaggcctccaaggagcgcaagcttcgtgagcacagcgagaacttctgcaagcaaatggaaagcgagctggaggccctcaaggtgaagcaaggaggccggggagcgggtgccaccttagagcaccagcaagagatttccaaaatcaaatccgagctggagaagaaagtcttattttatgaagaggaattggtcagacgtgaggcctcccatgtgctagaagtgaaaaatgtgaagaaggaggtgcatgattcagaaagccaccagctggccctgcagaaagaaatcttgatgttaaaagataagttagaaaagtcaaagcgagaacggcataacgagatggaggaggcagtaggtacaataaaagataaatacgaacgagaaagagcgatgctgtttgatgaaaacaagaagctaactgctgaaaatgaaaagctctgttcctttgtggataaactcacagctcaaaatagacagctggaggatgagctgcaggatctggcagccaagaaggagtcagtggcccactgggaagctcagattgcggaaatcattcagtgggtcagtgacgagaaagatgcccggggttaccttcaagctcttgcttccaagatgaccgaagagctcgaggctttgaggagttctagtctggggtcaagaacactggacccgctgtggaaggtgcgccgcagccagaagctggacatgtccgcgcggctggagctgcagtcggccctggaggcggagatccgggccaagcagcttgtccaggaggagctcaggaaggtcaaggacgccaacctcaccttggaaagcaaactaaaggattccgaagccaaaaacagagaattattagaagaaatggaaattttgaagaaaaagatggaagaaaaattcagagcagatactgggctcaaacttccagattttcaggattccatttttgagtatttcaacactgctcctcttgcacatgacctgacatttagaaccagctcagctagtgagcaagaaacacaagctccgaagccagaagcgtccccgtcgatgtctgtggctgcatcagagcagcaggaggacatggctcggcccccgcagaggccatccgctgtgccgttgcccaccacgcaggccctggctctggctggaccgaagccaaaagctcaccagttcagcatcaagtccttctccagccctactcagtgcagccactgcacctccctgatggttgggctgatccggcagggctacgcctgcgaggtgtgttcctttgcttgccacgtgtcctgcaaagacggtgccccccaggtgtgcccaatacctcccgagcagtccaagaggcctctgggcgtggacgtgcagcgaggcatcggaacagcctacaaaggccatgtcaaggtcccaaagcccacgggggtgaagaagggatggcagcgcgcatatgcagtcgtctgtgactgcaagctcttcctgtatgatctgcctgaaggaaaatccacccagcctggtgtcattgcgagccaagtcttggatctcagagatgacgagttttccgtgagctcagtcctggcctcagatgtcattcatgctacacgccgagatattccatgtatattcagggtgacggcctctctcttaggtgcaccttctaagaccagctcgctgctcattctgacagaaaatgagaatgaaaagaggaagtgggttgggattctagaaggactccagtccatccttcataaaaaccggctgaggaatcaggtcgtgcatgttcccttggaagcctacgacagctcgctgcctctcatcaaggccatcctgacagctgccatcgtggatgcagacaggattgcagtcggcctagaagaagggctctatgtcatagaggtcacccgagatgtgatcgtccgtgccgctgactgtaagaaggtacaccagatcgagcttgctcccagggagaagatcgtaatcctcctctgtggccggaaccaccatgtgcacctctatccgtggtcgtcccttgatggagcggaaggcagctttgacatcaagcttccggaaaccaaaggctgccagctcatggccacggccacactcaagaggaactctggcacctgcctgtttgtggccgtgaaacggctgatcctttgctatgagatccagagaacgaagccattccacagaaagttcaatgagattgtggctcccggcagcgtgcagtgcctggcggtgctcagggacaggctctgtgtgggctacccttctgggttctgcctgctgagcatccagggggacgggcagcctctaaacctggtaaatcccaatgacccctcgcttgcgttcctctcacaacagtcttttgatgccctttgtgctgtggagctcgaaagcgaggagtacctgctttgcttcagccacatgggactgtacgtggacccgcaaggccggagggcacgcgcgcaggagctcatgtggcctgcggctcctgtcgcctgtagttgcagccccacccacgtcacggtgtacagcgagtatggcgtggacgtctttgatgtgcgcaccatggagtgggtgcagaccatcggcctgcggaggataaggcccctgaactctgaaggcaccctcaacctcctcaactgcgagcctccacgcttgatctacttcaagagcaagttctcgggagcggttctcaacgtgccggacacctccgacaacagcaagaagcagatgctgcgcaccaggagcaaaaggcggttcgtcttcaaggtcccagaggaagagagactgcagcagaggcgagagatgcttagagacccagaattgagatccaaaatgatatccaacccaaccaacttcaaccacgtggcccacatgggcccaggcgacggcatgcaggtgctcatggacctgcctctgagtgctgtgcccccctcccaggaggaaaggccgggccccgctcccaccaacctggctcgccagcctccatccaggaacaagccctacatctcgtggccctcatcaggtggatcggagcctagcgtgactgtgcctctgagaagtatgtctgatccagaccaggactttgacaaagagcctgattcggactccaccaaacactcaactccatcgaatagctccaaccccagcggcccaccgagccccaactccccccacaggagccagctccccctcgaaggcctggagcagccggcctgtgacacctgaagccgccagctcgccacaggggccagggagctggagatggcctccagcgtcagtgccaagactgagcgggccctccagtgttgtccaaggaaatgtagaatcactttgtagatatggagatgaagaagacaaatctttattataatattgatcagttttatgccgcattgttcgtggcagtagaccacatctgttcgtctgcacagctgtgaggcgatgctgttccatctgcacatgaaggacccccatacagcctgtctcccacccctgacaacccgagagggcatatggggccctgccaacaccacttcctcagcagaaacccgtcatgacgcggctgcttcggaagcagacatctggggacacagcctcagtacccagtcttttccctagttcctgaaactttcctaggaccttaagagaatagtaggaggtcctatagcattcccagtgtcactagaattttgaagacaggaaagtggaggttagtctgtggcctttttttcatttagccattgcacagtcagctgcagaagtcctgctgaccacctagtcatggacaaaggcccaggaccagtgacaccctgcgtccctgtgtgcattaagttcattctgggtcgcagccatgaagtgtcaccagtatctactactgtgaagtcagctgtgctgttttccattcgcttccacggcttctgcctcctgccataaaaccagcgagtgtcgtggtgcaggcaggccctgtggcctgctgggctgagggaagtcagagccccagggcgccacgaagcagccactgggataccccaccccgccccgccctgcccgccccccccccaccagtcctgcccccgcatggagcccccgtgattagtagcccgtatgatcacgtagacccacccaacacactcctgcacactggccccggcccacggcacagcaatcccctgcgcgtggatttcacctcaccctttgtaccagatgttgagtgaccagctctgtggccctgtgtcgtcagaggcttgtgattaactgtggcggcagacacagcttgtccacagcttgggccaggcttcccctgtcctcccaccggtcggctgcttggcaaggctgttcaggacgtgcacttccccaagtcggcactgagtggcccagcaccgcctagccctgccaccccactgccctcctgggccttctgctggatgggcacctggggggttctggtttttacttttttaatgtaagtctcagtctttgtaattaattattgaattgtgagaacatttttgaacaatttacctgtcaataaagcagaagacggcagttttaaagttaaaaaaaaaaaaaaaaacaaaaacaaaaaaaacaacaaaaaaaaacccactctcgcgggcgcatctcttacttgtccgcggtgtgcgggacaaaaagaaagagggtgtacagcgaacaggggcgcgccccgaggggcccccaatgagccgcgtgtgtaccaccgcggaaccccccccagttttttttgctggtggttctacacaagaggagggggggggggataagcaaaaattccggagcggcggcgagggtactcaacacccccccataatattaatgaggggagagaggccctcctcctctcattaatatacaaaagttgcgcccagcaatatgacagccgcgccgggggggttattataaacaccaccctgcggggaagatttgaaagaggagaaaaataacacgggggggacaaa

SEQ ID NO: 331231 - DNA, 3440 bp, Homo sapiens
actccggcaggcacaagagccaggaaggagcactgagctggagctctcttgcatttggggcttgccgcctcccagctctgcgtttctgcaagctgatggccaggagccaagctacgctgaggggctgtgggggcagtgagcgtgccacccacacagagggactgagcggaagacgcacaccgctcccttgtcgtgtggcacagctgtgtcactgctcttctaaacgtggagaaagccccttaaactccaaatggccaaaggctttgcagtccttggtttcacatccgtggcaccttgggtggagttgcttctgtaagccaacagatgagcaggtgaggagcacagcgcggaccccagagctccctgcaggacgcccttagcctcgcttgcatatgccctcagaccgggctgcagaggggcttcccacgcccccatagcacgggttcctaggggtctagggtcattagtgtggagggcagacaggcagggttgttgcccagaggtcagcagtggtttctgtgtggtttttaatacctacctggaaaccggacttgccatctcctacggaagaattagcctcaccatactgaacagtcggcccctacctgaatttccaaagtgttgagcctgaattagtagctttcaggataatcacatctcatgagagctaaatgaaaaaccagactttttaaaagtcaccttcaacatctgtactgtagtattcaaaatattagttacggaagtgattgtggagcatttaaacattggattgtgtttgtttaaactttgaaatgaagatgaattccagagtgggaacatgaagtctttggtgacgtgaaccagctgagggcagtgctgccgcctctgcacttgttcaagtgccaaggcttggcctccggcccgagggcaggtgagttcctgagccactgtggctcaccccgccctgctccgtctgcgctaggttgcagccccacccacgtcacggtgtacagcgagtatggcgtggacgtctttgatgtgcgcaccatggagtgggtgcagaccatcggcctgcggaggataaggcccctgaactctgaaggcaccctcaacctcctcaactgcgagcctccacgcttgatctacttcaagagcaagttctcgggagcggttctcaacgtgccggacacctccgacaacagcaagaagcagatgctgcgcaccaggagcaaaaggcggttcgtcttcaaggtcccagaggaagagagactgcagcagaggcgagagatgcttagagacccagaattgagatccaaaatgatatccaacccaaccaacttcaaccacgtggcccacatgggcccaggcgacggcatgcaggtgctcatggacctgcctctgagtgctgtgcccccctcccaggaggaaaggccgggccccgctcccaccaacctggctcgccagcctccatccaggaacaagccctacatctcgtggccctcatcaggtggatcggagcctagcgtgactgtgcctctgagaagtatgtctgatccagaccaggactttgacaaagagcctgattcggactccaccaaacactcaactccatcgaatagctccaaccccagcggcccaccgagccccaactccccccacaggagccagctccccctcgaaggcctggagcagccggcctgtgacacctgaagccgccagctcgccacaggggccagggagctggagatggcctccagcgtcagtgccaagactgagcgggccctccagtgttgtccaaggaaatgtagaatcactttgtagatatggagatgaagaagacaaatctttattataatattgatcagttttatgccgcattgttcgtggcagtagaccacatctgttcgtctgcacagctgtgaggcgatgctgttccatctgcacatgaaggacccccatacagcctgtctcccacccctgacaacccgagagggcatatggggccctgccaacaccacttcctcagcagaaacccgtcatgacgcggctgcttcggaagcagacatctggggacacagcctcagtacccagtcttttccctagttcctgaaactttcctaggaccttaagagaatagtaggaggtcctatagcattcccagtgtcactagaattttgaagacaggaaagtggaggttagtctgtggcctttttttcatttagccattgcacagtcagctgcagaagtcctgctgaccacctagtcatggacaaaggcccaggaccagtgacaccctgcgtccctgtgtgcattaagttcattctgggtcgcagccatgaagtgtcaccagtatctactactgtgaagtcagctgtgctgttttccattcgcttccacggcttctgcctcctgccataaaaccagcgagtgtcgtggtgcaggcaggccctgtggcctgctgggctgagggaagtcagagccccagggcgccacgaagcagccactgggataccccaccccgccccgccctgcccgccccccccccaccagtcctgcccccgcatggagcccccgtgattagtagcccgtatgatcacgtagacccacccaacacactcctgcacactggccccggcccacggcacagcaatcccctgcgcgtggatttcacctcaccctttgtaccagatgttgagtgaccagctctgtggccctgtgtcgtcagaggcttgtgattaactgtggcggcagacacagcttgtccacagcttgggccaggcttcccctgtcctcccaccggtcggctgcttggcaaggctgttcaggacgtgcacttccccaagtcggcactgagtggcccagcaccgcctagccctgccaccccactgccctcctgggccttctgctggatgggcacctggggggttctggtttttacttttttaatgtaagtctcagtctttgtaattaattattgaattgtgagaacatttttgaacaatttacctgtcaataaagcagaagacggcagttttaaagttaaaaaaaaaaaaaaaaacaaaaacaaaaaaaacaacaaaaaaaaacccactctcgcgggcgcatctcttacttgtccgcggtgtgcgggacaaaaagaaagagggtgtacagcgaacaggggcgcgccccgaggggcccccaatgagccgcgtgtgtaccaccgcggaaccccccccagttttttttgctggtggttctacacaagaggagggggggggggataagcaaaaattccggagcggcggcgagggtactcaacacccccccataatattaatgaggggagagaggccctcctcctctcattaatatacaaaagttgcgcccagcaatatgacagccgcgccgggggggttattataaacaccaccctgcggggaagatttgaaagaggagaaaaataacacgggggggacaaa

SEQ ID NO: 331232 - DNA, 2150 bp, Homo sapiens
ggcctggtggcgaattcggcacgaggcttcaaccacgtggcccacatgggcccaggcgacggcatgcaggtgctcatggacctgcctctgagtgctgtgcccccctcccaggaggaaaggccgggccccgctcccaccaacctggctcgccagcctccatccaggaacaagccctacatctcgtggccctcatcaggtggatcggagcctagcgtgactgtgcctctgagaagtatgtctgatccagaccaggactttgacaaagagcctgattcggactccaccaaacactcaactccatcgaatagctccaaccccagcggcccaccgagccccaactccccccacaggagccagctccccctcgaaggcctggagcagccggcctgtgacacctgaagccgccagctcgccacaggggccagggagctggagatggcctccagcgtcagtgccaagactgagcgggccctccagtgttgtccaaggaaatgtagaatcactttgtagatatggagatgaagaagacaaatctttattataatattgatcagttttatgccgcattgttcgtggcagtagaccacatctgttcgtctgcacagctgtgaggcgatgctgttccatctgcacatgaaggacccccatacagcctgtctcccacccctgacaacccgagagggcatatggggccctgccaacaccacttcctcagcagaaacccgtcatgacgcggctgcttcggaagcagacatctggggacacagcctcagtacccagtcttttccctagttcctgaaactttcctaggaccttaagagaatagtaggaggtcctatagcattcccagtgtcactagaattttgaagacaggaaagtggaggttagtctgtggcctttttttcatttagccattgcacagtcagctgcagaagtcctgctgaccacctagtcatggacaaaggcccaggaccagtgacaccctgcgtccctgtgtgcattaagttcattctgggtcgcagccatgaagtgtcaccagtatctactactgtgaagtcagctgtgctgttttccattcgcttccacggcttctgcctcctgccataaaaccagcgagtgtcgtggtgcaggcaggccctgtggcctgctgggctgagggaagtcagagccccagggcgccacgaagcagccactgggataccccaccccgccccgccctgcccgccccccccccaccagtcctgcccccgcatggagcccccgtgattagtagcccgtatgatcacgtagacccacccaacacactcctgcacactggccccggcccacggcacagcaatcccctgcgcgtggatttcacctcaccctttgtaccagatgttgagtgaccagctctgtggccctgtgtcgtcagaggcttgtgattaactgtggcggcagacacagcttgtccacagcttgggccaggcttcccctgtcctcccaccggtcggctgcttggcaaggctgttcaggacgtgcacttccccaagtcggcactgagtggcccagcaccgcctagccctgccaccccactgccctcctgggccttctgctggatgggcacctggggggttctggtttttacttttttaatgtaagtctcagtctttgtaattaattattgaattgtgagaacatttttgaacaatttacctgtcaataaagcagaagacggcagttttaaagttaaaaaaaaaaaaaaaaacaaaaacaaaaaaaacaacaaaaaaaaacccactctcgcgggcgcatctcttacttgtccgcggtgtgcgggacaaaaagaaagagggtgtacagcgaacaggggcgcgccccgaggggcccccaatgagccgcgtgtgtaccaccgcggaaccccccccagttttttttgctggtggttctacacaagaggagggggggggggataagcaaaaattccggagcggcggcgagggtactcaacacccccccataatattaatgaggggagagaggccctcctcctctcattaatatacaaaagttgcgcccagcaatatgacagccgcgccgggggggttattataaacaccaccctgcggggaagatttgaaagaggagaaaaataacacgggggggacaaa

SEQ ID NO: 331233 - DNA, 6317 bp, Homo sapiens
ggccgggcttgcgcagcgctaggctcctcgccgctcctagtctgcggcggcggcggcggggagggcgcggccgcgggcggggctgagggcggcgggggcgggccgcccgagctgggagggcggcggcgccgaggggaggagagcggcccatggacccgcggggcccggcgccccagactctgcgccgtcgggacggagcccaagatgtcggcctaggccggggcgcgacgacgcggacggggcggcgaggaggcgccgctgctgccggggctcgcagccgccgagcccccgagggcgcgccctgacggactggccgagccggcggtgagaggccggcgcgtcgggagcgggccgcgcggcaccatgtcggccaaggtgcggctcaagaagctggagcagctgctcctggacgggccctggcgcaacgagagcgccctgagcgtggaaacgctgctcgacgtgctcgtctgcctgtacaccgagtgcagccactcggccctgcgccgcgacaagtacgtggccgagttcctcgagtgggctaaaccatttacacagctggtgaaagaaatgcagcttcatcgagaagactttgaaataattaaagtaattggaagaggtgcttttggtgaggttgctgttgtcaaaatgaagaatactgaacgaatttatgcaatgaaaatcctcaacaagtgggagatgctgaaaagagcagagaccgcgtgcttccgagaggagcgcgatgtgctggtgaacggcgactgccagtggatcaccgcgctgcactacgcctttcaggacgagaaccacctgtacttagtcatggattactatgtgggtggtgatttactgaccctgctcagcaaatttgaagacaagcttccggaagatatggcgaggttctacattggtgaaatggtgctggccattgactccatccatcagcttcattacgtgcacagagacattaaacctgacaatgtccttttggacgtgaatggtcatatccgcctggctgactttggatcatgtttgaagatgaatgatgatggcactgtgcagtcctccgtggccgtgggcacacctgactacatctcgccggagatcctgcaggcgatggaggacggcatgggcaaatacgggcctgagtgtgactggtggtctctgggtgtctgcatgtatgagatgctctatggagaaacgccgttttatgcggagtcactcgtggagacctatgggaagatcatgaaccatgaagagcgattccagttcccatcccatgtcacggatgtatctgaagaagcgaaggacctcatccagagactgatctgcagtagagaacgccggctggggcagaatggaatagaggatttcaaaaagcatgcgttttttgaaggtctaaattgggaaaatatacgaaacctagaagcaccttatattcctgatgtgagcagtccctctgacacatccaacttcgacgtggatgacgacgtgctgagaaacacggaaatattacctcctggttctcacacaggcttttctggattacatttgccattcattggttttacattcacaacggaaagctgtttttctgatcgaggctctctgaagagcataatgcagtccaacacattaaccaaagatgaggatgtgcagcgggacctggagcacagcctgcagatggaagcttacgagaggaggattcggaggctggaacaggagaagctggagctgagcaggaagctgcaagagtccacccagaccgtgcagtccctccacggctcatctcgggccctcagcaattcaaaccgagataaagaaatcaaaaagctaaatgaagaaatcgaacgcttgaagaataaaatagcagattcaaacaggctggagcgacagcttgaggacacagtggcgcttcgccaagagcgtgaggactccacgcagcggctgcgggggctggagaagcagcaccgcgtggtccggcaggagaaggaggagctgcacaagcaactggttgaagcctcagagcggttgaaatcccaggccaaggaactcaaagatgcccatcagcagcgaaagctggccctgcaggagttctcggagctgaacgagcgcatggcagagctccgtgcccagaagcagaaggtgtcccggcagctgcgagacaaggaggaggagatggaggtggccacgcagaaggtggacgccatgcggcaggaaatgcggagagctgagaagctcaggaaagagctggaagctcagcttgatgatgctgttgctgaggcctccaaggagcgcaagcttcgtgagcacagcgagaacttctgcaagcaaatggaaagcgagctggaggccctcaaggtgaagcaaggaggccggggagcgggtgccaccttagagcaccagcaagagatttccaaaatcaaatccgagctggagaagaaagtcttattttatgaagaggaattggtcagacgtgaggcctcccatgtgctagaagtgaaaaatgtgaagaaggaggtgcatgattcagaaagccaccagctggccctgcagaaagaaatcttgatgttaaaagataagttagaaaagtcaaagcgagaacggcataacgagatggaggaggcagtaggtacaataaaagataaatacgaacgagaaagagcgatgctgtttgatgaaaacaagaagctaactgctgaaaatgaaaagctctgttcctttgtggataaactcacagctcaaaatagacagctggaggatgagctgcaggatctggcagccaagaaggagtcagtggcccactgggaagctcagattgcggaaatcattcagtgggtcagtgacgagaaagatgcccggggttaccttcaagctcttgcttccaagatgaccgaagagctcgaggctttgaggagttctagtctggggtcaagaacactggacccgctgtggaaggtgcgccgcagccagaagctggacatgtccgcgcggctggagctgcagtcggccctggaggcggagatccgggccaagcagcttgtccaggaggagctcaggaaggtcaaggacgccaacctcaccttggaaagcaaactaaaggattccgaagccaaaaacagagaattattagaagaaatggaaattttgaagaaaaagatggaagaaaaattcagagcagatactgggctcaaacttccagattttcaggattccatttttgagtatttcaacactgctcctcttgcacatgacctgacatttagaaccagctcagctagtgagcaagaaacacaagctccgaagccagaagcgtccccgtcgatgtctgtggctgcatcagagcagcaggaggacatggctcggcccccgcagaggccatccgctgtgccgttgcccaccacgcaggccctggctctggctggaccgaagccaaaagctcaccagttcagcatcaagtccttctccagccctactcagtgcagccactgcacctccctgatggttgggctgatccggcagggctacgcctgcgaggtgtgttcctttgcttgccacgtgtcctgcaaagacggtgccccccaggtgtgcccaatacctcccgagcagtccaagaggcctctgggcgtggacgtgcagcgaggcatcggaacagcctacaaaggccatgtcaaggtcccaaagcccacgggggtgaagaagggatggcagcgcgcatatgcagtcgtctgtgactgcaagctcttcctgtatgatctgcctgaaggaaaatccacccagcctggtgtcattgcgagccaagtcttggatctcagagatgacgagttttccgtgagctcagtcctggcctcagatgtcattcatgctacacgccgagatattccatgtatattcagggtgacggcctctctcttaggtgcaccttctaagaccagctcgctgctcattctgacagaaaatgagaatgaaaagaggaagtgggttgggattctagaaggactccagtccatccttcataaaaaccggctgaggaatcaggtcgtgcatgttcccttggaagcctacgacagctcgctgcctctcatcaaggccatcctgacagctgccatcgtggatgcagacaggattgcagtcggcctagaagaagggctctatgtcatagaggtcacccgagatgtgatcgtccgtgccgctgactgtaagaaggtacaccagatcgagcttgctcccagggagaagatcgtaatcctcctctgtggccggaaccaccatgtgcacctctatccgtggtcgtcccttgatggagcggaaggcagctttgacatcaagcttccggaaaccaaaggctgccagctcatggccacggccacactcaagaggaactctggcacctgcctgtttgtggccgtgaaacggctgatcctttgctatgagatccagagaacgaagccattccacagaaagttcaatgagattgtggctcccggcagcgtgcagtgcctggcggtgctcagggacaggctctgtgtgggctacccttctgggttctgcctgctgagcatccagggggacgggcagcctctaaacctggtaaatcccaatgacccctcgcttgcgttcctctcacaacagtcttttgatgccctttgtgctgtggagctcgaaagcgaggagtacctgctttgcttcagccacatgggactgtacgtggacccgcaaggccggagggcacgcgcgcaggagctcatgtggcctgcggctcctgtcgcctgtagttgcagccccacccacgtcacggtgtacagcgagtatggcgtggacgtctttgatgtgcgcaccatggagtgggtgcagaccatcggcctgcggaggataaggcccctgaactctgaaggcaccctcaacctcctcaactgcgagcctccacgcttgatctacttcaagagcaagttctcgggagcggttctcaacgtgccggacacctccgacaacagcaagaagcagatgctgcgcaccaggagcaaaaggcggttcgtcttcaaggtcccagaggaagagagactgcagcagaggcgagagatgcttagagacccagaattgagatccaaaatgatatccaacccaaccaacttcaaccacgtggcccacatgggcccaggcgacggcatgcaggtgctcatggacctgcctctgagtgctgtgcccccctcccaggaggaaaggccgggccccgctcccaccaacctggctcgccagcctccatccaggaacaagccctacatctcgtggccctcatcaggtggatcggagcctagcgtgactgtgcctctgagaagtatgtctgatccagaccaggactttgacaaagagcctgattcggactccaccaaacactcaactccatcgaatagctccaaccccagcggcccaccgagccccaactccccccacaggagccagctccccctcgaaggcctggagcagccggcctgtgacacctgaagccgccagctcgccacaggggccagggagctggagatggcctccagcgtcagtgccaagactgagcgggccctccagtgttgtccaaggaaatgtagaatcactttgtagatatggagatgaagaagacaaatctttattataatattgatcagttttatgccgcattgttcgtggcagtagaccacatctgttcgtctgcacagctgtgaggcgatgctgttccatctgcacatgaaggacccccatacagcctgtctcccacccctgacaacccgagagggcatatggggccctgccaacaccacttcctcagcagaaacccgtcatgacgcggctgcttcggaagcagacatctggggacacagcctcagtacccagtcttttccctagttcctgaaactttcctaggaccttaagagaatagtaggaggtcctatagcattcccagtgtcactagaattttgaagacaggaaagtggaggttagtctgtgtcgtcagaggcttgtgattaactgtggcggcagacacagcttgtccacagcttgggccaggcttcccctgtcctcccaccggtcggctgcttggcaaggctgttcaggacgtgcacttccccaagtcggcactgagtggcccagcaccgcctagccctgccaccccactgccctcctgggccttctgctggatgggcacctggggggttctggtttttacttttttaatgtaagtctcagtctttgtaattaattattgaattgtgagaacatttttgaacaatttacctgtcaataaagcagaagacggcagttttaaagtt

SEQ ID NO: 331234 - DNA, 1244 bp, Homo sapiens
ggccgggcttgcgcagcgctaggctcctcgccgctcctagtctgcggcggcggcggcggggagggcgcggccgcgggcggggctgagggcggcgggggcgggccgcccgagctgggagggcggcggcgccgaggggaggagagcggcccatggacccgcggggcccggcgccccagactctgcgccgtcgggacggagcccaagatgtcggcctaggccggggcgcgacgacgcggacggggcggcgaggaggcgccgctgctgccggggctcgcagccgccgagcccccgagggcgcgccctgacggactggccgagccggcggtgagaggccggcgcgtcgggagcgggccgcgcggcaccatgtcggccaaggtgcggctcaagaagctggagcagctgctcctggacgggccctggcgcaacgagagcgccctgagcgtggaaacgctgctcgacgtgctcgtctgcctgtacaccgagtgcagccactcggccctgcgccgcgacaagtacgtggccgagttcctcgagtgggctaaaccatttacacagctggtgaaagaaatgcagcttcatcgagaagactttgaaataattaaagtaattggaagaggtgcttttggtgaggttgctgttgtcaaaatgaagaatactgaacgaatttatgcaatgaaaatcctcaacaagtgggagatgctgaaaagagcagagaccgcgtgcttccgagaggagcgcgatgtgctggtgaacggcgactgccagtggatcaccgcgctgcactacgcctttcaggacgagaaccacctgtacttagtcatggattactatgtgggtggtgatttactgaccctgctcagcaaatttgaagacaagcttccggaagatatggcgaggttctacattggtgaaatggtgctggccattgactccatccatcagcttcattacgtgcacagagacattaaacctgacaatgtccttttggacgtgaatggtcatatccgcctggctgactttggatcatgtttgaagatgaatgatgatggcactgtaggtatttttgttggagattttccatttggttttgggtttggcatatagtcagaagggaagttttcaatttgaggtacaattaagaaaccaagtatattaattcagaaaatgaatccattttggagatagttgaaattttctgtttggggagttttgtttcccaaataaaaattaagttggaaagcatc

SEQ ID NO: 331235 - DNA, 4123 bp, Homo sapiens
cggagaactgaaacaggagatggtgcggacagatgtcaacctggaaaatggcctggaacccgctgaaacccacagcatggtaagacacaaggatggtggctattccgaggaagaggacgtgaagacctgtgcccgggactcaggctatgacagcctctccaacaggctcagcatcttggaccggctcctccacacccaccccatatggctgcagctgagtctgagtgaggaggaggcagcagaggtcctgcaggcccagcctccggggatcttcctggttcataaatctaccaagatgcagaagaaagtcctctccctccgcctgccctgtgaatttggggccccactcaaggaatttgccataaaggaaagcacatacaccttttccctggaaggctcaggaatcagtttcgcagatttattccggctcattgctttctactgcatcagcagggatgttctaccatttaccttgaagttgccttatgccatttcaacagccaagtcggaggctcagcttgaagaactggcccagatgggactaaatttctggagctccccagctgacagcaaacccccgaaccttccacctccccataggcctctttcctccgacggtgtctgtcctgcctccctgcgtcagctctgccttataaatggagtgcattctatcaaaaccaggacgccttcagagctggagtgcagccagaccaacggggccctgtgctttattaatccccttttcttgaaagtgcacagccaggacctcagtggaggcctgaaacggccgagcacaaggactcccaacgcgaatggcacggagcggactcggtcccccccacccaggcccccgccacccgctattaatagtctccacacaagccctcggctggccaggactgaaacccagacgagcatgccagaaacagtcaaccataacaaacatgggaacgtagctctgcctggaacgaaaccaactcccatccctccaccccggctgaagaagcaggcttcttttctggaagcagagggcggtgcaaagaccttgagcggcggccggccgggcgcaggcccggagctggagctgggcacagctggcagcccaggtggggccccgcctgaggccgccccgggggattgcacaagggccccgccgcccagctctgaatcacggcccccgtgccatggaggccggcagcggctgagcgacatgagcatttctacttcctcctccgactcgctggagttcgaccggagcatgcctctgtttggctacgaggcggacaccaacagcagcctggaggactacgagggggaaagtgaccaagagaccatggcgccccccatcaagtccaaaaagaaaaggagcagctccttcgtgctgcccaagctcgtcaagtcccagctgcagaaggtgagcggggtgttcagctccttcatgaccccggagaagcggatggtccgcaggatcgccgagctttcccgggacaaatgcacctacttcgggtgcttagtgcaggactacgtgagcttcctgcaggagaacaaggagtgccacgtgtccagcaccgacatgctgcagaccatccggcagttcatgacccaggtcaagaactatttgtctcagagctcggagctggacccccccatcgagtcgctgatccctgaagaccaaatagatgtggtgctggaaaaagccatgcacaagtgcatcttgaagcccctcaaggggcatgtggaggccatgctgaaggactttcacatggccgatggctcatggaagcaactcaaggagaacctgcagcttgtgcggcagaggaatccgcaggagctgggggtcttcgccccgacccctgattttgtggatgtggagaaaatcaaagtcaagttcatgaccatgcagaagatgtattcgccggaaaagaaggtcatgctgctgctgcgggtctgcaagctcatttacacggtcatggagaacaactcagggaggatgtatggcgctgatgacttcttgccagtcctgacctatgtcatagcccagtgtgacatgcttgaattggacactgaaatcgagtacatgatggagctcctagacccatcgctgttacatggagaaggaggctattacttgacaagcgcatatggagcactttctctgataaagaatttccaagaagaacaagcagcgcgactgctcagctcagaaaccagagacaccctgaggcagtggcacaaacggagaaccaccaaccggaccatcccctctgtggacgacttccagaattacctccgagttgcatttcaggaggtcaacagtggttgcacaggaaagaccctccttgtgagaccttacatcaccactgaggatgtgtgtcagatctgcgctgagaagttcaaggtgggggaccctgaggagtacagcctctttctcttcgttgacgagacatggcagcagctggcagaggacacttaccctcaaaaaatcaaggcggagctgcacagccgaccacagccccacatcttccactttgtctacaaacgcatcaagaacgatccttatggcatcattttccagaacggggaagaagacctcaccacctcctagaagacaggcgggacttcccagtggtgcatccaaaggggagctggaagccttgccttcccgcttctacatgcttgagcttgaaaagcagtcacctcctcggggacccctcagtgtagtgactaagccatccacaggccaactcggccaagggcaactttagccacgcaaggtagctgaggtttgtgaaacagtaggattctcttttggcaatggagaattgcatctgatggttcaagtgtcctgagattgtttgctacctacccccagtcaggttctaggttggcttacaggtatgtatatgtgcagaagaaacacttaagatacaagttcttttgaattcaacagcagatgcttgcgatgcagtgcgtcaggtgattctcactcctgtggatggcttcatccctgccttccttcctttctttttccttttttttttttttttttttttttacaaagagccttcatgtttttatatatttcatagaaatttttatagcagttgcaggtaaactgtcaggattggttttaaaatatttttgtaactttaaaatattctataattatgcatgtgattttaacatttaatattcaaaaataaatctcttgctggatttgagagtattgcatttttaaagtctctcttctgtaactggatgttttggcaactttgtggggagagactgctggatttcttaaagcaacgtattcctgacactggccacagaatgcctttggaaatcggatgtactgttctcttgttcacgtttagtggtgttttgctgttttgttttttaaacaaatgatgctgagaataaggagagaaatgaatgtagagagaggtagagagagaaatatgaactctaacaaaggactgaggagtgcagtctgctggttcaggctcttcaaaagatgtagaaaaagagatagaaggaaccacctatgcttaaaatactgtaaatatgcagtgaggtttggcaaaatctattccatgtgtgatttgcttgtagaaacaattttgaaagccccttgaggaaaataaaaatcaagaagaacacttttctcccttttccatacaaattaaaacttaacagcatcaaattattgggaccagaaaccaagtaatgtataatgtggcttttgttgagttaaataagatgctatataatggagaagaatttgaaaatgcacaaaaaaatcaatctacattatcagaacctgcagtgaaattaaacttatgttaaataaaaccagtttgcaggtgcacaaactatgagggtcttgtatccacgtaacacaggtagttacaaaaacatgttattgtactgtgtaaagatgcatagtcatctcatttggttggctttgtaccttgtaccttttttagccttggcttttgttgaactagaaccctcagcacatactgtgttgtacttttgtaaatgattttttaaatggaattttgcacataatacattgtaatactgtatgataatcatgtgtgaaaataatttttgaaatatc

SEQ ID NO: 331236 - DNA, 2128 bp, Homo sapiens
  misc_feature (731)..(731): n is a, c, g, or t
  misc_feature (1431)..(1431): n is a, c, g, or t
  misc_feature (1448)..(1448): n is a, c, g, or t
aaacaaagcaacttctgctttttcactgttggccacaaacttaaatttctattgtaaatatcctcataagccaagttaaccaatgaaatgccaattcctatggtttagtcatgttacctgtgtttagaatttaggtttcaccaaccaagatatataagacagggctacagaatataactcatataagacaggggctggagaccgtaactccagcagtaaaacagtcactgaactgaaaatgcttatgcagactaggggagttcttagccccatggagaagcttctgtcagagggaaagcaggattcttttggaggcagtaatgaacaaaggtgtctgcagcctgtgctctgagcacccctttctatggcaggagagtttcctgcagggagccatgcagtgtggatatgaagggattctattcattgagtgtgagggaaaccagatgcttgggttccaacattctagatatttcctaaagcttgtatttcttttccctccactagatcttcctggttcataaatctaccaagatgcagaagaaagtcctctccctccgcctgccctgtgaatttggggccccactcaaggaatttgccataaaggaaagcacatacagtaagtggtcattggatgctcaggtcctgactgacagggccacggggctctgcagggagtggaaatggaaggagctctggttatgagatgggcagatatgggcctgagtcttggnactgaatgactaggcagataacctactccaggagcctcagttttctcatctgtgtaatgggatgatggtaacctctgagatgttaatgagtcaaacaacctgaatataaagtgtgcagcctactgcatggcatatggtagggaactaatagaggttgacttcctctccccctacccagttaagtggaacatgaattcagttcccaggtttgccagtgactaagttgcaaggagactgtagcgagagagccctttcacgctaatcctaaatcctaaagcatgtgtctgcacttcttcgtgaataaataatccctgagcagacctgttccctccaggcaatcagtgttcagtcttctatgaaatgcagctaatcagaggcagaatccaaccttttgatgaacattttgaagggagagtggtgttcagaagtgttggttttctttctgctgttccacgattggtcattggaaatgtgaagtgtcgggaggccaaattttaaataaaaaagggaacacccagttctgatgtactgccagcctccaagaaaggatcggaagatggatctgcacatcaaagggggaggagtgggaggagcaggccaggaggagagagctcagaagcaagacagagcctgggattcccacttgcttcccgatttcccagcacctcacctcctgcatttggagaagctgaaggtgtanatgaaggtcaatttcanggccgagatgagattctactcagccgggagggcacaatcttgctgagccaaatgaccattaactgagttaggggagggtaaaacctgccaggctgactgtgaaccgcctccagctcaattgtcaacctggatcttacaagtccacaaggtcatggatgccagggaaaaacttccccctgaaaggcgcacaagcaggcggaacccagccaataatgtaaatacattaggatgcaaccagaaggtacattgcaaacccactgcttgaaaggtaataaattcatattgagctaataatgtgttaggtgaattgataatgaatttatattaagtgaatcaattaagtaattctgaattggcttttgaaagtctgcgagaggctgggcaccatggctcacacctgtaatcctagcactttgggaggccaaggccagagggttgcttgagctcaggaatttgagaccagcctgggcaacatggcaaaactccatctccaccaaaaaaaaaaaaaaaaattagccaggcatgatgacacacgcctgtagtcccagctactaaggaggctgaggtgggatcacttaagtgcagtgagccgtgatcgtgccactgcactccagcctgggcgacagagccagaccgtgtcttaaaaatgaaaaaacaacccaaaaatattaaaaaaaaaa

SEQ ID NO: 331237 - DNA, 3989 bp, Homo sapiens
cggagaactgaaacaggagatggtgcggacagatgtcaacctggaaaatggcctggaacccgctgaaacccacagcatggtaagacacaaggatggtggctattccgaggaagaggacgtgaagacctgtgcccgggactcaggctatgacagcctctccaacaggctcagcatcttggaccggctcctccacacccaccccatatggctgcagctgagtctgagtgaggaggaggcagcagaggtcctgcaggcccagcctccggggatcttcctggttcataaatctaccaagatgcagaagaaagtcctctccctccgcctgccctgtgaatttggggccccactcaaggaatttgccataaaggaaagcacatacaggatgttctaccatttaccttgaagttgccttatgccatttcaacagccaagtcggaggctcagcttgaagaactggcccagatgggactaaatttctggagctccccagctgacagcaaacccccgaaccttccacctccccataggcctctttcctccgacggtgtctgtcctgcctccctgcgtcagctctgccttataaatggagtgcattctatcaaaaccaggacgccttcagagctggagtgcagccagaccaacggggccctgtgctttattaatccccttttcttgaaagtgcacagccaggacctcagtggaggcctgaaacggccgagcacaaggactcccaacgcgaatggcacggagcggactcggtcccccccacccaggcccccgccacccgctattaatagtctccacacaagccctcggctggccaggactgaaacccagacgagcatgccagaaacagtcaaccataacaaacatgggaacgtagctctgcctggaacgaaaccaactcccatccctccaccccggctgaagaagcaggcttcttttctggaagcagagggcggtgcaaagaccttgagcggcggccggccgggcgcaggcccggagctggagctgggcacagctggcagcccaggtggggccccgcctgaggccgccccgggggattgcacaagggccccgccgcccagctctgaatcacggcccccgtgccatggaggccggcagcggctgagcgacatgagcatttctacttcctcctccgactcgctggagttcgaccggagcatgcctctgtttggctacgaggcggacaccaacagcagcctggaggactacgagggggaaagtgaccaagagaccatggcgccccccatcaagtccaaaaagaaaaggagcagctccttcgtgctgcccaagctcgtcaagtcccagctgcagaaggtgagcggggtgttcagctccttcatgaccccggagaagcggatggtccgcaggatcgccgagctttcccgggacaaatgcacctacttcgggtgcttagtgcaggactacgtgagcttcctgcaggagaacaaggagtgccacgtgtccagcaccgacatgctgcagaccatccggcagttcatgacccaggtcaagaactatttgtctcagagctcggagctggacccccccatcgagtcgctgatccctgaagaccaaatagatgtggtgctggaaaaagccatgcacaagtgcatcttgaagcccctcaaggggcatgtggaggccatgctgaaggactttcacatggccgatggctcatggaagcaactcaaggagaacctgcagcttgtgcggcagaggaatccgcaggagctgggggtcttcgccccgacccctgattttgtggatgtggagaaaatcaaagtcaagttcatgaccatgcagaagatgtattcgccggaaaagaaggtcatgctgctgctgcgggtctgcaagctcatttacacggtcatggagaacaactcagggaggatgtatggcgctgatgacttcttgccagtcctgacctatgtcatagcccagtgtgacatgcttgaattggacactgaaatcgagtacatgatggagctcctagacccatcgctgttacatggagaaggaggctattacttgacaagcgcatatggagcactttctctgataaagaatttccaagaagaacaagcagcgcgactgctcagctcagaaaccagagacaccctgaggcagtggcacaaacggagaaccaccaaccggaccatcccctctgtggacgacttccagaattacctccgagttgcatttcaggaggtcaacagtggttgcacaggaaagaccctccttgtgagaccttacatcaccactgaggatgtgtgtcagatctgcgctgagaagttcaaggtgggggaccctgaggagtacagcctctttctcttcgttgacgagacatggcagcagctggcagaggacacttaccctcaaaaaatcaaggcggagctgcacagccgaccacagccccacatcttccactttgtctacaaacgcatcaagaacgatccttatggcatcattttccagaacggggaagaagacctcaccacctcctagaagacaggcgggacttcccagtggtgcatccaaaggggagctggaagccttgccttcccgcttctacatgcttgagcttgaaaagcagtcacctcctcggggacccctcagtgtagtgactaagccatccacaggccaactcggccaagggcaactttagccacgcaaggtagctgaggtttgtgaaacagtaggattctcttttggcaatggagaattgcatctgatggttcaagtgtcctgagattgtttgctacctacccccagtcaggttctaggttggcttacaggtatgtatatgtgcagaagaaacacttaagatacaagttcttttgaattcaacagcagatgcttgcgatgcagtgcgtcaggtgattctcactcctgtggatggcttcatccctgccttccttcctttctttttccttttttttttttttttttttttttacaaagagccttcatgtttttatatatttcatagaaatttttatagcagttgcaggtaaactgtcaggattggttttaaaatatttttgtaactttaaaatattctataattatgcatgtgattttaacatttaatattcaaaaataaatctcttgctggatttgagagtattgcatttttaaagtctctcttctgtaactggatgttttggcaactttgtggggagagactgctggatttcttaaagcaacgtattcctgacactggccacagaatgcctttggaaatcggatgtactgttctcttgttcacgtttagtggtgttttgctgttttgttttttaaacaaatgatgctgagaataaggagagaaatgaatgtagagagaggtagagagagaaatatgaactctaacaaaggactgaggagtgcagtctgctggttcaggctcttcaaaagatgtagaaaaagagatagaaggaaccacctatgcttaaaatactgtaaatatgcagtgaggtttggcaaaatctattccatgtgtgatttgcttgtagaaacaattttgaaagccccttgaggaaaataaaaatcaagaagaacacttttctcccttttccatacaaattaaaacttaacagcatcaaattattgggaccagaaaccaagtaatgtataatgtggcttttgttgagttaaataagatgctatataatggagaagaatttgaaaatgcacaaaaaaatcaatctacattatcagaacctgcagtgaaattaaacttatgttaaataaaaccagtttgcaggtgcacaaactatgagggtcttgtatccacgtaacacaggtagttacaaaaacatgttattgtactgtgtaaagatgcatagtcatctcatttggttggctttgtaccttgtaccttttttagccttggcttttgttgaactagaaccctcagcacatactgtgggcgagtgttgggcataacatcacggatccgcagg

SEQ ID NO: 331238 - DNA, 424 bp, Homo sapiens
gcagatgtccattgtaagaaagcagatgttgcatttcttctttcttcagacaatagtcatagtagctacactttctttggcagatgtggtgctggaaaaagccatgcacaagtgcatcttgaagcccctcaaggggcatgtggaggccatgctgaaggactttcacatggccgatggctcatggaagcaactcaaggagaacctgcagcttgtgcggcagaggaatccgcaggagctgggggtcttcgccccgacccctgattttgtggatgtggagaaaatcaaagtcaagttcatgaccatgcagaagatgtattcgccggaaaagaaggtcatgctgctgctgcgggtctgcaagctcatttacacggtcatggagaacaactcaggtgaggccgctggaagcccaggcttcgtgccgctt

SEQ ID NO: 331239 - DNA, 479 bp, Homo sapiens
ggaggatgtatggcgctgatgacttcttgccagtcctgacctatgtcatagcccagtgtgacatgcttgaattggacactgaaatcgagtacatgatggagctcctagacccatcgctgttacatggagaaggtaactgcttttgagaaaagttgaaggaactgggtgctatttttttcatttttttataattgagacgaaattcatgtcacataacattaatcattttacagtgaataattcagtggcatttagtatattcacaatgtcatgcattctccacctttatttagtgtcaaactattttcctcaccctaaaataaaattctgcacccatgaagcagttacttgggtgcttttttgacatcttaagtgttaactgaattttttattaatttaaaagagtgtactaacctttttctgattgcaaaagtaatacacactcgtggtagaaaatttggaaaagtcaggaaaaacac

SEQ ID NO: 331240 - DNA, 4050 bp, Homo sapiens
cggagaactgaaacaggagatggtgcggacagatgtcaacctggaaaatggcctggaacccgctgaaacccacagcatggtaagacacaaggatggtggctattccgaggaagaggacgtgaagacctgtgcccgggactcaggctatgacagcctctccaacaggctcagcatcttggaccggctcctccacacccaccccatatggctgcagctgagtctgagtgaggaggaggcagcagaggtcctgcaggcccagcctccggggatcttcctggttcataaatctaccaagatgcagaagaaagtcctctccctccgcctgccctgtgaatttggggccccactcaaggaatttgccataaaggaaagcacatacaggatgttctaccatttaccttgaagttgccttatgccatttcaacagccaagtcggaggctcagcttgaagaactggcccagatgggactaaatttctggagctccccagctgacagcaaacccccgaaccttccacctccccataggcctctttcctccgacggtgtctgtcctgcctccctgcgtcagctctgccttataaatggagtgcattctatcaaaaccaggacgccttcagagctggagtgcagccagaccaacggggccctgtgctttattaatccccttttcttgaaagtgcacagccaggacctcagtggaggcctgaaacggccgagcacaaggactcccaacgcgaatggcacggagcggactcggtcccccccacccaggcccccgccacccgctattaatagtctccacacaagccctcggctggccaggactgaaacccagacgagcatgccagaaacagtcaaccataacaaacatgggaacgtagctctgcctggaacgaaaccaactcccatccctccaccccggctgaagaagcaggcttcttttctggaagcagagggcggtgcaaagaccttgagcggcggccggccgggcgcaggcccggagctggagctgggcacagctggcagcccaggtggggccccgcctgaggccgccccgggggattgcacaagggccccgccgcccagctctgaatcacggcccccgtgccatggaggccggcagcggctgagcgacatgagcatttctacttcctcctccgactcgctggagttcgaccggagcatgcctctgtttggctacgaggcggacaccaacagcagcctggaggactacgagggggaaagtgaccaagagaccatggcgccccccatcaagtccaaaaagaaaaggagcagctccttcgtgctgcccaagctcgtcaagtcccagctgcagaaggtgagcggggtgttcagctccttcatgaccccggagaagcggatggtccgcaggatcgccgagctttcccgggacaaatgcacctacttcgggtgcttagtgcaggactacgtgagcttcctgcaggagaacaaggagtgccacgtgtccagcaccgacatgctgcagaccatccggcagttcatgacccaggtcaagaactatttgtctcagagctcggagctggacccccccatcgagtcgctgatccctgaagaccaaatagatgtggtgctggaaaaagccatgcacaagtgcatcttgaagcccctcaaggggcatgtggaggccatgctgaaggactttcacatggccgatggctcatggaagcaactcaaggagaacctgcagcttgtgcggcagaggaatccgcaggagctgggggtcttcgccccgacccctgattttgtggatgtggagaaaatcaaagtcaagttcatgaccatgcagaagatgtattcgccggaaaagaaggtcatgctgctgctgcgggtctgcaagctcatttacacggtcatggagaacaactcagggaggatgtatggcgctgatgacttcttgccagtcctgacctatgtcatagcccagtgtgacatgcttgaattggacactgaaatcgagtacatgatggagctcctagacccatcgctgttacatggagaaggaggctattacttgacaagcgcatatggagcactttctctgataaagaatttccaagaagaacaagcagcgcgactgctcagctcagaaaccagagacaccctgaggcagtggcacaaacggagaaccaccaaccggaccatcccctctgtggacgacttccagaattacctccgagttgcatttcaggaggtcaacagtggttgcacaggaaagaccctccttgtgagaccttacatcaccactgaggatgtgtgtcagatctgcgctgagaagttcaaggtgggggaccctgaggagtacagcctctttctcttcgttgacgagacatggcagcagctggcagaggacacttaccctcaaaaaatcaaggcggagctgcacagccgaccacagccccacatcttccactttgtctacaaacgcatcaagaacgatccttatggcatcattttccagaacggggaagaagacctcaccacctcctagaagacaggcgggacttcccagtggtgcatccaaaggggagctggaagccttgccttcccgcttctacatgcttgagcttgaaaagcagtcacctcctcggggacccctcagtgtagtgactaagccatccacaggccaactcggccaagggcaactttagccacgcaaggtagctgaggtttgtgaaacagtaggattctcttttggcaatggagaattgcatctgatggttcaagtgtcctgagattgtttgctacctacccccagtcaggttctaggttggcttacaggtatgtatatgtgcagaagaaacacttaagatacaagttcttttgaattcaacagcagatgcttgcgatgcagtgcgtcaggtgattctcactcctgtggatggcttcatccctgccttccttcctttctttttccttttttttttttttttttttttttacaaagagccttcatgtttttatatatttcatagaaatttttatagcagttgcaggtaaactgtcaggattggttttaaaatatttttgtaactttaaaatattctataattatgcatgtgattttaacatttaatattcaaaaataaatctcttgctggatttgagagtattgcatttttaaagtctctcttctgtaactggatgttttggcaactttgtggggagagactgctggatttcttaaagcaacgtattcctgacactggccacagaatgcctttggaaatcggatgtactgttctcttgttcacgtttagtggtgttttgctgttttgttttttaaacaaatgatgctgagaataaggagagaaatgaatgtagagagaggtagagagagaaatatgaactctaacaaaggactgaggagtgcagtctgctggttcaggctcttcaaaagatgtagaaaaagagatagaaggaaccacctatgcttaaaatactgtaaatatgcagtgaggtttggcaaaatctattccatgtgtgatttgcttgtagaaacaattttgaaagccccttgaggaaaataaaaatcaagaagaacacttttctcccttttccatacaaattaaaacttaacagcatcaaattattgggaccagaaaccaagtaatgtataatgtggcttttgttgagttaaataagatgctatataatggagaagaatttgaaaatgcacaaaaaaatcaatctacattatcagaacctgcagtgaaattaaacttatgttaaataaaaccagtttgcaggtgcacaaactatgagggtcttgtatccacgtaacacaggtagttacaaaaacatgttattgtactgtgtaaagatgcatagtcatctcatttggttggctttgtaccttgtaccttttttagccttggcttttgttgaactagaaccctcagcacatactgtgttgtacttttgtaaatgattttttaaatggaattttgcacataatacattgtaatactgtatgataatcatgtgtgaaaataatttttgaaatatc

SEQ ID NO: 331241 - DNA, 3134 bp, Homo sapiens
cggagaactgaaacaggagatggtgcggacagatgtcaacctggaaaatggcctggaacccgctgaaacccacagcatggtaagacacaaggatggtggctattccgaggaagaggacgtgaagacctgtgcccgggactcaggctatgacagcctctccaacaggctcagcatcttggaccggctcctccacacccaccccatatggctgcagctgagtctgagtgaggaggaggcagcagaggtcctgcaggcccagcctccggggatcttcctggttcataaatctaccaagatgcagaagaaagtcctctccctccgcctgccctgtgaatttggggccccactcaaggaatttgccataaaggaaagcacatacaggatgttctaccatttaccttgaagttgccttatgccatttcaacagccaagtcggaggctcagcttgaagaactggcccagatgggactaaatttctggagctccccagctgacagcaaacccccgaaccttccacctccccataggcctctttcctccgacggtgtctgtcctgcctccctgcgtcagctctgccttataaatggagtgcattctatcaaaaccaggacgccttcagagctggagtgcagccagaccaacggggccctgtgctttattaatccccttttcttgaaagtgcacagccaggacctcagtggaggcctgaaacggccgagcacaaggactcccaacgcgaatggcacggagcggactcggtcccccccacccaggcccccgccacccgctattaatagtctccacacaagccctcggctggccaggactgaaacccagacgagcatgccagaaacagtcaaccataacaaacatgggaacgtagctctgcctggaacgaaaccaactcccatccctccaccccggctgaagaagcaggcttcttttctggaagcagagggcggtgcaaagaccttgagcggcggccggccgggcgcaggcccggagctggagctgggcacagctggcagcccaggtggggccccgcctgaggccgccccgggggattgcacaagggccccgccgcccagctctgaatcacggcccccgtgccatggaggccggcagcggctgagcgacatgagcatttctacttcctcctccgactcgctggagttcgaccggagcatgcctctgtttggctacgaggcggacaccaacagcagcctggaggactacgagggggaaagtgaccaagagaccatggcgccccccatcaagtccaaaaagaaaaggagcagctccttcgtgctgcccaagctcgtcaagtcccagctgcagaaggtgagcggggtgttcagctccttcatgaccccggagaagcggatggtccgcaggatcgccgagctttcccgggacaaatgcacctacttcgggtgcttagtgcaggactacgtgagcttcctgcaggagaacaaggagtgccacgtgtccagcaccgacatgctgcagaccatccggcagttcatgacccaggtcaagaactatttgtctcagagctcggagctggacccccccatcgagtcgctgatccctgaagaccaaatagatgtggtgctggaaaaagccatgcacaagtgcatcttgaagcccctcaaggggcatgtggaggccatgctgaaggactttcacatggccgatggctcatggaagcaactcaaggagaacctgcagcttgtgcggcagaggaatccgcaggagctgggggtcttcgccccgacccctgattttgtggatgtggagaaaatcaaagtcaagttcatgaccatgcagaagatgtattcgccggaaaagaaggtcatgctgctgctgcgggtctgcaagctcatttacacggtcatggagaacaactcagggaggatgtatggcgctgatgacttcttgccagtcctgacctatgtcatagcccagtgtgacatgcttgaattggacactgaaatcgagtacatgatggagctcctagacccatcgctgttacatggagaaggaggctattacttgacaagcgcatatggagcactttctctgataaagaatttccaagaagaacaagcagcgcgactgctcagctcagaaaccagagacaccctgaggcagtggcacaaacggagaaccaccaaccggaccatcccctctgtggacgacttccagaattacctccgagttgcatttcaggaggtcaacagtggttgcacaggaaagaccctccttgtgagaccttacatcaccactgaggatgtgtgtcagatctgcgctgagaagttcaaggtgggggaccctgaggagtacagcctctttctcttcgttgacgagacatggcagcagctggcagaggacacttaccctcaaaaaatcaaggcggagctgcacagccgaccacagccccacatcttccactttgtctacaaacgcatcaagaacgatccttatggcatcattttccagaacggggaagaagacctcaccacctcctagaagacaggcgggacttcccagtggtgcatccaaaggggagctggaagccttgccttcccgcttctacatgcttgagcttgaaaagcagtcacctcctcggggacccctcagtgtagtgactaagccatccacaggccaactcggccaagggcaactttagccacgcaaggtagctgaggtttgtgaaacagtaggattctcttttggcaatggagaattgcatctgatggttcaagtgtcctgagattgtttgctacctacccccagtcaggttctaggttggcttacaggtatgtatatgtgcagaagaaacacttaagatacaagttcttttgaattcaacagcagatgcttgcgatgcagtgcgtcaggtgattctcactcctgtggatggcttcatccctgccttccttcctttctttttccttttttttttacaaagagccttcatgtttttttatattgcatgtacagatatttaaatttttatgaagtgaaaatgtccttcttttgcctgtctgccttccttcctctctctctcataggatccttttataacgtggctcattaagacatagttaatatgctacatacatgaataa

SEQ ID NO: 331242 - DNA, 713 bp, Homo sapiens
ggtaagtgcctgcagaagctagaggcaagtcccagctctcttgtatagctgatgtatgccctgagacatactccatttgtaggattctcctgtgctccaattcaccaaattctgctgatggctcagagcagggtaaagcttctcctagataatccctcccccaaaattgagtcctcggggacagttatttattgaataacctccaggttatctactttgggaaatgcagaaatgctataaactgaatttttttccagcagtggcagaagccagacaccttgaagtcaattgtccttcattctccagagttcccaagtggcatttcagagcacaggaattcactcttccacccagatattcctctcacactgagtcacgcaccccagtttctagcagcagatatcttgaagccaaccaccctaatgaaaaatgcgggtttccacaccagttttccacaccagctctccaaccattaagagtacacatgcccccatggcacacttgggttatcacaataaaaatacgtttatataaagtaaaaaacataatgtggagcaaatatatacatatacatgtacattgttagagttcaagtgaatatacagtttttaagtgtgtaaataaatttcatagcactacaaaaatacaagtcatctgagagacgtttacagtggtccccaaaactataggagagaataaaataaaatagctat

SEQ ID NO: 331243 - DNA, 471 bp, Homo sapiens
acaaaataacaaaataaaactactttcatctttacttagttgataggtgaaccactgcagtttaccgtgctagtttattttcttaattagtagtgtggttgaacttttgcctgtatatttattaccttaacatatctcttttcttctctcgattcgtcagttctgatccattgcctacttgctaaatttagtgttcatatttacacgtggtcatttttaactataaaataacataaacctctcaaaatatcacagagttggtctgggagctctgtatttccagggaccaaggttccattatcctattgctttgccacatgtatcttttattcccaagttgtccagtatggctgctggagctccagccattaggctttcattcctagcagcaacctggaggaagtagtgaagaagaaggaacagagaacactcatgagctttaaggaggtttcccagaacctacggataaca

SEQ ID NO: 331244 - DNA, 104 bp, Homo sapiens
tgtttggaaagacagcaattctcttcctcaatctttgtcatagcatgagtatttatttgttccatctctctacgtaaaacaggaaggatttgcacaaaagtgtt

SEQ ID NO: 331245 - DNA, 578 bp, Homo sapiens
tcccaacaaagaaaagactagggtcatatggtttcactagtgatttataccaagcatttaaaaagaacaccaatctttctcaaaatcttctaaaaaaaaaataagggaaaatacttcaaaattcattttatgaggccacaattaccccaataaaaagccagataaggacactacaagagaagaaaattgcaaggcaatatcctcaatgaacatagatgaaaaatttctcaacaaaatgctatcaattatcaaaaagacaaaagacaagttttggtgaagattggtgaaaaaagaacccttgtgcattgttgctgaaaatggaggccaggcacggtggctcatgcctgtaatcccaacactttgggaggccgaggcaggtggatcacctgaggtcaggagctcgagaccagcctgaccaacatggtgaacccgtctctactaaaaatacataaactagctgggagtagtggcacacgcctgtagtcccagcaacttggaaggctgagaccggagaatcgcttgaacccaggaggcagaggttgcagtgagccaagatctccccactgcactccagcctg

SEQ ID NO: 331246 - DNA, 158 bp, Homo sapiens
ctttcaccaacactacactgtcttgtttactgtacctttatagtaagtctcgaagctgggtagtgtcaatcctccaactttattgttgttctttgggattgtattggctattctgggtcttttgcctttcagtatatacactttagaatcagtttgtt

SEQ ID NO: 331247 - DNA, 3970 bp, Homo sapiens
cgttgctgtcgaaaaagggtgaaagagaaacttggcgacctcccggaggagttcgcgaagcgaccaggagcgtgtgcccatcgtcctcacccggcacccaattccaccacagagtcgggatttcgtcggtgatcgtgatggggtgcttttatttttctctttgattttcaaaaaatgtctatgtgactgtccctatcttaaggggaagttgaaagtgggggcgggggtgctcaatgagaaacgttgccttgtgtgtagttgtttggagcacactgcaaattatattggcatctctttccaaaagtcactttgattcaacttcgatagctttctcgtaaatggcacgtttaggtggtgagaggtggatgaggaaacaggcaccagtgcagctgatttgacctccagtgggatagatacgattagcaccaggatcgtgtctcattttgaacccagatctgaacagaattaagacgaacgagctttcacaattgcagcagatgaagatccattggtaaattgatcaggatttttggcctaccctccaaagaaaaggagcggaaagaatgtcggagcgggccgcggatgacgtcaggggggagccgcgccgcgcggcggcggcggcgggcggagcagcggccgcggccgcccggcagcagcagcagcagcagcagcagcagcagccgccgcctccgcagccccagcggcagcagcacccgccaccgccgccacggcgcacacggccggaggacggcgggcccggcgccgcctccacctcggccgccgcaatggcgacggtcggggagcgcaggcctctgcccagtcctgaagtgatgctgggacagtcgtggaatctgtgggttgaggcttccaaacttcctgggaaggacgggacagaattggacgaaagtttcaaggagtttgggaaaaaccgcgaagtcatggggctctgtcgggaagacatgccaatatttggtttctgtccagcccatgatgatttctacttggtggtgtgtaacgactgtaatcaggttgtcaaaccgcaggcatttcaatcacattatgaaagaagacatagctcatccagcaagccgcctttggccgttcctcccacttcagtattttccttcttcccttctctgtccaaaagcaaaggaggcagtgcaagtggaagcaaccgttcttccagtggaggtgttcttagcgcatcctcatcaagttccaagttgttgaaatcacccaaagagaaactgcagctcagggggaacaccaggccaatgcatcccattcagcaaagtagagttccccatggtagaatcatgacaccctctgtgaaagtggaaaagattcatccgaaaatggatggcacactactgaaatctgcggtggggccaacctgtcctgctactgtgagttccttagtcaagcctggccttaactgcccctcaataccaaagccaaccttgccttcacctggacagattctgaatggcaaagggcttcctgcaccgcccactctggaaaagaaacctgaagacaattccaataataggaaatttttaaataagagattatcagaaagagagtttgatcctgacatccactgtggggttattgatctcgacaccaagaagccctgcacccggtctttgacatgcaagacacattccttaacccagcgcagggctgtccagggtagaagaaaacgatttgatgtgttattagccgagcacaaaaacaaaaccagggaaaaggaattgattcgccatccggactctcagcaaccaccgcagcctctcagggacccgcatcccgcccctcctagaacgtcacaggagccgcaccaaaaccctcacggagtgattccttccgaatcaaagccttttgtagctagtaaacctaaacctcacacccccagtcttccaaggcctccaggctgccctgctcagcaaggtgggagtgcccccattgaccctcctccagtccatgaatctccacaccctcccctgcctgccactgagccagcttctcggttatccagtgaggagggcgaaggcgatgacaaagaagagtctgttgaaaaactggactgtcattattcaggtcatcatcctcagccagcatctttttgcacatttgggagccggcagataggaagaggctattacgtgtttgactccaggtggaatcgacttcgctgcgccctcaacctcatggtggagaagcatctgaatgcacagctatggaagaaaatcccaccagtgcccagtaccacctcacccatctccacacgtattcctcaccggacaaactctgtgccgacatcacaatgtggagtcagctatctggcagcagccaccgtctctacatccccagtcctgctctcatctacctgcatctccccaaatagcaaatcggtaccagctcatggaaccacactaaatgcacagcctgctgcttcaggggcgatggatcctgtgtgcagtatgcaatccagacaagtgtcctcttcatcctcatccccttccacgccctctggcctttcctcggttccttcctcccccatgtccaggaaacctcagaaattgaaatccagcaaatctttgaggcccaaggagtcttctggtaacagcactaactgtcaaaatgccagtagcagtaccagtggcggctcaggaaagaaacgcaaaaacagttccccactgttggttcactcttcctcctcctcttcctcctcctcctcttcttctcattccatggagtcttttaggaaaaactgtgtggctcactctgggcctccctacccctcaacggtaacatcttcccatagcatcggcctcaactgtgtgacgaataaagcaaatgcggtgaacgtccggcatgaccagtcagggaggggcccccccaccgggagccctgctgaatccatcaagaggatgagtgtgatggtgaacagcagtgattctactctttctcttgggccattcattcaccagtccaatgaactgcctgtcaactcccacggcagtttttcccactcacacactcctctagacaaactcataggaaagaaaagaaagtgctcacccagctcgagcagcatcaacaacagcagcagcaaacccacaaaggttgccaaagtgccagccatgaacaatgtccacatgaaacacacaggcaccatcccaggggcacaaggactgatgaacagttccctccttcatcagccaaaggcacgtccctgacagctgaaaatagcacggggaggaataatgcggacacttttgaggacaagttacacctccactcagcactctggactccacgatgcctttgagtctgttttcccaacctcctgtgggcctcaagggtagaaacctgccgggctgttgttttaacgaggatttccctgaagctatgtctctagcagtgagtactcataaaggacactggatcaagttcagccaccgaattgcttttatcagtgttaaagtggtctgaactgcttgctaccaatctgtgagaagtttttgtttttgttttgttttttaacttgcagtatatcacagagccactcttcaagtagattggctgggcaaaagaatgttttggcaagagcgttactgtagacctttctccctccttccttttactaccatttttttttaacactgtcatctgtaggtcactctccagcagttaggcaccttaactggagaccagaaaccttccagagaacacagggctgcatcccgagcaaccctctgaagaagggaattaggctttagattttgatagcaatgttccaggaatgaaatatagatgttagcccaagacaccatgacaaaatagcccagccttttgagagtaatttgggaaaagaagctgtcagaagtttctaacttacaaactggtttgaaatttttgatgcccagacagcaagtatcgacagcaacggaattcgagctccgtc

SEQ ID NO: 331248 - DNA, 6144 bp, Homo sapiens
cgttgctgtcgaaaaagggtgaaagagaaacttggcgacctcccggaggagttcgcgaagcgaccaggagcgtgtgcccatcgtcctcacccggcacccaattccaccacagagtcgggatttcgtcggtgatcgtgatggggtgcttttatttttctctttgattttcaaaaaatgtctatgtgactgtccctatcttaaggggaagttgaaagtgggggcgggggtgctcaatgagaaacgttgccttgtgtgtagttgtttggagcacactgcaaattatattggcatctctttccaaaagtcactttgattcaacttcgatagctttctcgtaaatggcacgtttaggtggtgagaggtggatgaggaaacaggcaccagtgcagctgatttgacctccagtgggatagatacgattagcaccaggatcgtgtctcattttgaacccaggctggagcgcagtggcacaatcgtggcttactgcagcgttgacctcctggcctcaagcagtcctcccactgcagcttctcaagaagccggggatacagatctgaacagaattaagacgaacgagctttcacaattgcagcagatgaagatccattggtaaattgatcaggatttttggcctaccctccaaagaaaaggagcggaaagaatgtcggagcgggccgcggatgacgtcaggggggagccgcgccgcgcggcggcggcggcgggcggagcagcggccgcggccgcccggcagcagcagcagcagcagcagcagcagcagccgccgcctccgcagccccagcggcagcagcacccgccaccgccgccacggcgcacacggccggaggacggcgggcccggcgccgcctccacctcggccgccgcaatggcgacggtcggggagcgcaggcctctgcccagtcctgaagtgatgctgggacagtcgtggaatctgtgggttgaggcttccaaacttcctgggaaggacgggacagaattggacgaaagtttcaaggagtttgggaaaaaccgcgaagtcatggggctctgtcgggaagacatgccaatatttggtttctgtccagcccatgatgatttctacttggtggtgtgtaacgactgtaatcaggttgtcaaaccgcaggcatttcaatcacattatgaaagaagacatagctcatccagcaagccgcctttggccgttcctcccacttcagtattttccttcttcccttctctgtccaaaagcaaaggaggcagtgcaagtggaagcaaccgttcttccagtggaggtgttcttagcgcatcctcatcaagttccaagttgttgaaatcacccaaagagaaactgcagctcagggggaacaccaggccaatgcatcccattcagcaaagtagagttccccatggtagaatcatgacaccctctgtgaaagtggaaaagattcatccgaaaatggatggcacactactgaaatctgcggtggggccaacctgtcctgctactgtgagttccttagtcaagcctggccttaactgcccctcaataccaaagccaaccttgccttcacctggacagattctgaatggcaaagggcttcctgcaccgcccactctggaaaagaaacctgaagacaattccaataataggaaatttttaaataagagattatcagaaagagagtttgatcctgacatccactgtggggttattgatctcgacaccaagaagccctgcacccggtctttgacatgcaagacacattccttaacccagcgcagggctgtccagggtagaagaaaacgatttgatgtgttattagccgagcacaaaaacaaaaccagggaaaaggaattgattcgccatccggactctcagcaaccaccgcagcctctcagggacccgcatcccgcccctcctagaacgtcacaggagccgcaccaaaaccctcacggagtgattccttccgaatcaaagccttttgtagctagtaaacctaaacctcacacccccagtcttccaaggcctccaggctgccctgctcagcaaggtgggagtgcccccattgaccctcctccagtccatgaatctccacaccctcccctgcctgccactgagccagcttctcggttatccagtgaggagggcgaaggcgatgacaaagaagagtctgttgaaaaactggactgtcattattcaggtcatcatcctcagccagcatctttttgcacatttgggagccggcagataggaagaggctattacgtgtttgactccaggtggaatcgacttcgctgcgccctcaacctcatggtggagaagcatctgaatgcacagctatggaagaaaatcccaccagtgcccagtaccacctcacccatctccacacgtattcctcaccggacaaactctgtgccgacatcacaatgtggagtcagctatctggcagcagccaccgtctctacatccccagtcctgctctcatctacctgcatctccccaaatagcaaatcggtaccagctcatggaaccacactaaatgcacagcctgctgcttcaggggcgatggatcctgtgtgcagtatgcaatccagacaagtgtcctcttcatcctcatccccttccacgccctctggcctttcctcggttccttcctcccccatgtccaggaaacctcagaaattgaaatccagcaaatctttgaggcccaaggagtcttctggtaacagcactaactgtcaaaatgccagtagcagtaccagtggcggctcaggaaagaaacgcaaaaacagttccccactgttggttcactcttcctcctcctcttcctcctcctcctcttcttctcattccatggagtcttttaggaaaaactgtgtggctcactctgggcctccctacccctcaacggtaacatcttcccatagcatcggcctcaactgtgtgacgaataaagcaaatgcggtgaacgtccggcatgaccagtcagggaggggcccccccaccgggagccctgctgaatccatcaagaggatgagtgtgatggtgaacagcagtgattctactctttctcttgggccattcattcaccagtccaatgaactgcctgtcaactcccacggcagtttttcccactcacacactcctctagacaaactcataggaaagaaaagaaagtgctcacccagctcgagcagcatcaacaacagcagcagcaaacccacaaaggttgccaaagtgccagccatgaacaatgtccacatgaaacacacaggcaccatcccaggggcacaaggactgatgaacagttccctccttcatcagccaaaggcacgtccctgacagctgaaaatagcacggggaggaataatgcggacacttttgaggacaagttacacctccactcagcactctggactccacgatgcctttgagtctgttttcccaacctcctgtgggcctcaagggtagaaacctgccgggctgttgttttaacgaggatttccctgaagctatgtctctagcagtgagtactcataaaggacactggatcaagttcagccaccgaattgcttttatcagtgttaaagtggtctgaactgcttgctaccaatctgtgagaagtttttgtttttgttttgttttttaacttgcagtatatcacagagccactcttcaagtagattggctgggcaaaagaatgttttggcaagagcgttactgtagacctttctccctccttccttttactaccatttttttttaacactgtcatctgtaggtcactctccagcagttaggcaccttaactggagaccagaaaccttccagagaacacagggctgcatcccgagcaaccctctgaagaagggaattaggctttagattttgatagcaatgttccaggaatgaaatatagatgttagcccaagacaccatgacaaaatagcccagccttttgagagtaatttgggaaaagaagctgtcagaagtttctaacttacaaactggtttgaaatttttgatgcccagacagcaagtataaatcattttggaggcttacttttcatgatacaaaagcaattctgtgtgatttttttttttaagaagaaagaaaatgcaagctagttttgagaaaggaaggccaaattgggtcgggggagggtgggagtgaggaagttaaaatcactatagggagaaaaaacttttttcaagatttccaaagagatgaaattttcttaatccttttaagttttcatagtaaacagtatggcagattgggttggttgtcctacctggtctatttttaaaagtcaccttttaaagtgacattattagatacacttaaatgtttccaaggcactctctacattacccttgtttttctctttggatactgtcctgggactaagtgtagatttctgcttcaagcacttctggcattgtgtgtttttgtatgcactccccttcatgccacttcagatgtttatttggatgtggttggggacgagagcagacaccaaggaaagggagttggagagaatgtaagtcctgacctgaaggtcttttgtgatgcatgtataggattgccctgacacacaccctcctttcttgggattataccagccatcttcctgagagttttggagccctctaggatattttttctagtaccccaccccccacccctaaagaaagaccttaatatgttaaaacagcattgcttggagaaggtgtcattgaattccgggacgagccggagcctttaaatgggtgcttccaccactacaggctcctgacacgagtaacaggcactgttgcttagaagaacacacgaagttgccgaacacagggtaaaatttccaaggcgctgatcgttgccctggccagggcctgatgagagccagtcagtacattctttttttcctacagttcttgggtttcaaacttcagtttcagggaatttcaagtcaacaacaggtagaatgaataaacttggttaccagcctaataatgtgaattgctacagaattattcttattatgtaagaaaacaaaaactttatgcagatactttagctataaattgatgtaaaatactgatttttttaaaggaaggagagaacagtatcttgttcaattattatgcaatcaatcagtaaatgtttttaaaatgatactacaggagagcttagtaaggagagggcatggatgggccagtttggcatagttgggagaaatcagtctggtttccatcccagtcggggaagagagaggtgagagggaatcagaacgtacctagttgattccttggtgacaagtgcaatggggtatgggtagaatttattttcagagccaagaggacttgatggttataaataaagttgcctttagcaatggaatttacagatcgatcatgttgttccgaaagatgtgaataggatccacaataacaagttgattcagactaatgtagatatttagattagcaagtattgaacatttgatttcttagactgaggttttaaatgaatttcattatttctcccggtaatacacagagcatcgggattaggaaattagccattttggattctgtctgccacaaacagacctattctaaacagtgctattaaattttagactgttgttcaaatattttattttctcctaaactactttttatggtgatgaataattaagaccatttaaaacacgggagtacaagtatttttttgaattaaattaacttgcaaaaaccaaatttgcagtggttgggttgtttctagacagactttggtatcaatttaaaaccaagataatttttatattctttccaatagaatttcatgacaactcctgcagttttcttaacctacaaaaaaaaaaaaaaagtgctgcaatgatgaacaaagaattatacaaaacctacttttgtatctttattttggaatttcttgttctattataaatatggaagtatccctatttcagaagacatattttgttaaaaatgaattgtacatatttaaatatgtatttttgcacaggtctttttttctgatatcctgttttggtacaattgagatcatctagtatttatttattaattaataaaagtaaatacctttttataatttgaagtgg

SEQ ID NO: 331249 - DNA, 6211 bp, Homo sapiens
cgttgctgtcgaaaaagggtgaaagagaaacttggcgacctcccggaggagttcgcgaagcgaccaggagcgtgtgcccatcgtcctcacccggcacccaattccaccacagagtcgggatttcgtcggtgatcgtgatggggtgcttttatttttctctttgattttcaaaaaatgtctatgtgactgtccctatcttaaggggaagttgaaagtgggggcgggggtgctcaatgagaaacgttgccttgtgtgtagttgtttggagcacactgcaaattatattggcatctctttccaaaagtcactttgattcaacttcgatagctttctcgtaaatggcacgtttaggtggtgagaggtggatgaggaaacaggcaccagtgcagctgatttgacctccagtgggatagatacgattagcaccaggatcgtgtctcattttgaacccaggctggagcgcagtggcacaatcgtggcttactgcagcgttgacctcctggcctcaagcagtcctcccactgcagcttctcaagaagccggggatacagatctgaacagaattaagacgaacgagctttcacaattgcagcagatgaagatccattggtaaattgatcaggatttttggcctaccctccaaagaaaaggagcggaaagaatgtcggagcgggccgcggatgacgtcaggggggagccgcgccgcgcggcggcggcggcgggcggagcagcggccgcggccgcccggcagcagcagcagcagcagcagcagcagcagccgccgcctccgcagccccagcggcagcagcacccgccaccgccgccacggcgcacacggccggaggacggcgggcccggcgccgcctccacctcggccgccgcaatggcgacggtcggggagcgcaggcctctgcccagtcctgaagtgatgctgggacagtcgtggaatctgtgggttgaggcttccaaacttcctgggaaggacgggacagaattggacgaaagtttcaaggagtttgggaaaaaccgcgaagtcatggggctctgtcgggaagacatgccaatatttggtttctgtccagcccatgatgatttctacttggtggtgtgtaacgactgtaatcaggttgtcaaaccgcaggcatttcaatcacattatgaaagaagacatagctcatccagcaagccgcctttggccgttcctcccacttcagtattttccttcttcccttctctgtccaaaagcaaaggaggcagtgcaagtggaagcaaccgttcttccagtggaggtgttcttagcgcatcctcatcaagttccaagttgttgaaatcacccaaagagaaactgcagctcagggggaacaccaggccaatgcatcccattcagcaaagtagagttccccatggtagaatcatgacaccctctgtgaaagtggaaaagattcatccgaaaatggatggcacactactgaaatctgcggtggggccaacctgtcctgctactgtgagttccttagtcaagcctggccttaactgcccctcaataccaaagccaaccttgccttcacctggacagattctgaatggcaaagggcttcctgcaccgcccactctggaaaagaaacctgaagacaattccaataataggaaatttttaaataagagattatcagaaagagagtttgatcctgacatccactgtggggttattgatctcgacaccaagaagccctgcacccggtctttgacatgcaagacacattccttaacccagcgcagggctgtccagggtagaagaaaacgatttgatgtgttattagccgagcacaaaaacaaaaccagggaaaaggaattgattcgccatccggactctcagcaaccaccgcagcctctcagggacccgcatcccgcccctcctagaacgtcacaggagccgcaccaaaaccctcacggagtgattccttccgaatcaaagccttttgtagctagtaaacctaaacctcacacccccagtcttccaaggcctccaggctgccctgctcagcaaggtgggagtgcccccattgaccctcctccagtccatgaatctccacaccctcccctgcctgccactgagccagcttctcggttatccagtgaggagggcgaaggcgatgacaaagaagagtctgttgaaaaactggactgtcattattcaggtcatcatcctcagccagcatctttttgcacatttgggagccggcagataggaagaggctattacgtgtttgactccaggtggaatcgacttcgctgcgccctcaacctcatggtggagaagcatctgaatgcacagctatggaagaaaatcccaccagtgcccagtaccacctcacccatctccacacgtattcctcaccggacaaactctgtgccgacatcacaatgtggagtcagctatctggcagcagccaccgtctctacatccccagtcctgctctcatctacctgcatctccccaaatagcaaatcggtaccagctcatggaaccacactaaatgcacagcctgctgcttcaggggcgatggatcctgtgtgcagtatgcaatccagacaagtgtcctcttcatcctcatccccttccacgccctctggcctttcctcggttccttcctcccccatgtccaggaaacctcagaaattgaaatccagcaaatctttgaggcccaaggagtcttctggtaacagcactaactgtcaaaatgccagtagcagtaccagtggcggctcaggaaagaaacgcaaaaacagttccccactgttggttcactcttcctcctcctcttcctcctcctcctcttcttctcattccatggagtcttttaggaaaaactgtgtggctcactctgggcctccctacccctcaacggtaacatcttcccatagcatcggcctcaactgtgtgacgaataaagcaaatgcggtgaacgtccggcatgaccagtcagggaggggcccccccaccgggagccctgctgaatccatcaagaggatgagtgtgatggtgaacagcagtgattctactctttctcttgggccattcattcaccagtccaatgaactgcctgtcaactcccacggcagtttttcccactcacacactcctctagacaaactcataggaaagaaaagaaagtgctcacccagctcgagcagcatcaacaacagcagcagcaaacccacaaaggttgccaaagtgccagccatgaacaatgtccacatgaaacacacaggcaccatcccaggggcacaaggactgatgaacagttccctccttcatcaggatatctcctcaccttgcttacgaacaggaatttcagcaacatcaccccagagccctgacttaaaatccaaaggcacgtccctgacagctgaaaatagcacggggaggaataatgcggacacttttgaggacaagttacacctccactcagcactctggactccacgatgcctttgagtctgttttcccaacctcctgtgggcctcaagggtagaaacctgccgggctgttgttttaacgaggatttccctgaagctatgtctctagcagtgagtactcataaaggacactggatcaagttcagccaccgaattgcttttatcagtgttaaagtggtctgaactgcttgctaccaatctgtgagaagtttttgtttttgttttgttttttaacttgcagtatatcacagagccactcttcaagtagattggctgggcaaaagaatgttttggcaagagcgttactgtagacctttctccctccttccttttactaccatttttttttaacactgtcatctgtaggtcactctccagcagttaggcaccttaactggagaccagaaaccttccagagaacacagggctgcatcccgagcaaccctctgaagaagggaattaggctttagattttgatagcaatgttccaggaatgaaatatagatgttagcccaagacaccatgacaaaatagcccagccttttgagagtaatttgggaaaagaagctgtcagaagtttctaacttacaaactggtttgaaatttttgatgcccagacagcaagtataaatcattttggaggcttacttttcatgatacaaaagcaattctgtgtgatttttttttttaagaagaaagaaaatgcaagctagttttgagaaaggaaggccaaattgggtcgggggagggtgggagtgaggaagttaaaatcactatagggagaaaaaacttttttcaagatttccaaagagatgaaattttcttaatccttttaagttttcatagtaaacagtatggcagattgggttggttgtcctacctggtctatttttaaaagtcaccttttaaagtgacattattagatacacttaaatgtttccaaggcactctctacattacccttgtttttctctttggatactgtcctgggactaagtgtagatttctgcttcaagcacttctggcattgtgtgtttttgtatgcactccccttcatgccacttcagatgtttatttggatgtggttggggacgagagcagacaccaaggaaagggagttggagagaatgtaagtcctgacctgaaggtcttttgtgatgcatgtataggattgccctgacacacaccctcctttcttgggattataccagccatcttcctgagagttttggagccctctaggatattttttctagtaccccaccccccacccctaaagaaagaccttaatatgttaaaacagcattgcttggagaaggtgtcattgaattccgggacgagccggagcctttaaatgggtgcttccaccactacaggctcctgacacgagtaacaggcactgttgcttagaagaacacacgaagttgccgaacacagggtaaaatttccaaggcgctgatcgttgccctggccagggcctgatgagagccagtcagtacattctttttttcctacagttcttgggtttcaaacttcagtttcagggaatttcaagtcaacaacaggtagaatgaataaacttggttaccagcctaataatgtgaattgctacagaattattcttattatgtaagaaaacaaaaactttatgcagatactttagctataaattgatgtaaaatactgatttttttaaaggaaggagagaacagtatcttgttcaattattatgcaatcaatcagtaaatgtttttaaaatgatactacaggagagcttagtaaggagagggcatggatgggccagtttggcatagttgggagaaatcagtctggtttccatcccagtcggggaagagagaggtgagagggaatcagaacgtacctagttgattccttggtgacaagtgcaatggggtatgggtagaatttattttcagagccaagaggacttgatggttataaataaagttgcctttagcaatggaatttacagatcgatcatgttgttccgaaagatgtgaataggatccacaataacaagttgattcagactaatgtagatatttagattagcaagtattgaacatttgatttcttagactgaggttttaaatgaatttcattatttctcccggtaatacacagagcatcgggattaggaaattagccattttggattctgtctgccacaaacagacctattctaaacagtgctattaaattttagactgttgttcaaatattttattttctcctaaactactttttatggtgatgaataattaagaccatttaaaacacgggagtacaagtatttttttgaattaaattaacttgcaaaaaccaaatttgcagtggttgggttgtttctagacagactttggtatcaatttaaaaccaagataatttttatattctttccaatagaatttcatgacaactcctgcagttttcttaacctacaaaaaaaaaaaaaaagtgctgcaatgatgaacaaagaattatacaaaacctacttttgtatctttattttggaatttcttgttctattataaatatggaagtatccctatttcagaagacatattttgttaaaaatgaattgtacatatttaaatatgtatttttgcacaggtctttttttctgatatcctgttttggtacaattgagatcatctagtatttatttattaattaataaaagtaaatacctttttataatttgaagtgg

SEQ ID NO: 331250 - DNA, 3964 bp, Homo sapiens
aagaatttgaaggagagaggtgacaggattggctttgtagttcagagtgattgctttgatgtggatggtttctctttgtcacaagcaaagagggtggtgccatctgaaagtctctgtgaatggctgtggtcagtgtcattcactgtcctctaatttttttcaggaaaatcccaccagtgcccagtaccacctcacccatctccacacgtattcctcaccggacaaactctgtgccgacatcacaatgtggagtcagctatctggcagcagccaccgtctctacatccccagtcctgctctcatctacctgcatctccccaaatagcaaatcggtaccagctcatggaaccacactaaatgcacagcctgctgcttcaggggcgatggatcctgtgtgcagtatgcaatccagacaagtgtcctcttcatcctcatccccttccacgccctctggcctttcctcggttccttcctcccccatgtccaggaaacctcagaaattgaaatccagcaaatctttgaggcccaaggagtcttctggtaacagcactaactgtcaaaatgccagtagcagtaccagtggcggctcaggaaagaaacgcaaaaacagttccccactgttggttcactcttcctcctcctcttcctcctcctcctcttcttctcattccatggagtcttttaggaaaaactgtgtggctcactctgggcctccctacccctcaacggtaacatcttcccatagcatcggcctcaactgtgtgacgaataaagcaaatgcggtgaacgtccggcatgaccagtcagggaggggcccccccaccgggagccctgctgaatccatcaagaggatgagtgtgatggtgaacagcagtgattctactctttctcttgggccattcattcaccagtccaatgaactgcctgtcaactcccacggcagtttttcccactcacacactcctctagacaaactcataggaaagaaaagaaagtgctcacccagctcgagcagcatcaacaacagcagcagcaaacccacaaaggttgccaaagtgccagccatgaacaatgtccacatgaaacacacaggcaccatcccaggggcacaaggactgatgaacagttccctccttcatcagccaaaggcacgtccctgacagctgaaaatagcacggggaggaataatgcggacacttttgaggacaagttacacctccactcagcactctggactccacgatgcctttgagtctgttttcccaacctcctgtgggcctcaagggtagaaacctgccgggctgttgttttaacgaggatttccctgaagctatgtctctagcagtgagtactcataaaggacactggatcaagttcagccaccgaattgcttttatcagtgttaaagtggtctgaactgcttgctaccaatctgtgagaagtttttgtttttgttttgttttttaacttgcagtatatcacagagccactcttcaagtagattggctgggcaaaagaatgttttggcaagagcgttactgtagacctttctccctccttccttttactaccatttttttttaacactgtcatctgtaggtcactctccagcagttaggcaccttaactggagaccagaaaccttccagagaacacagggctgcatcccgagcaaccctctgaagaagggaattaggctttagattttgatagcaatgttccaggaatgaaatatagatgttagcccaagacaccatgacaaaatagcccagccttttgagagtaatttgggaaaagaagctgtcagaagtttctaacttacaaactggtttgaaatttttgatgcccagacagcaagtataaatcattttggaggcttacttttcatgatacaaaagcaattctgtgtgatttttttttttaagaagaaagaaaatgcaagctagttttgagaaaggaaggccaaattgggtcgggggagggtgggagtgaggaagttaaaatcactatagggagaaaaaacttttttcaagatttccaaagagatgaaattttcttaatccttttaagttttcatagtaaacagtatggcagattgggttggttgtcctacctggtctatttttaaaagtcaccttttaaagtgacattattagatacacttaaatgtttccaaggcactctctacattacccttgtttttctctttggatactgtcctgggactaagtgtagatttctgcttcaagcacttctggcattgtgtgtttttgtatgcactccccttcatgccacttcagatgtttatttggatgtggttggggacgagagcagacaccaaggaaagggagttggagagaatgtaagtcctgacctgaaggtcttttgtgatgcatgtataggattgccctgacacacaccctcctttcttgggattataccagccatcttcctgagagttttggagccctctaggatattttttctagtaccccaccccccacccctaaagaaagaccttaatatgttaaaacagcattgcttggagaaggtgtcattgaattccgggacgagccggagcctttaaatgggtgcttccaccactacaggctcctgacacgagtaacaggcactgttgcttagaagaacacacgaagttgccgaacacagggtaaaatttccaaggcgctgatcgttgccctggccagggcctgatgagagccagtcagtacattctttttttcctacagttcttgggtttcaaacttcagtttcagggaatttcaagtcaacaacaggtagaatgaataaacttggttaccagcctaataatgtgaattgctacagaattattcttattatgtaagaaaacaaaaactttatgcagatactttagctataaattgatgtaaaatactgatttttttaaaggaaggagagaacagtatcttgttcaattattatgcaatcaatcagtaaatgtttttaaaatgatactacaggagagcttagtaaggagagggcatggatgggccagtttggcatagttgggagaaatcagtctggtttccatcccagtcggggaagagagaggtgagagggaatcagaacgtacctagttgattccttggtgacaagtgcaatggggtatgggtagaatttattttcagagccaagaggacttgatggttataaataaagttgcctttagcaatggaatttacagatcgatcatgttgttccgaaagatgtgaataggatccacaataacaagttgattcagactaatgtagatatttagattagcaagtattgaacatttgatttcttagactgaggttttaaatgaatttcattatttctcccggtaatacacagagcatcgggattaggaaattagccattttggattctgtctgccacaaacagacctattctaaacagtgctattaaattttagactgttgttcaaatattttattttctcctaaactactttttatggtgatgaataattaagaccatttaaaacacgggagtacaagtatttttttgaattaaattaacttgcaaaaaccaaatttgcagtggttgggttgtttctagacagactttggtatcaatttaaaaccaagataatttttatattctttccaatagaatttcatgacaactcctgcagttttcttaacctacaaaaaaaaaaaaaaagtgctgcaatgatgaacaaagaattatacaaaacctacttttgtatctttattttggaatttcttgttctattataaatatggaagtatccctatttcagaagacatattttgttaaaaatgaattgtacatatttaaatatgtatttttgcacaggtctttttttctgatatcctgttttggtacaattgagatcatctagtatttatttattaattaataaaagtaaatacctttttataatttgaagtgg

SEQ ID NO: 331251 - DNA, 3503 bp, Homo sapiens
agcactttgggaagctgaagcaggtagatcacttgaggtcaggagttcaagaccagcctggccaacatggtaaaacccccgtctctactaaaaatacgaaaattagctgggtgtggttgtgcacgcctgtaatcccagctactcaggaggtggaggcaggagaactgcttgaacacgggaggcggaagttgcagtgagccaagatcgcgccactgcactccatccggcctatgagactatgtctcaaaaaaaaaagagcatttattatttttccctctcaaaagaatttcagatattctggttaaatctcaccccatattttctcttcccgtttttgagggaggcaggaaaacaggattcagtatgggcatagcagaagactgaaatctcattccaagctcatagttaaaaagaagtctgcatatgaacccatcagtagagaagtggctaagtggttgtgggattcataattaaccatgactttctctcttaggctgtatttttgtctcgtcccagctcttctgcctgttactgacctcacctgtagctgtttcttccagcttcctttgctctaacttccagctcatctctcatcttgttattttattcatcaggatatctcctcaccttgcttacgaacaggaatttcagcaacatcaccccagagccctgacttaaaatccaaaggcacgtccctgacagctgaaaatagcacggggaggaataatgcggacacttttgaggacaagttacacctccactcagcactctggactccacgatgcctttgagtctgttttcccaacctcctgtgggcctcaagggtagaaacctgccgggctgttgttttaacgaggatttccctgaagctatgtctctagcagtgagtactcataaaggacactggatcaagttcagccaccgaattgcttttatcagtgttaaagtggtctgaactgcttgctaccaatctgtgagaagtttttgtttttgttttgttttttaacttgcagtatatcacagagccactcttcaagtagattggctgggcaaaagaatgttttggcaagagcgttactgtagacctttctccctccttccttttactaccatttttttttaacactgtcatctgtaggtcactctccagcagttaggcaccttaactggagaccagaaaccttccagagaacacagggctgcatcccgagcaaccctctgaagaagggaattaggctttagattttgatagcaatgttccaggaatgaaatatagatgttagcccaagacaccatgacaaaatagcccagccttttgagagtaatttgggaaaagaagctgtcagaagtttctaacttacaaactggtttgaaatttttgatgcccagacagcaagtataaatcattttggaggcttacttttcatgatacaaaagcaattctgtgtgatttttttttttaagaagaaagaaaatgcaagctagttttgagaaaggaaggccaaattgggtcgggggagggtgggagtgaggaagttaaaatcactatagggagaaaaaacttttttcaagatttccaaagagatgaaattttcttaatccttttaagttttcatagtaaacagtatggcagattgggttggttgtcctacctggtctatttttaaaagtcaccttttaaagtgacattattagatacacttaaatgtttccaaggcactctctacattacccttgtttttctctttggatactgtcctgggactaagtgtagatttctgcttcaagcacttctggcattgtgtgtttttgtatgcactccccttcatgccacttcagatgtttatttggatgtggttggggacgagagcagacaccaaggaaagggagttggagagaatgtaagtcctgacctgaaggtcttttgtgatgcatgtataggattgccctgacacacaccctcctttcttgggattataccagccatcttcctgagagttttggagccctctaggatattttttctagtaccccaccccccacccctaaagaaagaccttaatatgttaaaacagcattgcttggagaaggtgtcattgaattccgggacgagccggagcctttaaatgggtgcttccaccactacaggctcctgacacgagtaacaggcactgttgcttagaagaacacacgaagttgccgaacacagggtaaaatttccaaggcgctgatcgttgccctggccagggcctgatgagagccagtcagtacattctttttttcctacagttcttgggtttcaaacttcagtttcagggaatttcaagtcaacaacaggtagaatgaataaacttggttaccagcctaataatgtgaattgctacagaattattcttattatgtaagaaaacaaaaactttatgcagatactttagctataaattgatgtaaaatactgatttttttaaaggaaggagagaacagtatcttgttcaattattatgcaatcaatcagtaaatgtttttaaaatgatactacaggagagcttagtaaggagagggcatggatgggccagtttggcatagttgggagaaatcagtctggtttccatcccagtcggggaagagagaggtgagagggaatcagaacgtacctagttgattccttggtgacaagtgcaatggggtatgggtagaatttattttcagagccaagaggacttgatggttataaataaagttgcctttagcaatggaatttacagatcgatcatgttgttccgaaagatgtgaataggatccacaataacaagttgattcagactaatgtagatatttagattagcaagtattgaacatttgatttcttagactgaggttttaaatgaatttcattatttctcccggtaatacacagagcatcgggattaggaaattagccattttggattctgtctgccacaaacagacctattctaaacagtgctattaaattttagactgttgttcaaatattttattttctcctaaactactttttatggtgatgaataattaagaccatttaaaacacgggagtacaagtatttttttgaattaaattaacttgcaaaaaccaaatttgcagtggttgggttgtttctagacagactttggtatcaatttaaaaccaagataatttttatattctttccaatagaatttcatgacaactcctgcagttttcttaacctacaaaaaaaaaaaaaaagtgctgcaatgatgaacaaagaattatacaaaacctacttttgtatctttattttggaatttcttgttctattataaatatggaagtatccctatttcagaagacatattttgttaaaaatgaattgtacatatttaaatatgtatttttgcacaggtctttttttctgatatcctgttttggtacaattgagatcatctagtatttatttattaattaataaaagtaaatacctttttataatttgaagtgg

SEQ ID NO: 331252 - DNA, 3188 bp, Homo sapiens
ctcagttaacaacctggaataccttcaaggacacaaaagcactggaataccttcaaggacacaaaatcagtaaataaaaccaaaaggcaaacataagagccttttctctaagttagaaacccaggcctgcaactcttctagccagttggctagaagtgaatctttgcaatgattgtgcccagtagtagtgaaggcatttgaaagctaagaacaaaatctatagctgactgttcctggtgtcactcagtcaatggagactttagtagcgtgcagcctttggaatattcttgtttagaatcaatagagtgcagtgtacaaacgcttacttaccatttcattatttccccaccccctcttttttgaaagccaaaggcacgtccctgacagctgaaaatagcacggggaggaataatgcggacacttttgaggacaagttacacctccactcagcactctggactccacgatgcctttgagtctgttttcccaacctcctgtgggcctcaagggtagaaacctgccgggctgttgttttaacgaggatttccctgaagctatgtctctagcagtgagtactcataaaggacactggatcaagttcagccaccgaattgcttttatcagtgttaaagtggtctgaactgcttgctaccaatctgtgagaagtttttgtttttgttttgttttttaacttgcagtatatcacagagccactcttcaagtagattggctgggcaaaagaatgttttggcaagagcgttactgtagacctttctccctccttccttttactaccatttttttttaacactgtcatctgtaggtcactctccagcagttaggcaccttaactggagaccagaaaccttccagagaacacagggctgcatcccgagcaaccctctgaagaagggaattaggctttagattttgatagcaatgttccaggaatgaaatatagatgttagcccaagacaccatgacaaaatagcccagccttttgagagtaatttgggaaaagaagctgtcagaagtttctaacttacaaactggtttgaaatttttgatgcccagacagcaagtataaatcattttggaggcttacttttcatgatacaaaagcaattctgtgtgatttttttttttaagaagaaagaaaatgcaagctagttttgagaaaggaaggccaaattgggtcgggggagggtgggagtgaggaagttaaaatcactatagggagaaaaaacttttttcaagatttccaaagagatgaaattttcttaatccttttaagttttcatagtaaacagtatggcagattgggttggttgtcctacctggtctatttttaaaagtcaccttttaaagtgacattattagatacacttaaatgtttccaaggcactctctacattacccttgtttttctctttggatactgtcctgggactaagtgtagatttctgcttcaagcacttctggcattgtgtgtttttgtatgcactccccttcatgccacttcagatgtttatttggatgtggttggggacgagagcagacaccaaggaaagggagttggagagaatgtaagtcctgacctgaaggtcttttgtgatgcatgtataggattgccctgacacacaccctcctttcttgggattataccagccatcttcctgagagttttggagccctctaggatattttttctagtaccccaccccccacccctaaagaaagaccttaatatgttaaaacagcattgcttggagaaggtgtcattgaattccgggacgagccggagcctttaaatgggtgcttccaccactacaggctcctgacacgagtaacaggcactgttgcttagaagaacacacgaagttgccgaacacagggtaaaatttccaaggcgctgatcgttgccctggccagggcctgatgagagccagtcagtacattctttttttcctacagttcttgggtttcaaacttcagtttcagggaatttcaagtcaacaacaggtagaatgaataaacttggttaccagcctaataatgtgaattgctacagaattattcttattatgtaagaaaacaaaaactttatgcagatactttagctataaattgatgtaaaatactgatttttttaaaggaaggagagaacagtatcttgttcaattattatgcaatcaatcagtaaatgtttttaaaatgatactacaggagagcttagtaaggagagggcatggatgggccagtttggcatagttgggagaaatcagtctggtttccatcccagtcggggaagagagaggtgagagggaatcagaacgtacctagttgattccttggtgacaagtgcaatggggtatgggtagaatttattttcagagccaagaggacttgatggttataaataaagttgcctttagcaatggaatttacagatcgatcatgttgttccgaaagatgtgaataggatccacaataacaagttgattcagactaatgtagatatttagattagcaagtattgaacatttgatttcttagactgaggttttaaatgaatttcattatttctcccggtaatacacagagcatcgggattaggaaattagccattttggattctgtctgccacaaacagacctattctaaacagtgctattaaattttagactgttgttcaaatattttattttctcctaaactactttttatggtgatgaataattaagaccatttaaaacacgggagtacaagtatttttttgaattaaattaacttgcaaaaaccaaatttgcagtggttgggttgtttctagacagactttggtatcaatttaaaaccaagataatttttatattctttccaatagaatttcatgacaactcctgcagttttcttaacctacaaaaaaaaaaaaaaagtgctgcaatgatgaacaaagaattatacaaaacctacttttgtatctttattttggaatttcttgttctattataaatatggaagtatccctatttcagaagacatattttgttaaaaatgaattgtacatatttaaatatgtatttttgcacaggtctttttttctgatatcctgttttggtacaattgagatcatctagtatttatttattaattaataaaagtaaatacctttttataatttgaagtgg

SEQ ID NO: 331253 - DNA, 2374 bp, Homo sapiens
  misc_feature (19)..(19): n is a, c, g, or t
tcagtgtaccccggagtangcatatgtggacgcgcgtcgggagacagaagggcttccagagaacacagggctgcatcccgagcaaccctctgaagaagggaattaggctttagattttgatagcaatgttccaggaatgaaatatagatgttagcccaagacaccatgacaaaatagcccagccttttgagagtaatttgggaaaagaagctgtcagaagtttctaacttacaaactggtttgaaatttttgatgcccagacagcaagtataaatcattttggaggcttacttttcatgatacaaaagcaattctgtgtgatttttttttttaagaagaaagaaaatgcaagctagttttgagaaaggaaggccaaattgggtcgggggagggtgggagtgaggaagttaaaatcactatagggagaaaaaacttttttcaagatttccaaagagatgaaattttcttaatccttttaagttttcatagtaaacagtatggcagattgggttggttgtcctacctggtctatttttaaaagtcaccttttaaagtgacattattagatacacttaaatgtttccaaggcactctctacattacccttgtttttctctttggatactgtcctgggactaagtgtagatttctgcttcaagcacttctggcattgtgtgtttttgtatgcactccccttcatgccacttcagatgtttatttggatgtggttggggacgagagcagacaccaaggaaagggagttggagagaatgtaagtcctgacctgaaggtcttttgtgatgcatgtataggattgccctgacacacaccctcctttcttgggattataccagccatcttcctgagagttttggagccctctaggatattttttctagtaccccaccccccacccctaaagaaagaccttaatatgttaaaacagcattgcttggagaaggtgtcattgaattccgggacgagccggagcctttaaatgggtgcttccaccactacaggctcctgacacgagtaacaggcactgttgcttagaagaacacacgaagttgccgaacacagggtaaaatttccaaggcgctgatcgttgccctggccagggcctgatgagagccagtcagtacattctttttttcctacagttcttgggtttcaaacttcagtttcagggaatttcaagtcaacaacaggtagaatgaataaacttggttaccagcctaataatgtgaattgctacagaattattcttattatgtaagaaaacaaaaactttatgcagatactttagctataaattgatgtaaaatactgatttttttaaaggaaggagagaacagtatcttgttcaattattatgcaatcaatcagtaaatgtttttaaaatgatactacaggagagcttagtaaggagagggcatggatgggccagtttggcatagttgggagaaatcagtctggtttccatcccagtcggggaagagagaggtgagagggaatcagaacgtacctagttgattccttggtgacaagtgcaatggggtatgggtagaatttattttcagagccaagaggacttgatggttataaataaagttgcctttagcaatggaatttacagatcgatcatgttgttccgaaagatgtgaataggatccacaataacaagttgattcagactaatgtagatatttagattagcaagtattgaacatttgatttcttagactgaggttttaaatgaatttcattatttctcccggtaatacacagagcatcgggattaggaaattagccattttggattctgtctgccacaaacagacctattctaaacagtgctattaaattttagactgttgttcaaatattttattttctcctaaactactttttatggtgatgaataattaagaccatttaaaacacgggagtacaagtatttttttgaattaaattaacttgcaaaaaccaaatttgcagtggttgggttgtttctagacagactttggtatcaatttaaaaccaagataatttttatattctttccaatagaatttcatgacaactcctgcagttttcttaacctacaaaaaaaaaaaaaaagtgctgcaatgatgaacaaagaattatacaaaacctacttttgtatctttattttggaatttcttgttctattataaatatggaagtatccctatttcagaagacatattttgttaaaaatgaattgtacatatttaaatatgtatttttgcacaggtctttttttctgatatcctgttttggtacaattgagatcatctagtatttatttattaattaataaaagtaaatacctttttataatttgaagtgg

SEQ ID NO: 331254 - DNA, 4712 bp, Homo sapiens
cgttgctgtcgaaaaagggtgaaagagaaacttggcgacctcccggaggagttcgcgaagcgaccaggagcgtgtgcccatcgtcctcacccggcacccaattccaccacagagtcgggatttcgtcggtgatcgtgatggggtgcttttatttttctctttgattttcaaaaaatgtctatgtgactgtccctatcttaaggggaagttgaaagtgggggcgggggtgctcaatgagaaacgttgccttgtgtgtagttgtttggagcacactgcaaattatattggcatctctttccaaaagtcactttgattcaacttcgatagctttctcgtaaatggcacgtttaggtggtgagaggtggatgaggaaacaggcaccagtgcagctgatttgacctccagtgggatagatacgattagcaccaggatcgtgtctcattttgaacccaggctggagcgcagtggcacaatcgtggcttactgcagcgttgacctcctggcctcaagcagtcctcccactgcagcttctcaagaagccggggatacagatctgaacagaattaagacgaacgagctttcacaattgcagcagatgaagatccattggtaaattgatcaggatttttggcctaccctccaaagaaaaggagcggaaagaatgtcggagcgggccgcggatgacgtcaggggggagccgcgccgcgcggcggcggcggcgggcggagcagcggccgcggccgcccggcagcagcagcagcagcagcagcagcagcagccgccgcctccgcagccccagcggcagcagcacccgccaccgccgccacggcgcacacggccggaggacggcgggcccggcgccgcctccacctcggccgccgcaatggcgacggtcggggagcgcaggcctctgcccagtcctgaagtgatgctgggacagtcgtggaatctgtgggttgaggcttccaaacttcctgggaaggacgggacagaattggacgaaagtttcaaggagtttgggaaaaaccgcgaagtcatggggctctgtcgggaagacatgccaatatttggtttctgtccagcccatgatgatttctacttggtggtgtgtaacgactgtaatcaggttgtcaaaccgcaggcatttcaatcacattatgaaagaagacatagctcatccagcaagccgcctttggccgttcctcccacttcagtattttccttcttcccttctctgtccaaaagcaaaggaggcagtgcaagtggaagcaaccgttcttccagtggaggtgttcttagcgcatcctcatcaagttccaagttgttgaaatcacccaaagagaaactgcagctcagggggaacaccaggccaatgcatcccattcagcaaagtagagttccccatggtagaatcatgacaccctctgtgaaagtggaaaagattcatccgaaaatggatggcacactactgaaatctgcggtggggccaacctgtcctgctactgtgagttccttagtcaagcctggccttaactgcccctcaataccaaagccaaccttgccttcacctggacagattctgaatggcaaagggcttcctgcaccgcccactctggaaaagaaacctgaagacaattccaataataggaaatttttaaataagagattatcagaaagagagtttgatcctgacatccactgtggggttattgatctcgacaccaagaagccctgcacccggtctttgacatgcaagacacattccttaacccagcgcagggctgtccagggtagaagaaaacgatttgatgtgttattagccgagcacaaaaacaaaaccagggaaaaggaattgattcgccatccggactctcagcaaccaccgcagcctctcagggacccgcatcccgcccctcctagaacgtcacaggagccgcaccaaaaccctcacggagtgattccttccgaatcaaagccttttgtagctagtaaacctaaacctcacacccccagtcttccaaggcctccaggctgccctgctcagcaaggtgggagtgcccccattgaccctcctccagtccatgaatctccacaccctcccctgcctgccactgagccagcttctcggttatccagtgaggagggcgaaggcgatgacaaagaagagtctgttgaaaaactggactgtcattattcaggtcatcatcctcagccagcatctttttgcacatttgggagccggcagataggaagaggctattacgtgtttgactccaggtggaatcgacttcgctgcgccctcaacctcatggtggagaagcatctgaatgcacagctatggaagaaaatcccaccagtgcccagtaccacctcacccatctccacacgtattcctcaccggacaaactctgtgccgacatcacaatgtggagtcagctatctggcagcagccaccgtctctacatccccagtcctgctctcatctacctgcatctccccaaatagcaaatcggtaccagctcatggaaccacactaaatgcacagcctgctgcttcaggggcgatggatcctgtgtgcagtatgcaatccagacaagtgtcctcttcatcctcatccccttccacgccctctggcctttcctcggttccttcctcccccatgtccaggaaacctcagaaattgaaatccagcaaatctttgaggcccaaggagtcttctggtaacagcactaactgtcaaaatgccagtagcagtaccagtggcggctcaggaaagaaacgcaaaaacagttccccactgttggttcactcttcctcctcctcttcctcctcctcctcttcttctcattccatggagtcttttaggaaaaactgtgtggctcactctgggcctccctacccctcaacggtaacatcttcccatagcatcggcctcaactgtgtgacgaataaagcaaatgcggtgaacgtccggcatgaccagtcagggaggggcccccccaccgggagccctgctgaatccatcaagaggatgagtgtgatggtgaacagcagtgattctactctttctcttgggccattcattcaccagtccaatgaactgcctgtcaactcccacggcagtttttcccactcacacactcctctagacaaactcataggaaagaaaagaaagtgctcacccagctcgagcagcatcaacaacagcagcagcaaacccacaaaggttgccaaagtgccagccatgaacaatgtccacatgaaacacacaggcaccatcccaggggcacaaggactgatgaacagttccctccttcatcagccaaaggcacgtccctgacagctgaaaatagcacggggaggaataatgcggacacttttgaggacaagttacacctccactcagcactctggactccacgatgcctttgagtctgttttcccaacctcctgtgggcctcaagggtagaaacctgccgggctgttgttttaacgaggatttccctgaagctatgtctctagcagtgagtactcataaaggacactggatcaagttcagccaccgaattgcttttatcagtgttaaagtggtctgaactgcttgctaccaatctgtgagaagtttttgtttttgttttgttttttaacttgcagtatatcacagagccactcttcaagtagattggctgggcaaaagaatgttttggcaagagcgttactgtagacctttctccctccttccttttactaccatttttttttaacactgtcatctgtaggtcactctccagcagttaggcaccttaactggagaccagaaaccttccagagaacacagggctgcatcccgagcaaccctctgaagaagggaattaggctttagattttgatagcaatgttccaggaatgaaatatagatgttagcccaagacaccatgacaaaatagcccagccttttgagagtaatttgggaaaagaagctgtcagaagtttctaacttacaaactggtttgaaatttttgatgcccagacagcaagtataaatcattttggaggcttacttttcatgatacaaaagcaattctgtgtgatttttttttttaagaagaaagaaaatgcaagctagttttgagaaaggaaggccaaattgggtcgggggagggtgggagtgaggaagttaaaatcactatagggagaaaaaacttttttcaagatttccaaagagatgaaattttcttaatccttttaagttttcatagtaaacagtatggcagattgggttggttgtcctacctggtctatttttaaaagtcaccttttaaagtgacattattagatacacttaaatgtttccaaggcactctctacattacccttgtttttctctttggatactgtcctgggactaagtgtagatttctgcttcaagcacttctggcattgtgtgtttttgtatgcactccccttcatgccacttcagatgtttatttggatgtggttggggacgagagcagacaccaaggaaagggagttggagagaatgtaagtcctgacctgaaggtcttttgtgatgcatgtataggattgccctgacacacaccctcctttcttgggattataccagccatcttcctgagagttttggagccctctaggatattttttctagtaccccaccccgtcgggtggagccctccaccccgtcgggcggg

SEQ ID NO: 331255 - DNA, 2161 bp, Homo sapiens
cgttgctgtcgaaaaagggtgaaagagaaacttggcgacctcccggaggagttcgcgaagcgaccaggagcgtgtgcccatcgtcctcacccggcacccaattccaccacagagtcgggatttcgtcggtgatcgtgatggggtgcttttatttttctctttgattttcaaaaaatgtctatgtgactgtccctatcttaaggggaagttgaaagtgggggcgggggtgctcaatgagaaacgttgccttgtgtgtagttgtttggagcacactgcaaattatattggcatctctttccaaaagtcactttgattcaacttcgatagctttctcgtaaatggcacgtttaggtggtgagaggtggatgaggaaacaggcaccagtgcagctgatttgacctccagtgggatagatacgattagcaccaggatcgtgtctcattttgaacccaggctggagcgcagtggcacaatcgtggcttactgcagcgttgacctcctggcctcaagcagtcctcccactgcagcttctcaagaagccggggatacagatctgaacagaattaagacgaacgagctttcacaattgcagcagatgaagatccattggtaaattgatcaggatttttggcctaccctccaaagaaaaggagcggaaagaatgtcggagcgggccgcggatgacgtcaggggggagccgcgccgcgcggcggcggcggcgggcggagcagcggccgcggccgcccggcagcagcagcagcagcagcagcagcagcagccgccgcctccgcagccccagcggcagcagcacccgccaccgccgccacggcgcacacggccggaggacggcgggcccggcgccgcctccacctcggccgccgcaatggcgacggtcggggagcgcaggcctctgcccagtcctgaagtgatgctgggacagtcgtggaatctgtgggttgaggcttccaaacttcctgggaaggacgggacagaattggacgaaagtttcaaggagtttgggaaaaaccgcgaagtcatggggctctgtcgggaagacatgccaatatttggtttctgtccagcccatgatgatttctacttggtggtgtgtaacgactgtaatcaggttgtcaaaccgcaggcatttcaatcacattatgaaagaagacatagctcatccagcaagccgcctttggccgttcctcccacttcagtattttccttcttcccttctctgtccaaaagcaaaggaggcagtgcaagtggaagcaaccgttcttccagtggaggtgttcttagcgcatcctcatcaagttccaagttgttgaaatcacccaaagagaaactgcagctcagggggaacaccaggccaatgcatcccattcagcaaagtagagttccccatggtagaatcatgacaccctctgtgaaagtggaaaagattcatccgaaaatggatggcacactactgaaatctgcggtggggccaacctgtcctgctactgtgagttccttagtcaagcctggccttaactgcccctcaataccaaagccaaccttgccttcacctggacagattctgaatggcaaagggcttcctgcaccgcccactctggaaaagaaacctgaagacaattccaataataggaaatttttaaataagagattatcagaaagagagtttgatcctgacatccactgtggggttattgatctcgacaccaagaagccctgcacccggtctttgacatgcaagacacattccttaacccagcgcagggctgtccagggtagaagaaaacgatttgatgtgttattagccgagcacaaaaacaaaaccagggaaaaggaattgattcgccatccggactctcagcaaccaccgcagcctctcagggacccgcatcccgcccctcctagaacgtcacaggagccgcaccaaaaccctcacggagtgattccttccgaatcaaagccttttgtagctagtaaacctaaacctcacacccccagtcttccaaggtaagccaggccctccaactctttctcccaccttcagagatgagacttgcagatactgtaaaatttcagtatggtcatgctgttgagaaacatatctcaggctcactgtggagatagttttttaaggagttttactatg

SEQ ID NO: 331256 - DNA, 760 bp, Homo sapiens
agcactttgggaagctgaagcaggtagatcacttgaggtcaggagttcaagaccagcctggccaacatggtaaaacccccgtctctactaaaaatacgaaaattagctgggtgtggttgtgcacgcctgtaatcccagctactcaggaggtggaggcaggagaactgcttgaacacgggaggcggaagttgcagtgagccaagatcgcgccactgcactccatccggcctatgagactatgtctcaaaaaaaaaagagcatttattatttttccctctcaaaagaatttcagatattctggttaaatctcaccccatattttctcttcccgtttttgagggaggcaggaaaacaggattcagtatgggcatagcagaagactgaaatctcattccaagctcatagttaaaaagaagtctgcatatgaacccatcagtagagaagtggctaagtggttgtgggattcataattaaccatgactttctctcttaggctgtatttttgtctcgtcccagctcttctgcctgttactgacctcacctgtagctgtttcttccagcttcctttgctctaacttccagctcatctctcatcttgttattttattcatcaggatatctcctcaccttgcttacgaacaggaatttcagcaacatcaccccagagccctgacttaaaatgtgaggctctttttcatgattttttttccccttcctcgtcttcagaacttaactcaaatgccagccgggttaggacttt

SEQ ID NO: 331257 - DNA, 500 bp, Homo sapiens
cacagagtcgggatttcgtcggtgatcgtgatggggtgcttttatttttctctttgattttcaaaaaatgtctatgtgactgtccctatcttaaggggaagttgaaagtgggggcgggggtgctcaatgagaaacgttgccttgtgtgtagttgtttggagcacactgcaaattatattggcatctctttccaaaagtcactttgattcaacttcgatagctttctcgtaaatggcacgtttaggtggtgagaggtggatgaggaaacaggcaccagtgcagctgatttgacctccagtgggatagatacgattagcaccaggatcgtgtctcattttgaacccaggtttgttattttattcagccataccgttgttttccaattttcctgtcccccaagtagatcttgcatcttcatatccgggatgaagaagttgtgtaggataaacttggttgtttcactttccttactaaatttaggtacattctccctgttttcc

SEQ ID NO: 331258 - DNA, 3525 bp, Homo sapiens
cgttgctgtcgaaaaagggtgaaagagaaacttggcgacctcccggaggagttcgcgaagcgaccaggagcgtgtgcccatcgtcctcacccggcacccaattccaccacagagtcgggatttcgtcggtgatcgtgatggggtgcttttatttttctctttgattttcaaaaaatgtctatgtgactgtccctatcttaaggggaagttgaaagtgggggcgggggtgctcaatgagaaacgttgccttgtgtgtagttgtttggagcacactgcaaattatattggcatctctttccaaaagtcactttgattcaacttcgatagctttctcgtaaatggcacgtttaggtggtgagaggtggatgaggaaacaggcaccagtgcagctgatttgacctccagtgggatagatacgattagcaccaggatcgtgtctcattttgaacccagatctgaacagaattaagacgaacgagctttcacaattgcagcagatgaagatccattggtaaattgatcaggatttttggcctaccctccaaagaaaaggagcggaaagaatgtcggagcgggccgcggatgacgtcaggggggagccgcgccgcgcggcggcggcggcgggcggagcagcggccgcggccgcccggcagcagcagcagcagcagcagcagcagcagccgccgcctccgcagccccagcggcagcagcacccgccaccgccgccacggcgcacacggccggaggacggcgggcccggcgccgcctccacctcggccgccgcaatggcgacggtcggggagcgcaggcctctgcccagtcctgaagtgatgctgggacagtcgtggaatctgtgggttgaggcttccaaacttcctgggaaggacgggacagaattggacgaaagtttcaaggagtttgggaaaaaccgcgaagtcatggggctctgtcgggaagacatgccaatatttggtttctgtccagcccatgatgatttctacttggtggtgtgtaacgactgtaatcaggttgtcaaaccgcaggcatttcaatcacattatgaaagaagacatagctcatccagcaagccgcctttggccgttcctcccacttcagtattttccttcttcccttctctgtccaaaagcaaaggaggcagtgcaagtggaagcaaccgttcttccagtggaggtgttcttagcgcatcctcatcaagttccaagttgttgaaatcacccaaagagaaactgcagctcagggggaacaccaggccaatgcatcccattcagcaaagtagagttccccatggtagaatcatgacaccctctgtgaaagtggaaaagattcatccgaaaatggatggcacactactgaaatctgcggtggggccaacctgtcctgctactgtgagttccttagtcaagcctggccttaactgcccctcaataccaaagccaaccttgccttcacctggacagattctgaatggcaaagggcttcctgcaccgcccactctggaaaagaaacctgaagacaattccaataataggaaatttttaaataagagattatcagaaagagagtttgatcctgacatccactgtggggttattgatctcgacaccaagaagccctgcacccggtctttgacatgcaagacacattccttaacccagcgcagggctgtccagggtagaagaaaacgatttgatgtgttattagccgagcacaaaaacaaaaccagggaaaaggaattgattcgccatccggactctcagcaaccaccgcagcctctcagggacccgcatcccgcccctcctagaacgtcacaggagccgcaccaaaaccctcacggagtgattccttccgaatcaaagccttttgtagctagtaaacctaaacctcacacccccagtcttccaaggcctccaggctgccctgctcagcaaggtgggagtgcccccattgaccctcctccagtccatgaatctccacaccctcccctgcctgccactgagccagcttctcggttatccagtgaggagggcgaaggcgatgacaaagaagagtctgttgaaaaactggactgtcattattcaggtcatcatcctcagccagcatctttttgcacatttgggagccggcagataggaagaggctattacgtgtttgactccaggtggaatcgacttcgctgcgccctcaacctcatggtggagaagcatctgaatgcacagctatggaagaaaatcccaccagtgcccagtaccacctcacccatctccacacgtattcctcaccggacaaactctgtgccgacatcacaatgtggagtcagctatctggcagcagccaccgtctctacatccccagtcctgctctcatctacctgcatctccccaaatagcaaatcggtaccagctcatggaaccacactaaatgcacagcctgctgcttcaggggcgatggatcctgtgtgcagtatgcaatccagacaagtgtcctcttcatcctcatccccttccacgccctctggcctttcctcggttccttcctcccccatgtccaggaaacctcagaaattgaaatccagcaaatctttgaggcccaaggagtcttctggtaacagcactaactgtcaaaatgccagtagcagtaccagtggcggctcaggaaagaaacgcaaaaacagttccccactgttggttcactcttcctcctcctcttcctcctcctcctcttcttctcattccatggagtcttttaggaaaaactgtgtggctcactctgggcctccctacccctcaacggtaacatcttcccatagcatcggcctcaactgtgtgacgaataaagcaaatgcggtgaacgtccggcatgaccagtcagggaggggcccccccaccgggagccctgctgaatccatcaagaggatgagtgtgatggtgaacagcagtgattctactctttctcttgggccattcattcaccagtccaatgaactgcctgtcaactcccacggcagtttttcccactcacacactcctctagacaaactcataggaaagaaaagaaagtgctcacccagctcgagcagcatcaacaacagcagcagcaaacccacaaaggttgccaaagtgccagccatgaacaatgtccacatgaaacacacaggcaccatcccaggggcacaaggactgatgaacagttccctccttcatcaggtaggaaatggactgtgagccccatgggaatgcccatttcttctcccttaagatcttttgtcagctcagaaatgtgtttggttgggttggttggttggtttgtaaacagatattcagcttcatggtgtcttcttaaaaaaaaaaaaaaaaaaaaaaaaggttcacggccgtatgaaggtaaaacaggctcttctgccagaatttctggtgcctttggaagatgttcttcagtaaagaaactacagtaatgcatttttagtagagctgcagaaagcatcggttgtgacagcaaaatcataat

SEQ ID NO: 331259 - DNA, 6090 bp, Homo sapiens
cgttgctgtcgaaaaagggtgaaagagaaacttggcgacctcccggaggagttcgcgaagcgaccaggagcgtgtgcccatcgtcctcacccggcacccaattccaccacagagtcgggatttcgtcggtgatcgtgatggggtgcttttatttttctctttgattttcaaaaaatgtctatgtgactgtccctatcttaaggggaagttgaaagtgggggcgggggtgctcaatgagaaacgttgccttgtgtgtagttgtttggagcacactgcaaattatattggcatctctttccaaaagtcactttgattcaacttcgatagctttctcgtaaatggcacgtttaggtggtgagaggtggatgaggaaacaggcaccagtgcagctgatttgacctccagtgggatagatacgattagcaccaggatcgtgtctcattttgaacccaggctggagcgcagtggcacaatcgtggcttactgcagcgttgacctcctggcctcaagcagtcctcccactgcagcttctcaagaagccggggatacagatctgaacagaattaagacgaacgagctttcacaattgcagcagatgaagatccattggtaaattgatcaggatttttggcctaccctccaaagaaaaggagcggaaagaatgtcggagcgggccgcggatgacgtcaggggggagccgcgccgcgcggcggcggcggcgggcggagcagcggccgcggccgcccggcagcagcagcagcagcagcagcagcagcagccgccgcctccgcagccccagcggcagcagcacccgccaccgccgccacggcgcacacggccggaggacggcgggcccggcgccgcctccacctcggccgccgcaatggcgacggtcggggagcgcaggcctctgcccagtcctgaagtgatgctgggacagtcgtggaatctgtgggttgaggcttccaaacttcctgggaaggacgggacagaattggacgaaagtttcaaggagtttgggaaaaaccgcgaagtcatggggctctgtcgggaagacatgccaatatttggtttctgtccagcccatgatgatttctacttggtggtgtgtaacgactgtaatcaggttgtcaaaccgcaggcatttcaatcacattatgaaagaagacatagctcatccagcaagccgcctttggccgttcctcccacttcagtattttccttcttcccttctctgtccaaaagcaaaggaggcagtgcaagtggaagcaaccgttcttccagtggaggtgttcttagcgcatcctcatcaagttccaagttgttgaaatcacccaaagagaaactgcagctcagggggaacaccaggccaatgcatcccattcagcaaagtagagttccccatggtagaatcatgacaccctctgtgaaagtggaaaagattcatccgaaaatggatggcacactactgaaatctgcggtggggccaacctgtcctgctactgtgagttccttagtcaagcctggccttaactgcccctcaataccaaagccaaccttgccttcacctggacagattctgaatggcaaagggcttcctgcaccgcccactctggaaaagaaacctgaagacaattccaataataggaaatttttaaataagagattatcagaaagagagtttgatcctgacatccactgtggggttattgatctcgacaccaagaagccctgcacccggtctttgacatgcaagacacattccttaacccagcgcagggctgtccagggtagaagaaaacgatttgatgtgttattagccgagcacaaaaacaaaaccagggaaaaggaattgattcgccatccggactctcagcaaccaccgcagcctctcagggacccgcatcccgcccctcctagaacgtcacaggagccgcaccaaaaccctcacggagtgattccttccgaatcaaagccttttgtagctagtaaacctaaacctcacacccccagtcttccaaggcctccaggctgccctgctcagcaaggtgggagtgcccccattgaccctcctccagtccatgaatctccacaccctcccctgcctgccactgagccagcttctcggttatccagtgaggagggcgaaggcgatgacaaagaagagtctgttgaaaaactggactgtcattattcaggtcatcatcctcagccagcatctttttgcacatttgggagccggcagataggaagaggctattacgtgtttgactccaggtggaatcgacttcgctgcgccctcaacctcatggtggagaagcatctgaatgcacagctatggaagaaaatcccaccagtgcccagtaccacctcacccatctccacacgtattcctcaccggacaaactctgtgccgacatcacaatgtggagtcagctatctggcagcagccaccgtctctacatccccagtcctgctctcatctacctgcatctccccaaatagcaaatcggtaccagctcatggaaccacactaaatgcacagcctgctgcttcaggggcgatggatcctgtgtgcagtatgcaatccagacaagtgtcctcttcatcctcatccccttccacgccctctggcctttcctcggttccttcctcccccatgtccaggaaacctcagaaattgaaatccagcaaatctttgaggcccaaggagtcttctggtaacagcactaactgtcaaaatgccagtagcagtaccagtggcggctcaggaaagaaacgcaaaaacagttccccactgttggttcactcttcctcctcctcttcctcctcctcctcttcttctcattccatggagtcttttaggaaaaactgtgtggctcactctgggcctccctacccctcaacggtaacatcttcccatagcatcggcctcaactgtgtgacgaataaagcaaatgcggtgaacgtccggcatgaccagtcagggaggggcccccccaccgggagccctgctgaatccatcaagaggatgagtgtgatggtgaacagcagtgattctactctttctcttgggccattcattcaccagtccaatgaactgcctgtcaactcccacggcagtttttcccactcacacactcctctagacaaactcataggaaagaaaaaggttgccaaagtgccagccatgaacaatgtccacatgaaacacacaggcaccatcccaggggcacaaggactgatgaacagttccctccttcatcagccaaaggcacgtccctgacagctgaaaatagcacggggaggaataatgcggacacttttgaggacaagttacacctccactcagcactctggactccacgatgcctttgagtctgttttcccaacctcctgtgggcctcaagggtagaaacctgccgggctgttgttttaacgaggatttccctgaagctatgtctctagcagtgagtactcataaaggacactggatcaagttcagccaccgaattgcttttatcagtgttaaagtggtctgaactgcttgctaccaatctgtgagaagtttttgtttttgttttgttttttaacttgcagtatatcacagagccactcttcaagtagattggctgggcaaaagaatgttttggcaagagcgttactgtagacctttctccctccttccttttactaccatttttttttaacactgtcatctgtaggtcactctccagcagttaggcaccttaactggagaccagaaaccttccagagaacacagggctgcatcccgagcaaccctctgaagaagggaattaggctttagattttgatagcaatgttccaggaatgaaatatagatgttagcccaagacaccatgacaaaatagcccagccttttgagagtaatttgggaaaagaagctgtcagaagtttctaacttacaaactggtttgaaatttttgatgcccagacagcaagtataaatcattttggaggcttacttttcatgatacaaaagcaattctgtgtgatttttttttttaagaagaaagaaaatgcaagctagttttgagaaaggaaggccaaattgggtcgggggagggtgggagtgaggaagttaaaatcactatagggagaaaaaacttttttcaagatttccaaagagatgaaattttcttaatccttttaagttttcatagtaaacagtatggcagattgggttggttgtcctacctggtctatttttaaaagtcaccttttaaagtgacattattagatacacttaaatgtttccaaggcactctctacattacccttgtttttctctttggatactgtcctgggactaagtgtagatttctgcttcaagcacttctggcattgtgtgtttttgtatgcactccccttcatgccacttcagatgtttatttggatgtggttggggacgagagcagacaccaaggaaagggagttggagagaatgtaagtcctgacctgaaggtcttttgtgatgcatgtataggattgccctgacacacaccctcctttcttgggattataccagccatcttcctgagagttttggagccctctaggatattttttctagtaccccaccccccacccctaaagaaagaccttaatatgttaaaacagcattgcttggagaaggtgtcattgaattccgggacgagccggagcctttaaatgggtgcttccaccactacaggctcctgacacgagtaacaggcactgttgcttagaagaacacacgaagttgccgaacacagggtaaaatttccaaggcgctgatcgttgccctggccagggcctgatgagagccagtcagtacattctttttttcctacagttcttgggtttcaaacttcagtttcagggaatttcaagtcaacaacaggtagaatgaataaacttggttaccagcctaataatgtgaattgctacagaattattcttattatgtaagaaaacaaaaactttatgcagatactttagctataaattgatgtaaaatactgatttttttaaaggaaggagagaacagtatcttgttcaattattatgcaatcaatcagtaaatgtttttaaaatgatactacaggagagcttagtaaggagagggcatggatgggccagtttggcatagttgggagaaatcagtctggtttccatcccagtcggggaagagagaggtgagagggaatcagaacgtacctagttgattccttggtgacaagtgcaatggggtatgggtagaatttattttcagagccaagaggacttgatggttataaataaagttgcctttagcaatggaatttacagatcgatcatgttgttccgaaagatgtgaataggatccacaataacaagttgattcagactaatgtagatatttagattagcaagtattgaacatttgatttcttagactgaggttttaaatgaatttcattatttctcccggtaatacacagagcatcgggattaggaaattagccattttggattctgtctgccacaaacagacctattctaaacagtgctattaaattttagactgttgttcaaatattttattttctcctaaactactttttatggtgatgaataattaagaccatttaaaacacgggagtacaagtatttttttgaattaaattaacttgcaaaaaccaaatttgcagtggttgggttgtttctagacagactttggtatcaatttaaaaccaagataatttttatattctttccaatagaatttcatgacaactcctgcagttttcttaacctacaaaaaaaaaaaaaaagtgctgcaatgatgaacaaagaattatacaaaacctacttttgtatctttattttggaatttcttgttctattataaatatggaagtatccctatttcagaagacatattttgttaaaaatgaattgtacatatttaaatatgtatttttgcacaggtctttttttctgatatcctgttttggtacaattgagatcatctagtatttatttattaattaataaaagtaaatacctttttataatttgaagtgg

SEQ ID NO: 331260 - DNA, 4151 bp, Homo sapiens
gtgccccagaggcagcacacactctgtacgggggacatctcgtgcttttttccctttctcttccatgacgctcagggctaggcattgtcactctcatgcttcacagcctccggtactcagaggcagttctgtctttcctgattagctcctttcctgaaggatctagaaccctgactgggcatgccagtgtgggagtcagcaagcacgcggctatgttttctcttgcagttttgcacatttgggagccggcagataggaagaggctattacgtgtttgactccaggtggaatcgacttcgctgcgccctcaacctcatggtggagaagcatctgaatgcacagctatggaagaaaatcccaccagtgcccagtaccacctcacccatctccacacgtattcctcaccggacaaactctgtgccgacatcacaatgtggagtcagctatctggcagcagccaccgtctctacatccccagtcctgctctcatctacctgcatctccccaaatagcaaatcggtaccagctcatggaaccacactaaatgcacagcctgctgcttcaggggcgatggatcctgtgtgcagtatgcaatccagacaagtgtcctcttcatcctcatccccttccacgccctctggcctttcctcggttccttcctcccccatgtccaggaaacctcagaaattgaaatccagcaaatctttgaggcccaaggagtcttctggtaacagcactaactgtcaaaatgccagtagcagtaccagtggcggctcaggaaagaaacgcaaaaacagttccccactgttggttcactcttcctcctcctcttcctcctcctcctcttcttctcattccatggagtcttttaggaaaaactgtgtggctcactctgggcctccctacccctcaacggtaacatcttcccatagcatcggcctcaactgtgtgacgaataaagcaaatgcggtgaacgtccggcatgaccagtcagggaggggcccccccaccgggagccctgctgaatccatcaagaggatgagtgtgatggtgaacagcagtgattctactctttctcttgggccattcattcaccagtccaatgaactgcctgtcaactcccacggcagtttttcccactcacacactcctctagacaaactcataggaaagaaaagaaagtgctcacccagctcgagcagcatcaacaacagcagcagcaaacccacaaaggttgccaaagtgccagccatgaacaatgtccacatgaaacacacaggcaccatcccaggggcacaaggactgatgaacagttccctccttcatcagccaaaggcacgtccctgacagctgaaaatagcacggggaggaataatgcggacacttttgaggacaagttacacctccactcagcactctggactccacgatgcctttgagtctgttttcccaacctcctgtgggcctcaagggtagaaacctgccgggctgttgttttaacgaggatttccctgaagctatgtctctagcagtgagtactcataaaggacactggatcaagttcagccaccgaattgcttttatcagtgttaaagtggtctgaactgcttgctaccaatctgtgagaagtttttgtttttgttttgttttttaacttgcagtatatcacagagccactcttcaagtagattggctgggcaaaagaatgttttggcaagagcgttactgtagacctttctccctccttccttttactaccatttttttttaacactgtcatctgtaggtcactctccagcagttaggcaccttaactggagaccagaaaccttccagagaacacagggctgcatcccgagcaaccctctgaagaagggaattaggctttagattttgatagcaatgttccaggaatgaaatatagatgttagcccaagacaccatgacaaaatagcccagccttttgagagtaatttgggaaaagaagctgtcagaagtttctaacttacaaactggtttgaaatttttgatgcccagacagcaagtataaatcattttggaggcttacttttcatgatacaaaagcaattctgtgtgatttttttttttaagaagaaagaaaatgcaagctagttttgagaaaggaaggccaaattgggtcgggggagggtgggagtgaggaagttaaaatcactatagggagaaaaaacttttttcaagatttccaaagagatgaaattttcttaatccttttaagttttcatagtaaacagtatggcagattgggttggttgtcctacctggtctatttttaaaagtcaccttttaaagtgacattattagatacacttaaatgtttccaaggcactctctacattacccttgtttttctctttggatactgtcctgggactaagtgtagatttctgcttcaagcacttctggcattgtgtgtttttgtatgcactccccttcatgccacttcagatgtttatttggatgtggttggggacgagagcagacaccaaggaaagggagttggagagaatgtaagtcctgacctgaaggtcttttgtgatgcatgtataggattgccctgacacacaccctcctttcttgggattataccagccatcttcctgagagttttggagccctctaggatattttttctagtaccccaccccccacccctaaagaaagaccttaatatgttaaaacagcattgcttggagaaggtgtcattgaattccgggacgagccggagcctttaaatgggtgcttccaccactacaggctcctgacacgagtaacaggcactgttgcttagaagaacacacgaagttgccgaacacagggtaaaatttccaaggcgctgatcgttgccctggccagggcctgatgagagccagtcagtacattctttttttcctacagttcttgggtttcaaacttcagtttcagggaatttcaagtcaacaacaggtagaatgaataaacttggttaccagcctaataatgtgaattgctacagaattattcttattatgtaagaaaacaaaaactttatgcagatactttagctataaattgatgtaaaatactgatttttttaaaggaaggagagaacagtatcttgttcaattattatgcaatcaatcagtaaatgtttttaaaatgatactacaggagagcttagtaaggagagggcatggatgggccagtttggcatagttgggagaaatcagtctggtttccatcccagtcggggaagagagaggtgagagggaatcagaacgtacctagttgattccttggtgacaagtgcaatggggtatgggtagaatttattttcagagccaagaggacttgatggttataaataaagttgcctttagcaatggaatttacagatcgatcatgttgttccgaaagatgtgaataggatccacaataacaagttgattcagactaatgtagatatttagattagcaagtattgaacatttgatttcttagactgaggttttaaatgaatttcattatttctcccggtaatacacagagcatcgggattaggaaattagccattttggattctgtctgccacaaacagacctattctaaacagtgctattaaattttagactgttgttcaaatattttattttctcctaaactactttttatggtgatgaataattaagaccatttaaaacacgggagtacaagtatttttttgaattaaattaacttgcaaaaaccaaatttgcagtggttgggttgtttctagacagactttggtatcaatttaaaaccaagataatttttatattctttccaatagaatttcatgacaactcctgcagttttcttaacctacaaaaaaaaaaaaaaagtgctgcaatgatgaacaaagaattatacaaaacctacttttgtatctttattttggaatttcttgttctattataaatatggaagtatccctatttcagaagacatattttgttaaaaatgaattgtacatatttaaatatgtatttttgcacaggtctttttttctgatatcctgttttggtacaattgagatcatctagtatttatttattaattaataaaagtaaatacctttttataatttgaagtgg

SEQ ID NO: 331261 - DNA, 2472 bp, Homo sapiens
cgttgctgtcgaaaaagggtgaaagagaaacttggcgacctcccggaggagttcgcgaagcgaccaggagcgtgtgcccatcgtcctcacccggcacccaattccaccacagagtcgggatttcgtcggtgatcgtgatggggtgcttttatttttctctttgattttcaaaaaatgtctatgtgactgtccctatcttaaggggaagttgaaagtgggggcgggggtgctcaatgagaaacgttgccttgtgtgtagttgtttggagcacactgcaaattatattggcatctctttccaaaagtcactttgattcaacttcgatagctttctcgtaaatggcacgtttaggtggtgagaggtggatgaggaaacaggcaccagtgcagctgatttgacctccagtgggatagatacgattagcaccaggatcgtgtctcattttgaacccaggctggagcgcagtggcacaatcgtggcttactgcagcgttgacctcctggcctcaagcagtcctcccactgcagcttctcaagaagccggggatacagatctgaacagaattaagacgaacgagctttcacaattgcagcagatgaagatccattggtaaattgatcaggatttttggcctaccctccaaagaaaaggagcggaaagaatgtcggagcgggccgcggatgacgtcaggggggagccgcgccgcgcggcggcggcggcgggcggagcagcggccgcggccgcccggcagcagcagcagcagcagcagcagcagcagccgccgcctccgcagccccagcggcagcagcacccgccaccgccgccacggcgcacacggccggaggacggcgggcccggcgccgcctccacctcggccgccgcaatggcgacggtcggggagcgcaggcctctgcccagtcctgaagtgatgctgggacagtcgtggaatctgtgggttgaggcttccaaacttcctgggaaggacgggacagaattggacgaaagtttcaaggagtttgggaaaaaccgcgaagtcatggggctctgtcgggaagacatgccaatatttggtttctgtccagcccatgatgatttctacttggtggtgtgtaacgactgtaatcaggttgtcaaaccgcaggcatttcaatcacattatgaaagaagacatagctcatccagcaagccgcctttggccgttcctcccacttcagtattttccttcttcccttctctgtccaaaagcaaaggaggcagtgcaagtggaagcaaccgttcttccagtggaggtgttcttagcgcatcctcatcaagttccaagttgttgaaatcacccaaagagaaactgcagctcagggggaacaccaggccaatgcatcccattcagcaaagtagagttccccatggtagaatcatgacaccctctgtgaaagtggaaaagattcatccgaaaatggatggcacactactgaaatctgcggtggggccaacctgtcctgctactgtgagttccttagtcaagcctggccttaactgcccctcaataccaaagccaaccttgccttcacctggacagattctgaatggcaaagggcttcctgcaccgcccactctggaaaagaaacctgaagacaattccaataataggaaatttttaaataagagattatcagaaagagagtttgatcctgacatccactgtggggttattgatctcgacaccaagaagccctgcacccggtctttgacatgcaagacacattccttaacccagcgcagggctgtccagggtagaagaaaacgatttgatgtgttattagccgagcacaaaaacaaaaccagggaaaaggaattgattcgccatccggactctcagcaaccaccgcagcctctcagggacccgcatcccgcccctcctagaacgtcacaggagccgcaccaaaaccctcacggagtgattccttccgaatcaaagccttttgtagctagtaaacctaaacctcacacccccagtcttccaaggcctccaggctgccctgctcagcaaggtgggagtgcccccattgaccctcctccagtccatgaatctccacaccctcccctgcctgccactgagccagcttctcggttatccagtgaggagggcgaaggcgatgacaaagaagagtctgttgaaaaactggactgtcattattcaggtcatcatcctcagccagcatctttttgcacatttgggagccggcagataggaagaggctattacgtgtttgactccaggtggaatcgacttcgctgcgccctcaacctcatggtggagaagcatctgaatgcacagctatggaagtgagtgcctgttgttcttgggagaggagctgactttacacagtgctgcattgtcttttatttcctgtgagactgatgttatgaagatatgcttatctaaacaaaactggcctttggccctgagaagaa

SEQ ID NO: 331262 - DNA, 2436 bp, Homo sapiens
cgttgctgtcgaaaaagggtgaaagagaaacttggcgacctcccggaggagttcgcgaagcgaccaggagcgtgtgcccatcgtcctcacccggcacccaattccaccacagagtcgggatttcgtcggtgatcgtgatggggtgcttttatttttctctttgattttcaaaaaatgtctatgtgactgtccctatcttaaggggaagttgaaagtgggggcgggggtgctcaatgagaaacgttgccttgtgtgtagttgtttggagcacactgcaaattatattggcatctctttccaaaagtcactttgattcaacttcgatagctttctcgtaaatggcacgtttaggtggtgagaggtggatgaggaaacaggcaccagtgcagctgatttgacctccagtgggatagatacgattagcaccaggatcgtgtctcattttgaacccaggctggagcgcagtggcacaatcgtggcttactgcagcgttgacctcctggcctcaagcagtcctcccactgcagcttctcaagaagccggggatacagatctgaacagaattaagacgaacgagctttcacaattgcagcagatgaagatccattggtaaattgatcaggatttttggcctaccctccaaagaaaaggagcggaaagaatgtcggagcgggccgcggatgacgtcaggggggagccgcgccgcgcggcggcggcggcgggcggagcagcggccgcggccgcccggcagcagcagcagcagcagcagcagcagcagccgccgcctccgcagccccagcggcagcagcacccgccaccgccgccacggcgcacacggccggaggacggcgggcccggcgccgcctccacctcggccgccgcaatggcgacggtcggggagcgcaggcctctgcccagtcctgaagtgatgctgggacagtcgtggaatctgtgggttgaggcttccaaacttcctgggaaggacgggacagaattggacgaaagtttcaaggagtttgggaaaaaccgcgaagtcatggggctctgtcgggaagacatgccaatatttggtttctgtccagcccatgatgatttctacttggtggtgtgtaacgactgtaatcaggttgtcaaaccgcaggcatttcaatcacattatgaaagaagacatagctcatccagcaagccgcctttggccgttcctcccacttcagtattttccttcttcccttctctgtccaaaagcaaaggaggcagtgcaagtggaagcaaccgttcttccagtggaggtgttcttagcgcatcctcatcaagttccaagttgttgaaatcacccaaagagaaactgcagctcagggggaacaccaggccaatgcatcccattcagcaaagtagagttccccatggtagaatcatgacaccctctgtgaaagtggaaaagattcatccgaaaatggatggcacactactgaaatctgcggtggggccaacctgtcctgctactgtgagttccttagtcaagcctggccttaactgcccctcaataccaaagccaaccttgccttcacctggacagattctgaatggcaaagggcttcctgcaccgcccactctggaaaagaaacctgaagacaattccaataataggaaatttttaaataagagattatcagaaagagagtttgatcctgacatccactgtggggttattgatctcgacaccaagaagccctgcacccggtctttgacatgcaagacacattccttaacccagcgcagggctgtccagggtagaagaaaacgatttgatgtgttattagccgagcacaaaaacaaaaccagggaaaaggaattgattcgccatccggactctcagcaaccaccgcagcctctcagggacccgcatcccgcccctcctagaacgtcacaggagccgcaccaaaaccctcacggagtgattccttccgaatcaaagccttttgtagctagtaaacctaaacctcacacccccagtcttccaaggcctccaggctgccctgctcagcaaggtgggagtgcccccattgaccctcctccagtccatgaatctccacaccctcccctgcctgccactgagccagcttctcggttatccagtgaggagggcgaaggcgatgacaaagaagagtctgttgaaaaactggactgtcattattcaggtcatcatcctcagccagcatctttttgcacatttgggagccggcagataggaagaggctattacgtgtttgactccaggtggaatcgacttcgctgcgccctcaacctcatggtggagaagcatctgaatgcacagctatggaagaaaatcccaccagtgcccagtaccacctcacccatctccacacgtattcctcaccagatcctgggatccagacacaacctgcggtaccgact

SEQ ID NO: 331263 - DNA, 466 bp, Homo sapiens
cccattttttaagatctttcctctgttttccaaattttctatattgtaattatagcacttttttgatgaaaaattacttctaaacttttgtgccaagttactcagcacttttactatttgagaacacggaaactgatggaagagtgctacaaacttacacaaatgccaacagaaaagtgaggagataagattccttataaatatcatcaatgtgaaatggtaatacacaacacacattagttgtgtaccatatgaaatggctggtcaaacatctcactcactgtcccactggacaacttatctatgggcgttacagaaataatttgttggcattatgactcagaccaccagcagactatggtacatataaaatcttctcattaagctgctacagatgttgtgaatactatgttagttgtttgtttctagttttgattttttattattgctgttatgccaactcggg

SEQ ID NO: 331264 - DNA, 119 bp, Homo sapiens
ggaaaatatttgggccaacttccaactgattatttgttaacgtttttttttttctcagatgaagccttgtctaactaaaaatcccctatttcttatttaatcacccagcctccccttgg

SEQ ID NO: 331265 - DNA, 613 bp, Homo sapiens
agtttcatctcatggaggcaggatttagaaagtgtagatctctttgaagagaggtttcagggagagaggtttcagggattagggtccagccagctccctcccgatgccagccttacctgctaagtgccttctaagctttcccactcaccctgtctgtgtttccagcctcttgtgtttatctctctctccagcccacactgccttttggccgaaaagggccataccttgagtccctgttgcatgaagttggatttcctttcatgtgtcctcagaggccctggcttgggtgttgtcatggcattttgtgatttgatggaggaggagagatagagcggccccatcgcctgtttgcgctagcctctctcagcttgaccgatgactgtgatgacatctgtggacagtaagcaggtccctggtgggattgagtttcctgagctattccatatcagcattcgagaagccagtacactggctgctaattgtgctagcttgtacctggggctgggtttgggtttcaggtccctcccttcctccctttctcccaatgcttggtcttattaggaaacattgcatcgctaaaataacaattactctacagatagagtaatagaag

SEQ ID NO: 331266 - DNA, 237 bp, Homo sapiens
aagcctcgccattgcagggagacagagaaatatactaattttgcatttaagtacagaggaatccctcctgacattttgttagaaagcctgtcatgtgtcgccttgctgctgtgagtaataagacagcacagtcccctgggctggcctgataatagtcaaaataccttacatgtacacaaggtttcctggtttaccaaaaaacattttctttcaccagcgaagtgaggatcagtatcc

SEQ ID NO: 331267 - DNA, 278 bp, Homo sapiens
tctcagctcactgcaagccccgcctcctgggttcacaccattttcctgcctcagcttcccgagtaactgggactacaggcacccgccactacgcccggtgtgtgagacggggtttcaccgtgttagccaggatggtctcgatctcctgacctcgtgatctgcccgcctcagcctcccaaagtgctgggatgacaggcgtgagccacggcacccggccatgtatggtcggttttacactgagccattccattcccagggacgtgcaggagacagatgcc

SEQ ID NO: 331268 - DNA, 1564 bp, Homo sapiens
agggggcagggcctctgggatctggggtcacgagttccaggaggcctgcttctgcttctgcccagcagttcactcttccctccactgcagctgaagcttgagctgctgcggggcccacctggccagaggcagaagggagccctccgtcccaggcagcgtcctggtgggtgtctgtcctgtgccagacactggccacagaggctgagaaaggagaggaccccagcctgcctctggaggcccaggggaggcagtgaagggcccaaggctggtgatgcaggagtttccagagcgcagggaaatacagagcaagaaacgccagccctcagctccactggggagccacgcaacctctaccggtgctgaggggttacaaagctctgttaccagccccattcctcctggatgggcgaggtcggtccgtatcacacccccaacctcttgtgctctgcgacctcagaatacacggagctgtgtccacaggcctcagcggctgtgagcccctcgcctacactggggggtcctcagctgacacctgagccagtgtcctgtgccccagtggtgccaggcagagtccccctccctgacctgacttgtgcacctcgtcacccaccgccagcagtgtccccccacaacaggcttgctcagtacagcacccaacccaagtccccagcacccacaccccagtgagtttcctgtgccctataggctcagctgcttctcgtctccccccacttgggatccttggaacagggagtggttcttatttaggtccctgaggttaccaagcacaggctttgctcttagcagccgccactccagtgatgaagccgttagcagactggcctctgcagagctctgcggggaggtgcctggcttctccggcctccaccctggcccagagctgcctcctgagcagcggatcccaacctgcctgcccctggggctgggtctccagcagtcaggactgagttgttgctagctgctgacaggtgtggggcgaagggggcgcatttgccgcatgtccccattggcagcatctccacgccttcccttgtgacacctccaaccagaatagagcaggtatgtgggagcccgcacctgctcccccagcgccccggggtcgtcttctgcctgctccttctgtcctccacactgaagagtgtgctccagctggggatgggcatgtgtgacgctggggaatggatacctgtgaaatggtggagtgtgcatcaagtctaaatagccgctcgcaggatctgggggctttttgttttcagaaacctgatctgatctttataaaaagtgctcccccactcagtcagcctgggtgtccctcccgtccaggccagcagcgctgtctggctcggcaaggaggggctgaaactggagagcccctgggaaggctcttgtgggccaggtggcagcggggagggtggctcttgttccccgccctcatcctagcgttcagcagactgccccacaccacaggtttccattttcacccttgggttaagagaaaagcagaaataaaaagtttctaatgttgcttgcgaaattcagcact

SEQ ID NO: 331269 - DNA, 401 bp, Homo sapiens
tttttttttttttttttctgggacggaatctcactctgtcgcccagtctggagtacagtggcacaatcttagctcactgcaaactctgcctcccgggttcatgccattctcctgcctcagcctcctgagcttttcaatttcttatcaagctaaacatataattcagcaagcatgctcctagatttttactaaactgatttgttaatttttgcccacaaaaattctatttatatttttatagatgctttattcataattaccccaaactggaagcaatcaagacgttccccaagaggagaacagatagtctgtgatacatccatatggtgagataatattcaatgataaaaagataagagcaatcaaatcatgaaaaaaatgaaagaatcttaaatgcaaat

SEQ ID NO: 331270 - DNA, 143 bp, Homo sapiens
tgaaggtgaaaaacttggtgggaacatagcctaaaagtagacaaggtatgcatttcaaagcatagcatttttgacagagtcagaattggctctgttaatatttttacctctatagcttagggtagactagcagagccaggtat

SEQ ID NO: 331271 - DNA, 145 bp, Homo sapiens
tgatccaaatatgccatgtttagtggtcaaacaagaccagaaaaagaaaatgggaaacctctcacactttccaaaatcagtgacccctttacttgatgggccgagggctctcacagcgtagcttttttttttttttttttttttt

SEQ ID NO: 331272 - DNA, 470 bp, Homo sapiens
aagggcctctttggcctggcgggcagccggccctccactccccagctgtcttcccctggagggagatgctgaccagctggaaccttattccctcctattgaggccaaatgaggggaggaatggtggagtggctttctgggggcagggaggcagctgctgaagccaggcaaggaggaagaggaggatttccctgcctgccgaaggcctcggccttgggagaaaggcagactgctgggccagccttatctctgccaggcctgtccagcctctcatctcctgaaaaagaggattctgcccctcactgggcaggagagaaaagcagggctgcagcagcaacaagcttatagccagcccggcaagggaagtgctgggcctggcacaggatcgcccacgattggcctggcttgggtttgaagagggccttgaaggggctggggtagtgcgattgtgagtggcccttactaggctca

SEQ ID NO: 331273 - DNA, 750 bp, Homo sapiens
ctcagcctcccaagtagctgggactacaggcgcccgccaccacgcctggctaattttttgtatttttttaagtagagatggggtttcatcatgttagccaggatggtgtcgatctcctgacctcatgatccacccgccttggcctcccaaagtgctgggattacaggtgtgaaccaccacacccggccttttttttccttttttaagatagggtctcactctgttgccgaggttggagtgcagtggcaaaatctccatgaactacagcctcaacctcttgggctcaagtgatcctgcctcctcactcctcagcctcctgagtagctgggactacaaacatgagccaccaagcctggctaatttaaaaaattgttttgtagggacttactatgttgtccagggcagtcttgaactcctgggatcaagcgatcctcccaccttggcctcccaaagtgttgggattacaggcatgaaccaccatgcccggcctcttaagtgctttgtcagtggctcatgctctgtgtgctgtgagaagaagggtgaccatgacccagttctgccagcattgcctgtagtttagcaaacagctgagacaatatcttattttaaatgctgctttgctcatttgttcagcaaatgtttattgagcacctgctaggtgccaggcactgaattaagggctggggttacagcagtgagcaaaacagacacaattacaatgctcgtgacatactattccttgggaagata

SEQ ID NO: 331274 - DNA, 487 bp, Homo sapiens
ctttaggttgcacagatacaaaaagttggaagggctgaataaaagacaagctcctgttcaagtgacctcactgctttctgatgacccccactggctatgccacatttctggtgctgaatggatgcacaacacgtccgtactcatctgggcttcgatgcagttgttcaatttgaaaagtaaagcagtactttaatggtcccttcagttctcacactcagtgtttcaatatttgtcctgttctacctggcttgtaatcaatcctaaaacttcctcacatttccagatgatggaatgaacaatcctgcgtatggcttccaaactgaaaactcagaacttaaggctctggtctgaagtggccacagttcatctctggccttgacaagccatttgttggccgtggaactcattacttgaaagagatttgctacagctcccgttatggtgcctttagaagaaataaagatctcctgcctcacttccaatactt

SEQ ID NO: 331275 - DNA, 380 bp, Homo sapiens
ctttaggttgcacagatacaaaaagttggaagggctgaataaaagacaagctcctgttcaagtgacctcactgctttctgatgacccccactggctatgccacatttctggtgctgaatggatgcacaacacgtccgtactcatctgggcttcgatgcagttgttcaatttgaaaaatgatggaatgaacaatcctgcgtatggcttccaaactgaaaactcagaacttaaggctctggtctgaagtggccacagttcatctctggccttgacaagccatttgttggccgtggaactcattacttgaaagagatttgctacagctcccgttatggtgcctttagaagaaataaagatctcctgcctcacttccaatactt

SEQ ID NO: 331276 - DNA, 158 bp, Homo sapiens
ctggtgtgtgtttgctggtagctggtgttcggaggtagctggtgtttggtggtagctggtgttttgtagtagtagctggtgtttggtagtagctggtgtttggtggtagctggtgtttgttcagtggtagctggtgtttgttcagtggtagctggtgt

SEQ ID NO: 331277 - DNA, 203 bp, Homo sapiens
agagcctccacctccagccacgggtttgccccatgctccctccttgctgagctcctgcaaccttgcttacttcctagagaaagcaccagcctctgagtccccctgctcagccctttcccatctacaggaggtctcaccacccagtcttaggcccacgaaatggccttggcacctgccaaagactttctcaagtttgtgaaaag

SEQ ID NO: 331278 - DNA, 192 bp, Homo sapiens
ctggttccagagccagattgcctgggttcaagtcccggatctgcatacattcacgtgtgaccttgggctggcctctggcttcagtttcctcatctgtagaatggggataataatagtatctactttacagggctgatgtggggctcagatgagagaattcatgaagtgcttagcatgcttctgggtacatag

SEQ ID NO: 331279 - DNA, 2373 bp, Homo sapiens
ctcgctgcagcgggagctccaggtttatcctcagtgttctgtgtcctgtgcttatagaggcccgtcctctgtggccgtgtgacctgcaagtattgggagagccacagctaaaccccgggacccctggaagcctagaaatgggaccattgcaatttagagatgtggccatagaattctctctggaggagtggcattgcctggacactgcacagcggaatttatatagggatgtgatgttagagaactacagaaacttggtcttccttggtattgttgtctctaagccagacctggttacctgtctggagcaaggaaaaaaacctttaactatggaaagacatgagatgattgccaaacccccagttatgagttctcattttgcccaagacctttggccagagaacatacaaaattctttccaaatagggatgctgagaagatatgaagaatgcagacatgacaatttacagttaaaaaaaggctgtaaaagcgtgggtgagcataaggtgcacaaaggaggttataatggacttaaccaatgtttgacaactacccagaaagaaatatttcaatgtgataaatatggaaaagtctttcataagttttcaaattcaaacacatataagacaagacatactggaataaatcttttcaaatgtataatatgtggcaaagcttttaaacggtcctcaacccttactacacataagaaaattcatactggagagaaaccttacagatgtgaagaatgtggcaaagcttttaaccaatctgcaaaccttactacacataagagaattcataccggagagaaaccctacagatgtgaagaatgtggcaaagcctttaagcagtcctcaaaccttactacacataagaaaattcatactggagagaaaccctacaaatgtgaagaatgtggcaaagccttcaaccgatccacagaccttactacacataagatagttcatactggagagaaaccctacaaatgtgaagaatgtggcaaagcctttaagcacccctcacacgttaccacacataagaaaattcatactagagggaaaccctacaactgtgaagaatgtggcaaatcctttaagcactgctctaaccttactatacataagagaattcatacaggagagaaaccctacaaatgtgaagaatgtggcaaagcctttcacctatcctcacaccttactacacataagatacttcatactggagagaaaccctacagatgtagagaatgtggcaaagcttttaaccattccacaacccttttttcacatgagaaaattcatactggagagaaaccctacaaatgtgatgaatgtggcaaaacctttacctggccctcaatcctctccaaacataaaagaactcatactggagagaaaccctacaaatgtgaagaatgtggcaaatcctttactgcatcctcaactctaactacacataagagaattcatactggagagaaaccttacaaatgtgaagaatgtggcaaagcttttaactggtcctcagaccttaataaacataagaaaattcatattgaacgaaaaccctacatagtgaagaatgtgacagatcttttaaatgttcctccacttttaattagcataagataattcatactggagagaaaccctatgaatgtgatgaatgtgggaaagcctttaaccagccctcgactcttagtaaatttgagagtttatatggaacacaaaccctacaaatataaagaatgtgacaaagctttttaaggaagttctcaacccttattacacataattcataccaaacagaagccctacaagtgtgaagaatgtggcaaaacctataaacctataacaagttctcaattcctttttttttgagatggagtttcactcttgtcaccgaggctggagtgcaatgacatgatctccgttcactgcaatctctgcctcctgggtttaagccattcttctgcctcagcctcccaagtagctgggattacaggtgcccaacaccacgcctggctaatttttggatttttagtagagatggggtttcacaatgttggccaggctggtctcgaactcctgacctcaggtgatccacctgccttggccttccaaagtgctggggttacaggcgtgagccaccatgcctggctacaagttcttaattcttaagagacaccatgcctggctacaagttcttaattcttaagagacatggcgataattcatgctgaagaggaaatctggaaacctgaaagatgcgacattgcttttaccaacacctccacatttcctatacataaaaataaattatactagtgtaataccctagaaatgtataaaatgtgacaaagccttt

SEQ ID NO: 331280 - DNA, 549 bp, Homo sapiens
ctcgctgcagcgggagctccaggtttatcctcagtgttctgtgtcctgtgcttatagaggcccgtcctctgtggccgtgtgacctgcaagtattgggagagccacagctaaaccccgggacccctggaagcctagaaatgggaccattgcaatttagagatgtggccatagaattctctctggaggagtggcattgcctggacactgcacagcggaatttatatagggatgtgatgttagagaactacagaaacttggtcttccttggtgaggacaacttgaatatataattcataatataccctgaagattttatttctcttttttgtagaatgtttgttagtaatttattctttgcaaagtggtagaattacaggcataagccactgcgcctggccatattttatttatatttctgtataatttttattatgaccacaaagataaccctgtaatcaataacaatttaattgtacattcacaataactaaaagtgtataattacactgtttgtactacaaaggataaacgctagaggtgatggatacc

SEQ ID NO: 331281 - DNA, 2030 bp, Homo sapiens
ctcgctgcagcgggagctccaggtttatcctcagtgttctgtgtcctgtgcttatagaggcccgtcctctgtggccgtgtgacctgcaagtattgggagagccacagctaaaccccgggacccctggaagcctagaaatgggaccattgcaatttagagatgtggccatagaattctctctggaggagtggcattgcctggacactgcacagcggaatttatatagggatgtgatgttagagaactacagaaacttggtcttccttggtattgttgtctctaagccagacctggttacctgtctggagcaaggaaaaaaacctttaactatggaaagacatgagatgattgccaaacccccagttatgagttctcattttgcccaagacctttggccagagaacatacaaaattctttccaaatagggatgctgagaagatatgaagaatgcagacatgacaatttacagttaaaaaaaggctgtaaaagcgtgggtgagcataaggtgcacaaaggaggttataatggacttaaccaatgtttgacaactacccagaaagaaatatttcaatgtgataaatatggaaaagtctttcataagttttcaaattcaaacacatataagacaagacatactggaataaatcttttcaaatgtataatatgtggcaaagcttttaaacggtcctcaacccttactacacataagaaaattcatactggagagaaaccttacagatgtgaagaatgtggcaaagcttttaaccaatctgcaaaccttactacacataagagaattcataccggagagaaacccttacaaatgtgaagaatgtggcaaagcttttaactggtcctcagaccttaataaacataagaaaattcatattgaacgaaaaccctacatagtgaagaatgtgacagatcttttaaatgttcctccacttttaattagcataagataattcatactggagagaaaccctatgaatgtgatgaatgtgggaaagcctttaaccagccctcgactcttagtaaatttgagagtttatatggaacacaaaccctacaaatataaagaatgtgacaaagctttttaaggaagttctcaacccttattacacataattcataccaaacagaagccctacaagtgtgaagaatgtggcaaaacctataaacctataacaagttctcaattcctttttttttgagatggagtttcactcttgtcaccgaggctggagtgcaatgacatgatctccgttcactgcaatctctgcctcctgggtttaagccattcttctgcctcagcctcccaagtagctgggattacaggtgcccaacaccacgcctggctaatttttggatttttagtagagatggggtttcacaatgttggccaggctggtctcgaactcctgacctcaggtgatccacctgccttggccttccaaagtgctggggttacaggcgtgagccaccatgcctggctacaagttcttaattcttaagagacatggcgataattcatgctgaagaggaaatctggaaacctgaaagatgcgacattgcttttaccaacacctccacatttcctatacataaaaataaattatactagtgtaataccctagaaatgtataaaatgtgacaaagcctttatatgattgtcatacatgattgtaggtgatagaagtcatactgccaaaactcctgtaagtgtgaagaatgtggcaaaatattttattagtgcttataccttatttcacaggaaagctcttatccttgagaaaaattgtgcaaatacaaagaatatggaaaaaccattaatgcctactcacatcttactgaacagaagaaggttcatagttaataaagcattaaaagtgcaattactgtcaaaaaatctttcagaaaatagaagtctttaaagtgaagaatatttattctgaagacagccattacaaatataaagggggttgtagtgcctttacttgtgtcacagatcttagtgcacacatgtagt

SEQ ID NO: 331282 - DNA, 2067 bp, Homo sapiens
ctcgctgcagcgggagctccaggtttatcctcagtgttctgtgtcctgtgcttatagaggcccgtcctctgtggccgtgtgacctgcaagtattgggagagccacagctaaaccccgggacccctggaagcctagaaatgggaccattgcaatttagagatgtggccatagaattctctctggaggagtggcattgcctggacactgcacagcggaatttatatagggatgtgatgttagagaactacagaaacttggtcttccttggtattgttgtctctaagccagacctggttacctgtctggagcaaggaaaaaaacctttaactatggaaagacatgagatgattgccaaacccccagttatgagttctcattttgcccaagacctttggccagagaacatacaaaattctttccaaatagggatgctgagaagatatgaagaatgcagacatgacaatttacagttaaaaaaaggctgtaaaagcgtgggtgagcataaggtgcacaaaggaggttataatggacttaaccaatgtttgacaactacccagaaagaaatatttcaatgtgataaatatggaaaagtctttcataagttttcaaattcaaacacatataagacaagacatactggaataaatcttttcaaatgtataatatgtggcaaagcttttaaacggtcctcaacccttactacacataagaaaattcatactggagagaaaccttacagatgtgaagaatgtggcaaagcttttaaccaatctgcaaaccttactacacataagagaattcataccggagagaaacccttacaaatgtgaagaatgtggcaaagcttttaactggtcctcagaccttaataaacataagaaaattcatattgaacgaaaaccctacatagtgaagaatgtgacagatcttttaaatgttcctccacttttaattagcataagataattcatactggagagaaaccctatgaatgtgatgaatgtgggaaagcctttaaccagccctcgactcttagtaaatttgagagtttatatggaacacaaaccctacaaatataaagaatgtgacaaagctttttaaggaagttctcaacccttattacacataattcataccaaacagaagccctacaagtgtgaagaatgtggcaaaacctataaacctataacaagttctcaattcctttttttttgagatggagtttcactcttgtcaccgaggctggagtgcaatgacatgatctccgttcactgcaatctctgcctcctgggtttaagccattcttctgcctcagcctcccaagtagctgggattacaggtgcccaacaccacgcctggctaatttttggatttttagtagagatggggtttcacaatgttggccaggctggtctcgaactcctgacctcaggtgatccacctgccttggccttccaaagtgctggggttacaggcgtgagccaccatgcctggctacaagttcttaattcttaagagacaccatgcctggctacaagttcttaattcttaagagacatggcgataattcatgctgaagaggaaatctggaaacctgaaagatgcgacattgcttttaccaacacctccacatttcctatacataaaaataaattatactagtgtaataccctagaaatgtataaaatgtgacaaagcctttatatgattgtcatacatgattgtaggtgatagaagtcatactgccaaaactcctgtaagtgtgaagaatgtggcaaaatattttattagtgcttataccttatttcacaggaaagctcttatccttgagaaaaattgtgcaaatacaaagaatatggaaaaaccattaatgcctactcacatcttactgaacagaagaaggttcatagttaataaagcattaaaagtgcaattactgtcaaaaaatctttcagaaaatagaagtctttaaagtgaagaatatttattctgaagacagccattacaaatataaagggggttgtagtgcctttacttgtgtcacagatcttagtgcacacatgtagt

SEQ ID NO: 331283 - DNA, 1702 bp, Homo sapiens
ctcgctgcagcgggagctccaggtttatcctcagtgttctgtgtcctgtgcttatagaggcccgtcctctgtggccgtgtgacctgcaagtattgggagagccacagctaaaccccgggacccctggaagcctagaaatgggaccattgcaatttagagatgtggccatagaattctctctggaggagtggcattgcctggacactgcacagcggaatttatatagggatgtgatgttagagaactacagaaacttggtcttccttggtattgttgtctctaagccagacctggttacctgtctggagcaaggaaaaaaacctttaactatggaaagacatgagatgattgccaaacccccagttatgagttctcattttgcccaagacctttggccagagaacatacaaaattctttccaaatagggatgctgagaagatatgaagaatgcagacatgacaatttacagttaaaaaaaggctgtaaaagcgtgggtgagcataaggtgcacaaaggaggttataatggacttaaccaatgtttgacaactacccagaaagaaatatttcaatgtgataaatatggaaaagtctttcataagttttcaaattcaaacacatataagacaagacatactggaataaatcttttcaaatgtataatatgtggcaaagcttttaaacggtcctcaacccttactacacataagaaaattcatactggagagaaaccttacagatgtgaagaatgtggcaaagcttttaaccaatctgcaaaccttactacacataagagaattcataccggagagaaacccttacaaatgtgaagaatgtggcaaagcttttaactggtcctcagaccttaataaacataagaaaattcatattgaacgaaaaccctacatagtgaagaatgtgacagatcttttaaatgttcctccacttttaattagcataagataattcatactggagagaaaccctatgaatgtgatgaatgtgggaaagcctttaaccagccctcgactcttagtaaatttgagagtttatatggaacacaaaccctacaaatataaagaatgtgacaaagctttttaaggaagttctcaacccttattacacataattcataccaaacagaagccctacaagtgtgaagaatgtggcaaaacctataaacctataacaagttctcaattcctttttttttgagatggagtttcactcttgtcaccgaggctggagtgcaatgacatgatctccgttcactgcaatctctgcctcctgggtttaagccattcttctgcctcagcctcccaagtagctgggattacaggtgcccaacaccacgcctggctaatttttggatttttagtagagatggggtttcacaatgttggccaggctggtctcgaactcctgacctcaggtgatccacctgccttggccttccaaagtgctggggttacaggcgtgagccaccatgcctggctacaagttcttaattcttaagagacaccatgcctggctacaagttcttaattcttaagagacatggcgataattcatgctgaagaggaaatctggaaacctgaaagatgcgacattgcttttaccaacacctccacatttcctatacataaaaataaattatactagtgtaataccctagaaatgtataaaatgtgacaaagccttt

SEQ ID NO: 331284 - DNA, 620 bp, Homo sapiens
cacgctcggctaggttacgctggttctgatagtgtcttggtggaacgttgctgaatgaaggcaagatctccagttccctgttggtccagcactgggcctagggaccaggatagtggtggggcctcaggagtctcatccagtaggaggcagggggctagagataggctgtaagcttgggaaatgactacatggaaaaagtattcaccaaggaggggtaattcactgcctgtgtgatgagtagcacatgggaagttctgacattcatgcccgtaaagggctgcttcctcttcagcaggaaatgctgatgggaaggcccagagagagcagccacaggcaaagggcacagggctggtggcaaaataaccatagctcatccaggctgagtctcctagaccaaggtacctgagcacttcccttcctcatgctccactcagcaactctgaggaccaaacctgggctgacagcttggagatggtcccagggctgtcccacagcccagactgagaccagggcatctgacccgctttgagggagggtactggctaacagggaaagacacagacacatcctggattgggccatctgccactggaatggcagcccagagtctaggttctaga

SEQ ID NO: 331285 - DNA, 204 bp, Homo sapiens
tcataaggatagaatgcagtaaggttgggacatttgaaagcaggttcccaggaggttcagcttagtagcattcacaccctcacttctggaaaagtcaatgtttccttcttcttctttctcttcccgagctgtgagttcagggtttcccttccctcccagtggatttcctaggccaggaagatgtcatgcctccagagccctcca

SEQ ID NO: 331286 - DNA, 128 bp, Homo sapiens
caggaatttgacaggtaccagtctgatgtgatccacgtgggctagggtcataaaatatctacatgggagccatggagaatggtcgatgtgacctcacattggtgacaaaattccttttactgtctggc

SEQ ID NO: 331287 - DNA, 243 bp, Homo sapiens
  misc_feature (19)..(19): n is a, c, g, or t
ctagacgatcccatcgtantatgtaccatgatttataattatttaaattacttattataaaataagacacagaagttgctgtgggttttctggcatgagccctttggattctgtgttttagcattcatgatcattctctgggccactttattcttacacaacctttttttttttttttttttaaaatacttcaagttctagggtacctgtgcacaacgcgcaggttggttacattatgttaca

SEQ ID NO: 331288 - DNA, 483 bp, Homo sapiens
agggattttcgtaaattccctgagccagtaagtctcccggcctgtgatgagagctgtgggtctgtggggctcacctggtgtgctccggtggctgccaactgtcttagcctttgtgtgccacctgcacagagtctccaggtcagtcagctgggaggttttcctgggcctgtgcgcagtcatctccagacatacgctagagcctttcagagccccatggacatctccagcttttccttcttgggttcttggccagcctcttgtttgcccaactagtgccccagcctctggcagctgcagggtgaaacagttgccactggttccttttgacaaaagccctcaggaactgggctgttttcactgagtgagatcaaataaagacaaatcctgccatgaggcttttccagagggtggccaggtaaacccaacagtgacagttctctgggcctggggccttgaggacccgttctccattgagtggctacc

SEQ ID NO: 331289 - DNA, 490 bp, Homo sapiens
acatatgtttttatgtacttggaccagacaataaataatgaatataatacagtcataaactgtatggaatattagaaggtatggtggaaaaattaatcagggtacaggtgggtttggtattggaagtgcattgttattctaactagtttgggcagactagaactctcagagaaggtgacatttgagcatttatttgaagggggggaatacattggtcctggggatatcacaaggaagagtgcttcagcaataggaacagccaatgcaaaggtttctgatgtcctatatgttctatatttgctccacatatgtgccgtatgtgttcccgggtagaagtgatggtggtgtccatgaatgttcttctctgattgcttctattttctcagtgaaataataagcaggattgttagctgagagtgaggatggaaaagggaaaggtggtttgaaggaagataagagtgggtgatacagtcctctatcagtatgggag

SEQ ID NO: 331290 - DNA, 432 bp, Homo sapiens
gggcctccggctgtaccccctgaatactgccaaggtcgcagctttctggcaggcagagctgactgggctgagcagtgccaccacggctggggctgctgggatgtcttgggaggagggttctattgccgtggcgtttgtttaccaaaggcccttccagagggagatctgcagaggaaaagagaggctgccttctcggcttggctctgagctgttcctacttgagacctgtgggtgctagaggaaaggccacacctcatgcctgtggacagacaggcctgggggctggatgcagtcacctttcaggctccatgcgggtctggcttctcttatcccttgcgtccatgcgtgggaagccctgagccctcccacgggacaggaggagccgtgaagggaggaagccccgacttcggggtgatcgtgcgtaagttccca

SEQ ID NO: 331291 - DNA, 523 bp, Homo sapiens
ctttactggggtgtaacaaacacacgataaactgcgcatattccagtgttcatgtggatgagtttggacatatgcacacacttccgaaaccaccagcacaatcaagacagcagacatatccatcgcccccaagggtgtccttgtgtctttttgtcattcatccctcccggccgccccatccacactcccatcgcctgccgactgtggctgatctgctttctgcggctgtggattagtttgcgttctctacaattttctgaagcaccagttagcccagatgcttctcatctttggagttgagctgcaggctggagacctggaaggccctcgcagcgcctgctcccatcctctcacctcacgaaagcgcaggaatgtgggtttggagccaatgaaaagtactggaatctggctctgctctgtgaccctggacaagtcactgcccctctctgggcttcagtttcctccttgctccatgagggcaggggattttgtctgtttcattcacaatgtgttcccagagctc

SEQ ID NO: 331292 - DNA, 394 bp, Homo sapiens
atttcagagctaatgcaaacagagatgcatcacatccagaccctgttcatcatgtctgagatcttcaggaaaggcatgaaagaggagctgcagctggaccacagcaccgtggataaaattttcccctgtttagatgagttgcttgaaatccacaggcatttcttctacagtatgaaggaacgaaggcaggaatcctgtgctggcagcgacaggaattttgtgatcgaccgaattggagatattttggtacaacagttttcagaagaaaatgcaagtaaaatgaagaaaatatatggagaattctgttgccatcataaagaagctgttaacctctttaaagaactccagcagaataaaaagtttcagaattttattaaggcaagtattttaaaac

SEQ ID NO: 331293 - DNA, 468 bp, Homo sapiens
aggtgtgagccaccacacccggcctaaattttatttttatacttcacatttagatccttgttttgcttggaattggttttcagtttgtctgtggtggtaacataggagtcaagtttatttttcttcttctgtatggatactaatgaacccaggatgtatactgaaaaagccatccttttccactgcactgtcataccacctttgtcataaatcagtctgtggtgtgacacaggagtcaaatgtatttttcttctgtatggatagctaatgaacccaggatgtatattgaagaagccatcctttctcctgctgcactgtaatataccacctttgtcataaatcagaggttgtgtgaacctgttcagaattttattctgttctgttggcctatttgtggcatgtacttttttcttttcttttttttttttaaatagcctaattgagttataattcacatgccataaaatt

SEQ ID NO: 331294 - DNA, 411 bp, Homo sapiens
cacaagataagaaagtcacagacaaatatccataatgaacatagatgaaaaaattctaaacaaaattttaacagtgaatccaacagcgtataagaagtacagtgcatcatgacccagtggagcttaatcaaggttaatttagaatttgaaagtcaaccaatgtaacttgtgacaaataaattaaaaagaaagaaaatccagccaggcacggtggctcatgcctgtaatcccagcactttgggaggcagaggcagacagatcacttgaggtcagaaattgaaggccagcctggccaacatggtgaaaccccatctctactaaaaatacaaaaattagccaggcatgctggcagccacccataatcccagctacttgagaggctgaaggcaggagaattgcttgaacttggga

SEQ ID NO: 331295 - DNA, 613 bp, Homo sapiens
catccagcccagtgcctggcatatggcaggtaacccaataaaagtaattaatgtaatttaaaaaaatttaactgaagtagtaatgacatttgaactacttagtctatatactatataagccacacagttaaagtatgtgatctttcatacctctatgtagcatcaaggaatactatttttctggataaaaagagtataactatgcaaaaaacaggggagaaatgcagtcttcttccctttctgtgtaaaacattggtttttctcttttccaagggacatgaataactattgatggttggtataacttcattttgggttgcttgctaactttaaaagttacagattaggcaaagcataaattttctgcctataacatggtcatagaatggatgtcttcatatgtgccatatttggccagcatagttttttagagtactctgggtaggacttgtattttccagtttactataattaacatgggtaaaatgtaggaattaatatatatgtaaatacttaaaacaatgactggcatatatggtaagttttatatacttgtttattcttatttatcattctctattgctttatgcttagcctcttcataactagatgt

SEQ ID NO: 331296 - DNA, 3750 bp, Homo sapiens
  misc_feature (528)..(528): n is a, c, g, or t
cagacagagacagacaggatggacttcctccggctatacctccctgggctgcaccaggccttgaggggggcactggattccctcggcacctttgtctcctacctcctgggagatgcagtccccactgtagagcgggaggcgcaggcggctgaggaactgggggtggtggcggtgggaaagacagggaagattgtagaggaggaagcccaggaggacctggagggccttagaggcagccaaaacgagggggctggaaggctgagagggcctggagatgacagaagacatgaagtggggagctcagctgtagaacagacctggggctggggagatggcagctcccatgggtcccaagcagagaggcaggacagtggggctggggagacagccaaggctgccaggtgccaggagccaagcgcccacttggaggccagaaagaaatccaaggcagggtctggggcttgccaagacaggagcggccaagcccaggagaggcaggagtcccatgagcaggaagtgaacagagangagaggctgagaagctgggaacaggaggaggaggaggaagaggtcagggcaagagagccagggatggccagaggggcggagtcagagtggacctggcatggggagacggaggggaaggctggtgctgttgggccaaaggcggcaggggacaaccgggagatggagcagggggtcagggaggcagatgcaggggaaactgaggagcctggggccgaaggggctgggaaaggagaagaggtggtagtggtggagaaggcctgtgaaagcactagggcatgggggacgtggggcccaggggcagagcctgaggactggggaatcttaggcagagaggaggccaggacaaccccaggtagggaagaggccagggcaattttagatggggaggaagccaggacaatctcaggcggggaggaggctgagacagcctcaggcggggaggaggctgaaacagcctcaggcggggaggaggccgggacagcctcgggaggggaggaggccgggatatcctcaggcggggaggctgggacagcctcaggaggggaggaggccgggacagcctcaggaggggacgaggcctggacaacctcaggcaaagaggaggctgacctgctgggagtcagacagactcaatatggagcagttccaggagaaaggctcctagaggctactggaaaagtctgggtcctagaggaggagggggatgaggagagagaggctgaggtgagccctttccccaaacaggcccaggtcctgggcactgaaagaacagaagaggctgctgagagccagaccgcagggagggaagctgtgggaggccaggaggcaggggagagctttgagggccaggtagacctgcgtggtaaggaggctgagatgaggcaggacttggggatcagggccgaccgggccaggatggaagagctggtacaggcagaggaggcccaggaggagagagggagcagcagggatccagtggctgagctgccctcagatggagaggctgaaggcactgccgacttggaggcaactccagaggccaggcctgaggaggagctcacaggggaggagagtgaggcggcccagactagctgtggcctactgggcgtggaatggggtggcctcacacacagcgtcaccaaaggccagggacctgagctgatggggggtgcccagaccccaactaagcaacccgaggaaagggaggcaggggaggtggagctcatgggagttctggccctgagcaaagaggagcaggagaggagcctggaggcaggtcccaggcacgcggggtctgtaaagcctgaggcctccgaggccttcccaggagcctgggaaaaccgcacgagaaaggacatggagagaggaaatactcaggaggatgcggccgatggcgagcagcgggaggaggaggagactgcgggaggccagaccctggcggctgaggctgaaggagaccgagagtctgaactatcagaagtcccagaggcaggcggggaggggctgacaacccaggacgcgggatgtggaactgaggagggagaggcgtctgtctcagagaaccaggagctggacggaagcacaggggcagacgcagggccttgcccgtcactgggagaggcctatgccagagaaactgaggatgaggaggcggaggctgacagaacatccagaagaggctggaggctgcaagcggtggctgtgggcctcccggaccgtgaggatgcacagactggctctgtggctgctgggattatggggggtgatgtggtcccacacatcagcgctgctggcgctggtgaagctttggaaggggcgcttgggcaaggctgggactcgaaagaaaaggaagaggcagcagcaggagagcatgcaggtgggcaagaatttggtctggagggctcagcagaggaagaggtgactggcagaggcagccaagtagaggcttttgagtccagggagggaggaccttggggagggcgggtagaggccgaggaatctgcaggcgcagaggacagctgtgggctggatcccgcgggctcccagacagcgagggcagaggggatgggagccatggtggaggctggggggcttctagaaaagtggacgctgttggaagaagaggctgttggatggcaggagagagaacagagggaagacagtgaggggcggtgtggggactaccaccctgagggagaggcaccaaggctccttgatgcagagggtctcatggtgaccgggggccggagggcagaggccaaggagactgagccagaaagcctggaacatgtcaggggccaggaggagcagccaacacaccaggcccctgcagaagctgcgccggagtcagtcggggaagccgagacggctgaggccatgggcagtgccagaggaggtgctgccaacagctggagcgaggccccgctccccgggtccctcctagacgtctctgtcccaaggagtcgcgtgcacctctcgagaagctcctcacagcgtcgctcccggccctcttttcgtcggactccggcctgggagcagcaggaggagcccccagcccccaaccctcctgaggaggagctgtcagctcctgagcagagacccctccagctggaggaacccctggagccaagccctctgaggcatgatgggaccccggtgccagccaggagaaggcccctgggacacgggtttggcctcgcgcaccctggcatgatgcaggagctgcaagcccgtctgggccggcctaagccccagtgactgagacccggtgctctgggagccaggccctgagtgggtgccagaaggcttgctccaatgccactgagccctgctccctctgccactgtggacacatcctctccaccctctgggcctcagtgtcttgatgtatcattcatggagcaggcaaaaccagacgtctgggaagaccgtgaacttaaggagtctgattctccgacacaggctggtggaccacctaccccactgagaccacctctcagggtgcctgccctggttcctccccagcctgagtcagctgtctggactgcaaggaggctgggcacgggggctcacgcctgtcaccccagagctttgggaggccaaggtgggaggatcgcttgagaccaggagttcgagaccagcctgggcagcatagcaagatccccatcttttaaaaacaaaataaaacaataaagactgcaaggaagactgagggaacagcga

SEQ ID NO: 331297 - DNA, 352 bp, Homo sapiens
cttacataaagggcaacatattctgcctttgggaaatgaaacgatgcccctgacccaccatccataaaggatgtactatgagacatgagtgcaaaggacaatcctgacatgtcctaacatgcaaccgacgtttacccagggaccaaaggaatggatgtaatttcttgagctaaactgcccaaatgcttgtatatagggtcctttagaagtctctctatgtggccgggtgtggtggttcaagcctgtaatcctagcactttgggaggttgaggctggtggatcacctgaggtcaggagttcaagaccagcctgaccaacatggcaaaacctcgtctcaactaaaaatacaaaa

SEQ ID NO: 331298 - DNA, 379 bp, Homo sapiens
acccctactagaatcccagtaacattttttgcagaattagaaaactctgtcctaaatctgacctgacaggcacttattaatgactgccacaacagaaacactgtgaaaaagatgcaaccatgaaaaggtggaaagttttgatgacatagaaaatagcaatcagcctttctcacatcccaaagccttcaaatatatatgagtgcagcatggccagtatggaattcaccgaaaactaatcaccaagctagaaatgtggtgagagaaaaaaaagggcaagaatatatttggcttatcacttcccacttttgtctactaatctgatgctgaaaagaaattctcactgaagcattttagattttgaatctttcagatttgggat

SEQ ID NO: 331299 - DNA, 949 bp, Homo sapiens
atcttccccacagcgcttgtccctctagaaatgactagctcagtactcagtaatgaagtactggtgcttcatcttccctcttacaaataaagcaatgtgaggggaaagaccagacctttagaccctggcctctcccaaccattgtatgtgggctgcccagggggcatgagagtggctttctgcagcagaggcgttgggaggctctgctgagagggtggctgctcacacaccgccaggatctggggcagaggctgagggaggacctgggcggccacagcagctctcaaacccaagcgtgcatcagaatcttccagtgggtttgttcaggcacagattgctgggcccacttcagagctgctgatccagtaggtctaggatttctagcacgttctcaggtgattctgtggctactggtccctagaccacactttgaggaccgcagagaggtgcatcagcatggccatgacagtgaacttagtgaatagctgcagggtgggtccagtgacggacttcttagaagctatgccagtgacccccgtgagagaagacaggactctgaaacaggctccagcagtggggctggagaacagaaaggaagcacccaagacacatgcgacagtggaatcagtgcgctggtgggaggcgaggaaggagttcgagcagcgggaaggatggaagtgctttggaccaagatgggcactgggtggaggaaggaataatgtgttccctttgggacctgctgctgtgaggggctaaggagacctccaggtggagatgctaaggaggcagtgggaaatgcttttaaaactcaggagagcagctggcgacgggtacagatgctggggtcttctggataggggtgtaagctgcctcagtggggctgaatgagagtccttaagcggagagagtggtgatgtgcttggaagccaagaggctctcactcgtaggg

SEQ ID NO: 331300 - DNA, 447 bp, Homo sapiens
ctattcttatatcagacaaaacaaactttaaagcaacaatggttaaaacagacaaagaggaacattatataatggtaaaaggccttgtccaacaggaaaatatcaaaatcctaaacatatatgcacctaacactggagctcaccaatttacgaaacaattactaacagacctaagaaatgagacagacagcaacacaataatagtgggggacttcaatactccactgacagcactagacagatcatcaagacagaaagtcaacaaggaaacaatcgatttaaactataccttggaacaaatggacttaacagatatatacagaacatttcatccaacaactgcagaatatacttctattcaacagcacatggaactttctccaagatagaccatatgataggccataaaatgagcctcaataaatttaagaaaattgaaattatatc

SEQ ID NO: 331301 - DNA, 600 bp, Homo sapiens
gattggtgtatttacaatcccttagctagacataaatgttctccgagtaccccgccagagtagctagatagagagtgtggattggtgcattcacaaaccctgagctagacacagggtgctgactggtgtgtttacaaaccttgagcacgctgtcacctctcaatcccactcaaactgtgtttacagagcatcagagaaaaaaagacaacctgtattcgccctgggaaaaactaatgtaagaaatattttctctttcaataattttttctgatgcagtaagaaattcccataaaatgcttaagattttacttccagtcttagaaatatgtgaacctataaatatatttgagaccaccaaattaattcaagacatctttcaagaaactattgaactgataaaagatatgatatgtgatgaatactcctgccctcaaggtggctaaaagctggtaaagacagacatataactgaatattgcatgccaaaatatgcaaacacatgtgcatatgaatgtgcacacacacacaactgcagtactgtgaaatcagtggcaacatagagattttcatgggggaacaactcataccattagtgacagta

SEQ ID NO: 331302 - DNA, 4484 bp, Homo sapiens
  misc_feature (2840)..(2840): n is a, c, g, or t
tcagcggcagcagccgccgccgagatgtcccggcgaaagcaaagcaaaccccggcagatcaaacggccgcttgaagatgccattgaagatgaggaagaagaatgtccatcagaggaaacagacatcatctccaaaggagactttccattggaggaaagcttttccacagaatttgggcctgaaaatctgagctgcgaagaagtggaatacttttgtaacaaaggtgatgatgaaggaatccaggagacagcagaatcagatggggacacacagtcagagaaaccggggcaacctggagttgagacagacgactgggatggaccaggagagctggaggtgtttcagaaagatggggaacgaaaaattcagagtcgacagcaacttccagtgggaacaacctgggggccgtttcctgggaagatggacttgaataataattctttgaagacaaaggctcaggtcccaatggtgctgactgctggtcccaagtggttgctggatgtgacttggcaaggagtggaagacaacaaaaacaactgcattgtgtacagcaaagggggtcagctttggtgtacaactacgaaggccatctctgagggtgaagagctaattgcctttgtggtggattttgactcaaggctacaagctgccagtcagatgactctcacagaagggatgtaccctgcacgcctgctggactcaattcagctgcttcctcagcaagctgccatggcttctattttgcccacagctattgtcaataaggatatattcccttgcaagtcctgtggcatctggtatcggagtgagcggaatctgcaggcccatttgatgtactactgcagtgggaggcaaagagaagctgctccggtgtcagaggaaaatgaagacagtgcccatcagatttccagcctgtgccccttcccacagtgcaccaagagcttttcaaatgctcgagctctagaaatgcacctgaattcacacagtggagtgaaaatggaagaattcctgccccctggtgctagtctaaaatgcaccgtctgtagctacactgctgattccgtgatcaactttcaccaacacctgttctcccatctcactcaagctgccttccgatgtaatcactgccatttcggcttccagactcagagggagttattgcagcaccaggagctccatgtccctagcggcaaacttcccagagaaagtgacatggaacactctccaagtgcaactgaagacagcttacagccagccacagacttattgaccagaagcgaacttccccagagccaaaaggccatgcagactaaagatgcgagctctgacacagagctggacaagtgtgagaaaaagactcagctctttctcacgaaccagagaccagagatacagcctacaacaaataaacaaagcttttcttacacaaaaataaagtctgagccctctagcccaagacttgcctcatctccagttcagcctaatattgggccttctttccctgtgggccctttcctatctcagttttctttcccccaagatatcaccatggtccctcaagcttcagagatcttagctaagatgtctgaactggtgcatcggcgactgaggcatggcagtagtagctaccctcccgtcatttacagccctttgatgcccaagggggctacttgttttgagtgtaacataacattcaataatttggataattatctagtgcacaaaaagcattattgcagcagccgatggcagcagatggctaagtccccagagttccctagtgtgtcagaaaagatgcctgaagctttgagtcccaacactggccaaacctccataaaccttctcaacccagctgctcattctgctgatcctgagaatccacttcttcaaacatcttgcatcaattcttccactgtcttagatttaattgggccaaatgggaagggccatgacaaggacttttccactcaaactaagaagctctccacctccagtaacaatgatgacaaaattaatggaaaacctgttgatgtgaaaaatcccagtgtccccttagtggatggggaaagtgacccaaataagactacctgtgaagcttgcaacattaccttcagccggcacgaaacatacatggtccacaaacagtattactgtgctacacgccacgaccctccactgaagaggtctgcttccaacaaagtgcctgccatgcagagaaccatgcgcacacgcaagcgcagaaagatgtatgagatgtgcctacctgagcaggaacaaaggcctccactggttcagcagagatttcttgacgtagccaacctcaataatccttgtacctccactcaagaacccacagaagggctaggagagtgctaccacccaagatgtgatatctttccaggaattgtctctaaacacttggaaacttctctgacgatcaacaagtgtgttccagtttccaaatgtgatactactcattccagtgtttcctgcctagagatggacgtgcccatagatctcagcaaaaagtgtttatctcagtctgagcggacgaccacgtctcccaaaaggctgctggactatcacgagtgcactgtgtgcaagatcagtttcaataaggtagaaaactatctggcccacaagcagaatttctgcccggttactgcacatcagcgtaatgacctgggtcaactggacggcaaagtgtttccgaatccagaaagcgaacgaaacagccctgatgtcagctacgaaagaagcataataaaatgtgagaaaaatgggaatttgaagcagccttcccccaatggaaacttattttcatcccacctagcaacccngcaaggcttgaaggtctttagtgaagctgctcagctcattgctacaaaagaagaaaacagacatttgtttcttccacaatgcctttaccctggagcaataaagaaagcaaaaggagccgaccagctttctccatattatggaatcaagccaagtgattatatttctggttctcttgtcatccataacactgacatcgagcaaagcagaaatgcagaaaatgaatctcctaaaggccaggcttcctcaaatgggtgtgctgcgctgaagaaagattctctgccattgttgcccaaaaatcgaggaatggtaatagtgaatggtggactgaaacaagatgagagacctgctgccaacccacagcaagagaacatttcccagaatcctcagcacgaagacgaccacaaatctccctcgtggatctctgagaacccattagctgccaatgagaatgtctcaccaggaattccctcagcagaggaacagttgtctagtatagcaaaaggtgtgaatggttccagccaggctccaaccagtgggaaatattgccggctatgtgatatccagttcaacaacctttcaaactttataactcacaagaagttttattgctcatcacatgcagcagaacatgtcaaatgaactaactaaacatcagtcacctttggtatcagtgtttagtatgttgttctaaccagtccagaaaaaaaaataagctgtttgaattacatctgggcaatcaggagataattcattatggctgagttgaagacttaaggtgtaatttcattacagtccattagtaaagtgtattattggtgccattttcaaaaaaattaatttattttaccagcagtattcatagctgtggttatgttattttttatttaaaaactttatattaaagtcatttgtaatgttattgtatagttattgtgtagcacatatggtttgcactgtatagtagcttttaaagaaaatagtcacaatacagaaaagcattttagaaatagcttcaaaagcacttgtgtatcttgattttttcttatatgctgttgcagatatatgtatatgctaaaatataacttgcaaagatgttctaaatacacatgctataagttcgccttaagatttcaattcttggataatcaggctctgtttgcactttatattttagcagatacagtctcttagtcactaggctttgcatttgtatgtagctgtatgtttccgtccattttcttaatcctgaacctgtatgttaaatgaagatggcaatttttttcttgtatagtacttgtattttctttcgctgatgcagctctgtctcaatttttaaacctttgctgttaaatgcaatactttataaagaatgaacaaaattactggaagcagtattgtaagtaatgaggtagtattaatcagttttatcttttgaaaggcacagtctaaatcgaaaccctaaactcaatgctgcaagtatgaatttaattcatatataagatctatttaaatataagagtagcaatactgcacctggtgatcacaaagataatgttctacttctgatagaaataatttctcaacaaatgttgttactatgcatgtatatggatggaataaaattccagattgttggagaagtt

SEQ ID NO: 331303 - DNA, 817 bp, Homo sapiens
taaaagtcgagtcctatgctgtagaacaacaccaaagactgttactcatctgattgcccaattaagaacctgagagcggagtctgagaaaaattgaactaaatgctgctttacccacagttggtttcaaatggacagcagcaaatgtgtctcttgtgtttttacctgcagaggatatattcccttgcaagtcctgtggcatctggtatcggagtgagcggaatctgcaggcccatttgatgtactactgcagtgggaggcaaagagaagctgctccggtgtcagaggaaaatgaagacagtgcccatcagatttccagcctgtgccccttcccacagtgcaccaagagcttttcaaatgctcgagctctagaaatgcacctgaattcacacagtggtaaatgccccttttgtttcttctgttgctccagaagactctgttatttttataaatatatatgcattacatgtatacgtctatatctgtctatctgtagctatctataacatcaaaatcaaactttctgggtcaaccagtgtgatcttatgccacttatactcagcatatgttactcaaaggacttgggtctgaattcttttcttacaaattcagaggccaaatcattctatttgttctcaactgaggttttaaaaaagcacattattttaaaaagaaaatctcaataccctttgaatattgccatttattgctttagtgtcaagcaatctttggaaactgatcatagtgtttcctatatggtagggaagaaataataggtacataaatataagtgtgtgctgaattgaaataaagctact

SEQ ID NO: 331304 - DNA, 1705 bp, Homo sapiens
gattggtgtatttacaatcccttagctagacataaatgttctccgagtaccccgccagagtagctagatagagagtgtggattggtgcattcacaaaccctgagctagacacagggtgctgactggtgtgtttacaaaccttgagcaagatacagagtgccaattgctgtatttacaatcccttagctagacataaaggttctccaagtccccaccagactcaggagcccagctggcttcacccagtggatcccgcattggggcgcaggtggagctgcctgccagtctcgtgctgtgcgcccgcactcctcagcccttgggtggtcgatgggactgggcgccgtagagcaggcggcagcgctcgtcggggaggctccggctgcgcaggagcccacagcgtgggggaggctcaggcatggtgggctgcaggtcccaagccctgccccgccgggaggcagctaaggcccggcgagaagtccggcacagcagctgctggcccaggtgctaagcccctcactgcctagggcgggcggggccggctggctggccgctctgagtgcagggcccgtggagcccacgcccacccggaactggcactgacccgcaagcgctgtgcgcagccgcggttcctgcccgcgcctctacttccacacctccccgcaagctgagggagccggctccggcctcggccagcccaggaaggggctccaccgtgcagcggcgggctgaagggctcctcaagtgccgccaaagtgggagcccaggcagaggaggactcgagaacgagcaagggctgcgagcgctgccaggcacgctgtcacctctcaatcccactcaaactgtgtttacagagcatcagagaaaaaaagacaacctgtattcgccctgggaaaaactaatggccgcttgaagatgccattgaagatgaggaagaagaatgtccatcagaggaaacagacatcatctccaaaggagactttccattggaggaaagcttttccacagaatttgggcctgaaaatctgagctgcgaagaagtggaatacttttgtaacaaaggtgatgatgaaggaatccaggagacagcagaatcagatggggacacacagtcagagaaaccggggcaacctggagttgagacagacgactgggatggaccaggagagctggaggtgtttcagaaagatggggaacgaaaaattcagagtcgacagcaacttccagtgggaacaacctgggggccgtttcctgggaagatggacttgaataataattctttgaagacaaaggctcaggtcccaatggtgctgactgctggtcccaagtggttgctggatgtgacttggcaaggagtggaagacaacaaaaacaactgcattgtgtacagcaaagggggtcagctttggtgtacaactacgaaggccatctctgagggtgaagagctaattgcctttgtggtggattttgactcaaggctacaagctgccagtcagatgactctcacagaagggatgtaccctgcacgcctgctggactcaattcagctgcttcctcagcaagctgccatggcttctattttgcccacagctattgtcaatagtaagtgctcagtgctgtgtagcccagctttagaggtgatgggaatttatgggagaaaaaaatgtctactgacaagaaaccaggaacagacctttttccttcagtg

SEQ ID NO: 331305 - DNA, 313 bp, Homo sapiens
tgcacattgtgcacatgtaccctaaaacttaaagtataataataataaaaaaagactcagagacatattatctatgtaccacgaaaacttaagaatgacaggaattccaaaagtttgacaattttgtcacagcatttaatctcctattcactagaatgtcttgaatcatgcttatgaaaatctaacacgctataaagaagcagtcaccagggcagtggagagcatcacttccctcgaagccatcattataccctacagagtagatgttggtaatccagaagaatctttagagatgcctcttcgaaaacaagag

SEQ ID NO: 331306 - DNA, 988 bp, Homo sapiens
cctagttttagaagtttcaatagcaagtttgggcagaaatgtgtagtattaaagctgtgactgctattgagaaacaaagagaagaaaactcttctgaagcgagtgatgtggagacaaaactacgtgagtttgaagatcttcagatgcagcttaacacaagcattgatttgcgcacaaatgtcttgaatcatgcttatgaaaatctaacacgctataaagaagcagtcaccagggcagtggagagcatcacttccctcgaagccatcattataccctacagagtagatgttggtaatccagaagaatctttagagatgcctcttcgaaaacaagaggaattggaatccacagtagcacgcatccaggacctcactgagaaactgggaatgatatccagccccgaagccaaactacaacttcagtatactttacaggaactagtttctaagaactcagcaatgaaggaagctttcaaagcacaggaaactgaggcagaaaggtatcttgagaattacaaatgctatagaaaaatggaagaggatatttacactaacctcagcaaaatggagacagttcttggacagtccatgtcctcgttgccactgtcttacagagaagctttagagcgcttggaacagagcaaggccttggtgtcaaatcttatatcaaccaaagaagagttaatgaaactacgacagatccttagactcttgagactcaggtgcacagaaaatgatggcatatgtttgctcaagatggtgtcggctctgtgggagaaatggctgagtttgctggaagctgctaaagagtgggagatgtggtgcgaagaactgaagcaggaatggaaatttgtcagtgaagaaattgaacgagaggcaattattttagataatcttcaggaagaactccctgaaatttccaaaacaaaagaggcagccaccacagaggaactctctgagctgctagactgtttatgccaatatggaga

SEQ ID NO: 331307 - DNA, 333 bp, Homo sapiens
atgggatgatagtgctgaggggaagttgataacgaatcctacttctgctctggatactcaggtagatggcaaagccatccaccaaggtgggtaacacacgagacggaagaggcagaaggaggggcaggtgtgaaggtcaagtcagcttgaacttgtgaatgtgagacactttcatgcctttcaagtgcatatgttcagtaggtagtcaggaatatgaaaagtgaaaaagagaccaaggcaaaacagatcagctaaggaactgcccacatacagatgacagttgaggttgctcaagtggatgaaccttctagaagaattgcacagtgtgggatt

SEQ ID NO: 331308 - DNA, 365 bp, Homo sapiens
ggtaagcactgaggagacagtaatgaacaagagctcctattcagacacacattccattcagggctcatagtctaatgaggaaggcagacattaatcagataatcacaaaaggaaatggacaagtataaattctgattattgctgtgtagtgaaagacaggatgagttgtaatcggggaacctggtgtagatgggggattaagaaaggtttcctttagcaaatggcatttgaactgaggcctgaaatgagtgtcagctgaggaaaaaggtagttgactccaggccgagaaaatagcacttgctaaagcccttatgcggggaattggttggtgtgttttagaaaaggaaagaagaaatataaaatgc

SEQ ID NO: 331309 - DNA, 2336 bp, Homo sapiens
acaacaactcttccccgctgagaggagacagccagtgcgactccaccctccagctcgacggcagccgccccggccgacagccccgagacgacagcccggcgcgtcccggtccccacctccgaccaccgccagcgctccaggccccgccgctccccgctcgccgccaccgcgccctccgctccgcccgcagtgccaaccatgaccgccgccagtatgggccccgtccgcgtcgccttcgtggtcctcctcgccctctgcagccggccggccgtcggccagaactgcagcgggccgtgccggtgcccggacgagccggcgccgcgctgcccggcgggcgtgagcctcgtgctggacggctgcggctgctgccgcgtctgcgccaagcagctgggcgagctgtgcaccgagcgcgacccctgcgacccgcacaagggcctcttctgtgacttcggctccccggccaaccgcaagatcggcgtgtgcaccgccaaagatggtgctccctgcatcttcggtggtacggtgtaccgcagcggagagtccttccagagcagctgcaagtaccagtgcacgtgcctggacggggcggtgggctgcatgcccctgtgcagcatggacgttcgtctgcccagccctgactgccccttcccgaggagggtcaagctgcccgggaaatgctgcgaggagtgggtgtgtgacgagcccaaggaccaaaccgtggttgggcctgccctcgcggcttaccgactggaagacacgtttggcccagacccaactatgattagagccaactgcctggtccagaccacagagtggagcgcctgttccaagacctgtgggatgggcatctccacccgggttaccaatgacaacgcctcctgcaggctagagaagcagagccgcctgtgcatggtcaggccttgcgaagctgacctggaagagaacattaagaagggcaaaaagtgcatccgtactcccaaaatctccaagcctatcaagtttgagctttctggctgcaccagcatgaagacataccgagctaaattctgtggagtatgtaccgacggccgatgctgcaccccccacagaaccaccaccctgccggtggagttcaagtgccctgacggcgaggtcatgaagaagaacatgatgttcatcaagacctgtgcctgccattacaactgtcccggagacaatgacatctttgaatcgctgtactacaggaagatgtacggagacatggcatgaagccagagagtgagagacattaactcattagactggaacttgaactgattcacatctcatttttccgtaaaaatgatttcagtagcacaagttatttaaatctgtttttctaactgggggaaaagattcccacccaattcaaaacattgtgccatgtcaaacaaatagtctatcaaccccagacactggtttgaagaatgttaagacttgacagtggaactacattagtacacagcaccagaatgtatattaaggtgtggctttaggagcagtgggagggtaccagcagaaaggttagtatcatcagatagcatcttatacgagtaatatgcctgctatttgaagtgtaattgagaaggaaaattttagcgtgctcactgacctgcctgtagccccagtgacagctaggatgtgcattctccagccatcaagagactgagtcaagttgttccttaagtcagaacagcagactcagctctgacattctgattcgaatgacactgttcaggaatcggaatcctgtcgattagactggacagcttgtggcaagtgaatttgcctgtaacaagccagattttttaaaatttatattgtaaatattgtgtgtgtgtgtgtgtgtgtatatatatatatatgtacagttatctaagttaatttaaagttgtttgtgcctttttatttttgtttttaatgctttgatatttcaatgttagcctcaatttctgaacaccataggtagaatgtaaagcttgtctgatcgttcaaagcatgaaatggatacttatatggaaattctgctcagatagaatgacagtccgtcaaaacagattgtttgcaaaggggaggcatcagtgtccttggcaggctgatttctaggtaggaaatgtggtagcctcacttttaatgaacaaatggcctttattaaaaactgagtgactctatatagctgatcagttttttcacctggaagcatttgtttctactttgatatgactgtttttcggacagtttatttgttgagagtgtgaccaaaagttacatgtttgcacctttctagttgaaaataaagtgtatattttttctataaa

SEQ ID NO: 331310 - DNA, 902 bp, Homo sapiens
  misc_feature (740)..(740): n is a, c, g, or t
  misc_feature (812)..(812): n is a, c, g, or t
  misc_feature (860)..(860): n is a, c, g, or t
  misc_feature (867)..(867): n is a, c, g, or t
acaacaactcttccccgctgagaggagacagccagtgcgactccaccctccagctcgacggcagccgccccggccgacagccccgagacgacagcccggcgcgtcccggtccccacctccgaccaccgccagcgctccaggccccgccgctccccgctcgccgccaccgcgccctccgctccgcccgcagtgccaaccatgaccgccgccagtatgggccccgtccgcgtcgccttcgtggtcctcctcgccctctgcagccggccggccgtcggccagaactgcagcgggccgtgccggtgcccggacgagccggcgccgcgctgcccggcgggcgtgagcctcgtgctggacggctgcggctgctgccgcgtctgcgccaagcagctgggcgagctgtgcaccgagcgcgacccctgcgacccgcacaagggcctcttctgtgacttcggctccccggccaaccgcaagatcggcgtgtgcaccgccaaagatggtgctccctgcatcttcggtggtacggtgtaccgcagcggagagtccttccagagcagctgcaagtaccagtgcacgtgcctggacggggcggtgggctgcatgcccctgtgcagcatggacgttcgtctgcccagccctgactgccccttcccgaggagggtcaagctgcccgggaaatgctgcgaggagtgggtgtgtgacgagcccaaggaccaaaccgtggttgggcctgccctcgcggnttaccgaactggaagacacgttttgggccaaaacccaaacttattgaattagaagccaaacttggcttggtncaagaaccaacatgaattgggagccgccttgtttcccaagaacttgtngggaatngggcatttttcaaccccggggttaaccaaatgaac

SEQ ID NO: 331311 - DNA, 787 bp, Homo sapiens
  misc_feature (710)..(710): n is a, c, g, or t
  misc_feature (729)..(729): n is a, c, g, or t
  misc_feature (758)..(758): n is a, c, g, or t
  misc_feature (780)..(780): n is a, c, g, or t
  misc_feature (784)..(784): n is a, c, g, or t
acaacaactcttccccgctgagaggagacagccagtgcgactccaccctccagctcgacggcagccgccccggccgacagccccgagacgacagcccggcgcgtcccggtccccacctccgaccaccgccagcgctccaggccccgccgctccccgctcgccgccaccgcgccctccgctccgcccgcagtgccaaccatgaccgccgccagtatgggccccgtccgcgtcgccttcgtggtcctcctcgccctctgcagccggccggccgtcggccagaactgcagcgggccgtgccggtgcccggacgagccggcgccgcgctgcccggcgggcgtgagcctcgtgctggacggctgcggctgctgccgcgtctgcgccaagcagctgggcgagctgtgcaccgagcgcgacccctgcgacccgcacaagggcctcttctgtgacttcggctccccggccaaccgcaagatcggcgtgtgcaccgccaaagatggtgctccctgcatcttcggtggtacggtgtaccgcagcggagagtccttccagagcagctgcaagtaccagtgcacgtgcctggacggggcggtgggctgcatgcccctgtgcagcatggacgtttcgttctggccccaagcccttgaattgcccccctttccccgaaaggaaagggttcaaaagcttgcccccgggggaaaaattgcttgccnaaaaggaaatttggggttnttttttgaaacgaaagcccccaaaagggnaacccaaaaacccggttggggntttnggg

SEQ ID NO: 331312 - DNA, 666 bp, Homo sapiens
acaacaactcttccccgctgagaggagacagccagtgcgactccaccctccagctcgacggcagccgccccggccgacagccccgagacgacagcccggcgcgtcccggtccccacctccgaccaccgccagcgctccaggccccgccgctccccgctcgccgccaccgcgccctccgctccgcccgcagtgccaaccatgaccgccgccagtatgggccccgtccgcgtcgccttcgtggtcctcctcgccctctgcagccggccggccgtcggccagaactgcagcgggccgtgccggtgcccggacgagccggcgccgcgctgcccggcgggcgtgagcctcgtgctggacggctgcggctgctgccgcgtctgcgccaagcagctgggcgagctgtgcaccgagcgcgacccctgcgacccgcacaagggcctcttctgtgacttcggctccccggccaaccgcaagatcggcgtgtgcaccggtaagacccgcagcccccaccgctaggtgtccggccgcctcctccctcacgcccacccgcccgctggaaaaagaaaccgctcggactgagtttctttctccagctgctgccagcccgccccctgcagcccagatcccaactcgcatccctgacgctctggatgtgagagtgccccaatg

SEQ ID NO: 331313 - DNA, 348 bp, Homo sapiens
  misc_feature (20)..(20): n is a, c, g, or t
  misc_feature (303)..(303): n is a, c, g, or t
tactactactaaattcgcgnccgcgtcgacggaaattctgctcagatagaatgacagtccgtcaaaacagattgtttgcaaaggggaggcatcagtgtccttggcaggctgatttctaggtaggaaatgtggtagcctcacttttaatgaacaaatggcctttattaaaaactgagtgactctatatagctgatcagttttttcacctggaagcatttgtttctactttgatatgactgtttttcggacagtttatttgttgagagtgtgaccaaaagttacatgtttgcacctttctagaanaaatatacactttattttcaactagaagtcgacgcggccgcgaat

SEQ ID NO: 331314 - DNA, 254 bp, Homo sapiens
ataagagtatgctattgaaactatctaaaactggaccactctgagtctcccccaagaatgttaagacttgacagtggaactacattagtacacagcaccagaatgtatattaaggtgtggctttaggagcagtgggagggtaccagcagaaaggttagtatcatcagatagcatcttatacgagtaatatgcctgctactgacacttctaaaactaggcctcagttgagaagattcaatagcaaaagaaaaaaa

SEQ ID NO: 331315 - DNA, 2724 bp, Homo sapiens
acaacaactcttccccgctgagaggagacagccagtgcgactccaccctccagctcgacggcagccgccccggccgacagccccgagacgacagcccggcgcgtcccggtccccacctccgaccaccgccagcgctccaggccccgccgctccccgctcgccgccaccgcgccctccgctccgcccgcagtgccaaccatgaccgccgccagtatgggccccgtccgcgtcgccttcgtggtcctcctcgccctctgcagccggccggccgtcggccagaactgcagcgggccgtgccggtgcccggacgagccggcgccgcgctgcccggcgggcgtgagcctcgtgctggacggctgcggctgctgccgcgtctgcgccaagcagctgggcgagctgtgcaccgagcgcgacccctgcgacccgcacaagggcctcttctgtgacttcggctccccggccaaccgcaagatcggcgtgtgcaccgccaaagatggtgctccctgcatcttcggtggtacggtgtaccgcagcggagagtccttccagagcagctgcaagtaccagtgcacgtgcctggacggggcggtgggctgcatgcccctgtgcagcatggacgttcgtctgcccagccctgactgccccttcccgaggagggtcaagctgcccgggaaatgctgcgaggagtgggtgtgtgacgagcccaaggaccaaaccgtggttgggcctgccctcgcggcttaccgactggaagacacgtttggcccagacccaactatgattagagccaactgcctggtccagaccacagagtggagcgcctgttccaagacctgtgggatgggcatctccacccgggttaccaatgacaacgcctcctgcaggctagagaagcagagccgcctgtgcatggtcaggccttgcgaagctgacctggaagagaacattaaggtacatgttctgctcctattaactatttttcacaggaaaaacagtggataggacccaacttagggctcttgccacgcttgttagtataagcccgttatctccaaaactatctaaccattgagctgttttgctggaatgagagcttgtgtaatagcaaccaccagttttccactacgaaatcttccacagggttagttaattcaagacattccaagagaggctctggctatttttggacatagcaaatgagactcaaacttcctcccctcaaaatataaacagaagtcagacaacagaagactaaaacacagagggttgaagaaagccactcctcttgtagagtcgctgatttttttttttcctctctcttttcccttgtcttccttagaagggcaaaaagtgcatccgtactcccaaaatctccaagcctatcaagtttgagctttctggctgcaccagcatgaagacataccgagctaaattctgtggagtatgtaccgacggccgatgctgcaccccccacagaaccaccaccctgccggtggagttcaagtgccctgacggcgaggtcatgaagaagaacatgatgttcatcaagacctgtgcctgccattacaactgtcccggagacaatgacatctttgaatcgctgtactacaggaagatgtacggagacatggcatgaagccagagagtgagagacattaactcattagactggaacttgaactgattcacatctcatttttccgtaaaaatgatttcagtagcacaagttatttaaatctgtttttctaactgggggaaaagattcccacccaattcaaaacattgtgccatgtcaaacaaatagtctatcaaccccagacactggtttgaagaatgttaagacttgacagtggaactacattagtacacagcaccagaatgtatattaaggtgtggctttaggagcagtgggagggtaccagcagaaaggttagtatcatcagatagcatcttatacgagtaatatgcctgctatttgaagtgtaattgagaaggaaaattttagcgtgctcactgacctgcctgtagccccagtgacagctaggatgtgcattctccagccatcaagagactgagtcaagttgttccttaagtcagaacagcagactcagctctgacattctgattcgaatgacactgttcaggaatcggaatcctgtcgattagactggacagcttgtggcaagtgaatttgcctgtaacaagccagattttttaaaatttatattgtaaatattgtgtgtgtgtgtgtgtgtgtatatatatatatatgtacagttatctaagttaatttaaagttgtttgtgcctttttatttttgtttttaatgctttgatatttcaatgttagcctcaatttctgaacaccataggtagaatgtaaagcttgtctgatcgttcaaagcatgaaatggatacttatatggaaattctgctcagatagaatgacagtccgtcaaaacagattgtttgcaaaggggaggcatcagtgtccttggcaggctgatttctaggtaggaaatgtggtagcctcacttttaatgaacaaatggcctttattaaaaactgagtgactctatatagctgatcagttttttcacctggaagcatttgtttctactttgatatgactgtttttcggacagtttatttgttgagagtgtgaccaaaagttacatgtttgcacctttctagttgaaaataaagtgtatattttttctataaa

SEQ ID NO: 331316 - DNA, 2406 bp, Homo sapiens
acaacaactcttccccgctgagaggagacagccagtgcgactccaccctccagctcgacggcagccgccccggccgacagccccgagacgacagcccggcgcgtcccggtccccacctccgaccaccgccagcgctccaggccccgccgctccccgctcgccgccaccgcgccctccgctccgcccgcagtgccaaccatgaccgccgccagtatgggccccgtccgcgtcgccttcgtggtcctcctcgccctctgcagccggccggccgtcggccagaactgcagcgggccgtgccggtgcccggacgagccggcgccgcgctgcccggcgggcgtgagcctcgtgctggacggctgcggctgctgccgcgtctgcgccaagcagctgggcgagctgtgcaccgagcgcgacccctgcgacccgcacaagggcctcttctgtgacttcggctccccggccaaccgcaagatcggcgtgtgcaccgccaaagatggtgctccctgcatcttcggtggtacggtgtaccgcagcggagagtccttccagagcagctgcaagtaccagtgcacgtgcctggacggggcggtgggctgcatgcccctgtgcagcatggacgttcgtctgcccagccctgactgccccttcccgaggagggtcaagctgcccgggaaatgctgcgaggagtgggtgtgtgacgagcccaaggaccaaaccgtggttgggcctgccctcgcggcttaccgactggaagacacgtttggcccagacccaactatgattagagccaactgcctggtccagaccacagagtggagcgcctgttccaagacctgtgggatgggcatctccacccgggttaccaatgacaacgcctcctgcaggctagagaagcagagccgcctgtgcatggtcaggccttgcgaagctgacctggaagagaacattaaggtacatgttctgctcctattaactatttttcacaggaaaaacagtggataggacccaacttagggctcttgccacgcttgttagtataagccctcccaaaatctccaagcctatcaagtttgagctttctggctgcaccagcatgaagacataccgagctaaattctgtggagtatgtaccgacggccgatgctgcaccccccacagaaccaccaccctgccggtggagttcaagtgccctgacggcgaggtcatgaagaagaacatgatgttcatcaagacctgtgcctgccattacaactgtcccggagacaatgacatctttgaatcgctgtactacaggaagatgtacggagacatggcatgaagccagagagtgagagacattaactcattagactggaacttgaactgattcacatctcatttttccgtaaaaatgatttcagtagcacaagttatttaaatctgtttttctaactgggggaaaagattcccacccaattcaaaacattgtgccatgtcaaacaaatagtctatcaaccccagacactggtttgaagaatgttaagacttgacagtggaactacattagtacacagcaccagaatgtatattaaggtgtggctttaggagcagtgggagggtaccagcagaaaggttagtatcatcagatagcatcttatacgagtaatatgcctgctatttgaagtgtaattgagaaggaaaattttagcgtgctcactgacctgcctgtagccccagtgacagctaggatgtgcattctccagccatcaagagactgagtcaagttgttccttaagtcagaacagcagactcagctctgacattctgattcgaatgacactgttcaggaatcggaatcctgtcgattagactggacagcttgtggcaagtgaatttgcctgtaacaagccagattttttaaaatttatattgtaaatattgtgtgtgtgtgtgtgtgtgtatatatatatatatgtacagttatctaagttaatttaaagttgtttgtgcctttttatttttgtttttaatgctttgatatttcaatgttagcctcaatttctgaacaccataggtagaatgtaaagcttgtctgatcgttcaaagcatgaaatggatacttatatggaaattctgctcagatagaatgacagtccgtcaaaacagattgtttgcaaaggggaggcatcagtgtccttggcaggctgatttctaggtaggaaatgtggtagcctcacttttaatgaacaaatggcctttattaaaaactgagtgactctatatagctgatcagttttttcacctggaagcatttgtttctactttgatatgactgtttttcggacagtttatttgttgagagtgtgaccaaaagttacatgtttgcacctttctagttgaaaataaagtgtatattttttctataaa

SEQ ID NO: 331317 - DNA, 1898 bp, Homo sapiens
acaacaactcttccccgctgagaggagacagccagtgcgactccaccctccagctcgacggcagccgccccggccgacagccccgagacgacagcccggcgcgtcccggtccccacctccgaccaccgccagcgctccaggccccgccgctccccgctcgccgccaccgcgccctccgctccgcccgcagtgccaaccatgacccccttcccgaggagggtcaagctgcccgggaaatgctgcgaggagtgggtgtgtgacgagcccaaggaccaaaccgtggttgggcctgccctcgcggcttaccgactggaagacacgtttggcccagacccaactatgattagagccaactgcctggtccagaccacagagtggagcgcctgttccaagacctgtgggatgggcatctccacccgggttaccaatgacaacgcctcctgcaggctagagaagcagagccgcctgtgcatggtcaggccttgcgaagctgacctggaagagaacattaagaagggcaaaaagtgcatccgtactcccaaaatctccaagcctatcaagtttgagctttctggctgcaccagcatgaagacataccgagctaaattctgtggagtatgtaccgacggccgatgctgcaccccccacagaaccaccaccctgccggtggagttcaagtgccctgacggcgaggtcatgaagaagaacatgatgttcatcaagacctgtgcctgccattacaactgtcccggagacaatgacatctttgaatcgctgtactacaggaagatgtacggagacatggcatgaagccagagagtgagagacattaactcattagactggaacttgaactgattcacatctcatttttccgtaaaaatgatttcagtagcacaagttatttaaatctgtttttctaactgggggaaaagattcccacccaattcaaaacattgtgccatgtcaaacaaatagtctatcaaccccagacactggtttgaagaatgttaagacttgacagtggaactacattagtacacagcaccagaatgtatattaaggtgtggctttaggagcagtgggagggtaccagcagaaaggttagtatcatcagatagcatcttatacgagtaatatgcctgctatttgaagtgtaattgagaaggaaaattttagcgtgctcactgacctgcctgtagccccagtgacagctaggatgtgcattctccagccatcaagagactgagtcaagttgttccttaagtcagaacagcagactcagctctgacattctgattcgaatgacactgttcaggaatcggaatcctgtcgattagactggacagcttgtggcaagtgaatttgcctgtaacaagccagattttttaaaatttatattgtaaatattgtgtgtgtgtgtgtgtgtgtatatatatatatatgtacagttatctaagttaatttaaagttgtttgtgcctttttatttttgtttttaatgctttgatatttcaatgttagcctcaatttctgaacaccataggtagaatgtaaagcttgtctgatcgttcaaagcatgaaatggatacttatatggaaattctgctcagatagaatgacagtccgtcaaaacagattgtttgcaaaggggaggcatcagtgtccttggcaggctgatttctaggtaggaaatgtggtagcctcacttttaatgaacaaatggcctttattaaaaactgagtgactctatatagctgatcagttttttcacctggaagcatttgtttctactttgatatgactgtttttcggacagtttatttgttgagagtgtgaccaaaagttacatgtttgcacctttctagttgaaaataaagtgtatattttttctataaa

SEQ ID NO: 331318 - DNA, 2266 bp, Homo sapiens
acaacaactcttccccgctgagaggagacagccagtgcgactccaccctccagctcgacggcagccgccccggccgacagccccgagacgacagcccggcgcgtcccggtccccacctccgaccaccgccagcgctccaggccccgccgctccccgctcgccgccaccgcgccctccgctccgcccgcagtgccaaccatgaccgccgccagtatgggccccgtccgcgtcgccttcgtggtcctcctcgccctctgcagccggccggccgtcggccagaactgcagcgggccgtgccggtgcccggacgagccggcgccgcgctgcccggcgggcgtgagcctcgtgctggacggctgcggctgctgccgcgtctgcgccaagcagctgggcgagctgtgcaccgagcgcgacccctgcgacccgcacaagggcctcttctgtgacttcggctccccggccaaccgcaagatcggcgtgtgcaccgccaaagatggtgctccctgcatcttcggtggtacggtgtaccgcagcggagagtccttccagagcagctgcaagtaccagtgcacgtgcctggacggggcggtgggctgcatgcccctgtgcagcatggacgttcgtctgcccagccctgactgccccttcccgaggagggtcaagctgcccgggaaatgctgcgaggagtgggtgtgtgacgagcccaaggaccaaaccgtggttgggcctgccctcgcggcttaccgactggaagacacgtttggcccagacccaactatgattagagccaactgcctggtccagaccacagagtggagcgcctgttccaagacctgtgggatgggcatctccacccgggttaccaatgacaacgcctcctgcaggctagagaagcagagccgcctgtgcatggtcaggccttgcgaagctgacctggaagagaacattaagaagggcaaaaagtgcatccgtactcccaaaatctccaagcctatcaagtttgagctttctggctgcaccagcatgaagacataccgagctaaattctgtggagtatgtaccgacggccgatgctgcaccccccacagaaccaccaccctgccggtggagttcaagtgccctgacggcgaggtcatgaagaagaacatgatgttcatcaagacctgtgcctgccattacaactgtcccggagacaatgacatctttgaatcgctgtactacaggaagatgtacggagacatggcatgaagccagagagtgagagacattaactcattagactggaacttgaactgattcacatctcatttttccgtaaaaatgatttcagtagcacaagttatttaaatctgtttttctaactgggggaaaagattcccacccaattcaaaacattgtgccatgtcaaacaaatagtctatcaaccccagacactggtttgaagaatgttaagacttgacagtggaactacattagtacacagcaccagaatgtatattaaggtgtggctttaggagcagtgggagggtaccagcagaaaggttagtatcatcagatagcatcttatacgagtaatatgcctgctagatgtgcattctccagccatcaagagactgagtcaagttgttccttaagtcagaacagcagactcagctctgacattctgattcgaatgacactgttcaggaatcggaatcctgtcgattagactggacagcttgtggcaagtgaatttgcctgtaacaagccagattttttaaaatttatattgtaaatattgtgtgtgtgtgtgtgtgtgtatatatatatatatgtacagttatctaagttaatttaaagttgtttgtgcctttttatttttgtttttaatgctttgatatttcaatgttagcctcaatttctgaacaccataggtagaatgtaaagcttgtctgatcgttcaaagcatgaaatggatacttatatggaaattctgctcagatagaatgacagtccgtcaaaacagattgtttgcaaaggggaggcatcagtgtccttggcaggctgatttctaggtaggaaatgtggtagcctcacttttaatgaacaaatggcctttattaaaaactgagtgactctatatagctgatcagttttttcacctggaagcatttgtttctactttgatatgactgtttttcggacagtttatttgttgagagtgtgaccaaaagttacatgtttgcacctttctagttgaaaataaagtgtatattttttctataaa

SEQ ID NO: 331319 - DNA, 1013 bp, Homo sapiens
tgatagactatttgtttgacatggcacaatgttttgaatgggtgggaatcttgttcccccaattcaaaacattgtgccatgtcaaacaaatagtctatcaaccccagacactggtttgaagaatgttaagacttgacagtggaactacattagtacacagcaccagaatgtatattaaggtgtggctttaggagcagtgggagggtaccagcagaaaggttagtatcatcagatagcatcttatacgagtaatatgcctgctatttgaagtgtaattgagaaggaaaattttagcgtgctcactgacctgcctgtagccccagtgacagctaggatgtgcattctccagccatcaagagactgagtcaagttgttccttaagtcagaacagcagactcagctctgacattctgattcgaatgacactgttcaggaatcggaatcctgtcgattagactggacagcttgtggcaagtgaatttgcctgtaacaagccagattttttaaaatttatattgtaaatattgtgtgtgtgtgtgtgtgtgtatatatatatatatgtacagttatctaagttaatttaaagttgtttgtgcctttttatttttgtttttaatgctttgatatttcaatgttagcctcaatttctgaacaccataggtagaatgtaaagcttgtctgatcgttcaaagcatgaaatggatacttatatggaaattctgctcagatagaatgacagtccgtcaaaacagattgtttgcaaaggggaggcatcagtgtccttggcaggctgatttctaggtaggaaatgtggtagcctcacttttaatgaacaaatggcctttattaaaaactgagtgactctatatagctgatcagttttttcacctggaagcatttgtttctactttgatatgactgtttttcggacagtttatttgttgagagtgtgaccaaaagttacatgtttgcacctttctagttgaaaataaagtgtatattttttctataaa

SEQ ID NO: 331320 - DNA, 2770 bp, Homo sapiens
acaacaactcttccccgctgagaggagacagccagtgcgactccaccctccagctcgacggcagccgccccggccgacagccccgagacgacagcccggcgcgtcccggtccccacctccgaccaccgccagcgctccaggccccgccgctccccgctcgccgccaccgcgccctccgctccgcccgcagtgccaaccatgaccgccgccagtatgggccccgtccgcgtcgccttcgtggtcctcctcgccctctgcagccggccggccgtcggccagaactgcagcgggccgtgccggtgcccggacgagccggcgccgcgctgcccggcgggcgtgagcctcgtgctggacggctgcggctgctgccgcgtctgcgccaagcagctgggcgagctgtgcaccgagcgcgacccctgcgacccgcacaagggcctcttctgtgacttcggctccccggccaaccgcaagatcggcgtgtgcaccgccaaagatggtgctccctgcatcttcggtggtacggtgtaccgcagcggagagtccttccagagcagctgcaagtaccagtgcacgtgcctggacggggcggtgggctgcatgcccctgtgcagcatggacgttcgtctgcccagccctgactgccccttcccgaggagggtcaagctgcccgggaaatgctgcgaggagtgggtgtgtgacgagcccaaggaccaaaccgtggttgggcctgccctcgcggcttaccgactggaagacacgtttggcccagacccaactatgattagagccaactgcctggtccagaccacagagtggagcgcctgttccaagacctgtgggatgggcatctccacccgggttaccaatgacaacgcctcctgcaggctagagaagcagagccgcctgtgcatggtcaggccttgcgaagctgacctggaagagaacattaagaagggcaaaaagtgcatccgtactcccaaaatctccaagcctatcaagtttgagctttctggctgcaccagcatgaagacataccgagctaaattctgtggagtatgtaccgacggccgatgctgcaccccccacagaaccaccaccctgccggtggagttcaagtgccctgacggcgaggtcatgaagaagaacatgatgttcatcaagacctgtgcctgccattacaactgtcccggagacaatgacatctttgaatcgctgtactacaggaagatgtacggagacatggcatgaagccagagagtgagagacattaactcattagactggaacttgaactgattcacatctcatttttccgtaaaaatgatttcagtagcacaagttatttaaatctgtttttctaactgggggaaaagattcccacccaattcaaaacattgtgccatgtcaaacaaatagtctatcaaccccagacactggtttgaagaatgttaagacttgacagtggaactacattagtacacagcaccagaatgtatattaaggtgtggctttaggagcagtgggagggtaccagcagaaaggttagtatcatcagatagcatcttatacgagtaatatgcctgctatttgaagtgtaattgagaaggaaaattttagcgtgctcactgacctgcctgtagccccagtgacagctaggatgtgcattctccagccatcaagagactgagtcaagttgttccttaagtcagaacagcagactcagctctgacattctgattcgaatgacactgttcaggaatcggaatcctgtcgattagactggacagcttgtggcaagtgaatttgcctgtaacaagccagattttttaaaatttatattgtaaatattgtgtgtgtgtgtgtgtgtgtatatatatatatatgtacagttatctaagttaatttaaagttgtttgtgcctttttatttttgtttttaatgctttgatatttcaatgttagcctcaatttctgaacaccataggtagaatgtaaagcttgtctgatcgttcaaagcatgaaatggatacttatatggaaattctgctcagatagaatgacagtccgtcaaaacagattgtttgcaaaggggaggcatcagtgtccttggcaggctgatttctaggtaggaaatgtggtagcctcacttttaatgaacaaatggcctttattaaaaactgagtgactctatatagctgatcagttttttcacctggaagcatttgtttctactttgatatgactgtttttcggacagtttatttgttgagagtgtgaccaaaagttacatgtttgcacctttctagttgaaaataaagtgtatattttttctataaaaaaaaaaacaaaaaaaacaaaaaaaaaaaaaaaaacaccacacaacacaaaaaagaaaacacaagaagacacaacagcagaacaaacacaacacggcagacaacccaacgcaaagagccgcgggcgggcgcgagccgcgcacagtgcaccccgcgcgcggcgaggaccccgcgctcggcgcgcaccacgcggcagcgccacacacgcgcgacgccccgcatacaacataggggtcggcggcctgtcaccgtaatggtacgcggccggaaccggccacgcgcgagggccgcacaaaaagcaagccggagcagcgatcgcacggccgcaaccgcaccacacgtgcacactagacgcgtcacagcccaccacgcacgaacaaacaagccccatacacaccgacgcgcgcgcgcccaacaccaaccactcacagccac

SEQ ID NO: 331321 - DNA, 2376 bp, Homo sapiens
acaacaactcttccccgctgagaggagacagccagtgcgactccaccctccagctcgacggcagccgccccggccgacagccccgagacgacagcccggcgcgtcccggtccccacctccgaccaccgccagcgctccaggccccgccgctccccgctcgccgccaccgcgccctccgctccgcccgcagtgccaaccatgaccgccgccagtatgggccccgtccgcgtcgccttcgtggtcctcctcgccctctgcagccggccggccgtcggccagaactgcagcgggccgtgccggtgcccggacgagccggcgccgcgctgcccggcgggcgtgagcctcgtgctggacggctgcggctgctgccgcgtctgcgccaagcagctgggcgagctgtgcaccgagcgcgacccctgcgacccgcacaagggcctcttctgtgacttcggctccccggccaaccgcaagatcggcgtgtgcaccgccaaagatggtgctccctgcatcttcggtggtacggtgtaccgcagcggagagtccttccagagcagctgcaagtaccagtgcacgtgcctggacggggcggtgggctgcatgcccctgtgcagcatggacgttcgtctgcccagccctgactgccccttcccgaggagggtcaagctgcccgggaaatgctgcgaggagtgggtgtgtgacgagcccaaggaccaaaccgtggttgggcctgccctcgcggcttaccgactggaagacacgtttggcccagacccaactatgattagagccaactgcctggtccagaccacagagtggagcgcctgttccaagacctgtgggatgggcatctccacccgggttaccaatgacaacgcctcctgcaggctagagaagcagagccgcctgtgcatggtcaggccttgcgaagctgacctggaagagaacattaagaagggcaaaaagtgcatccgtactcccaaaatctccaagcctatcaagtttgagctttctggctgcaccagcatgaagacataccgagctaaattctgtggagtatgtaccgacggccgatgctgcaccccccacagaaccaccaccctgccggtggagttcaagtgccctgacggcgaggtcatgaagaagaacatgatgttcatcaagacctgtgcctgccattacaactgtcccggagacaatgacatctttgaatcgctgtactacaggaagatgtacggagacatggcatgaagccagagagtgagagacattaactcattagactggaacttgaactgattcacatctcatttttccgtaaaaatgatttcagtagcacaagttatttaaatctgtttttctaactgggggaaaagattcccacccaattcaaaacattgtgccatgtcaaacaaatagtctatcaaccccagacactggtttgaagaatgttaagacttgacagtggaactacattagtacacagcaccagaatgtatattaaggtgtggctttaggagcagtgggagggtaccagcagaaaggttagtatcatcagatagcatcttatacgagtaatatgcctgctatttgaagtgtaattgagaaggaaaattttagcgtgctcactgacctgcctgtagccccagtgacagctaggatgtgcattctccagccatcaagagactgagtcaagttgttccttaagtcagaacagcagactcagctctgacattctgattcgaatgacactgttcaggaatcggaatcctgtcgattagactggacagcttgtggcaagtgaatttgcctgtaacaagccagattttttaaaatttatattgtaaatattgtgtgtgtgtgtgtgtgtgtatatatatatatatgtacagttatctaagttaatttaaagttgtttgtgcctttttatttttgtttttaatgctttgatatttcaatgttagcctcaatttctgaacaccataggtagaatgtaaagcttgtctgatcgttcaaagcatgaaatggatacttatatggaaattctgctcagatagaatgacagtccgtcaaaacagattgtttgcaaaggggaggcatcagtgtccttggcaggctgatttctaggtaggaaatgtggtagcctcacttttaatgaacaaatggcctttattaaaaactgagtgactctatatagctgatcagttttttcacctggaagcatttgtttctactttgatatgactgtttttcggacagtttatttgttgagagtgtgaccaaaagttacatgtttgcacctttctagcttcccccccagtagtatattttttgtattttaaaaaaaaaaaaggtttgtgccgaatataagagtaatcc

SEQ ID NO: 331322 - DNA, 2259 bp, Homo sapiens
acaacaactcttccccgctgagaggagacagccagtgcgactccaccctccagctcgacggcagccgccccggccgacagccccgagacgacagcccggcgcgtcccggtccccacctccgaccaccgccagcgctccaggccccgccgctccccgctcgccgccaccgcgccctccgctccgcccgcagtgccaaccatgaccgccgccagtatgggccccgtccgcgtcgccttcgtggtcctcctcgccctctgcagccggccggccgtcggccagaactgcagcgggccgtgccggtgcccggacgagccggcgccgcgctgcccggcgggcgtgagcctcgtgctggacggctgcggctgctgccgcgtctgcgccaagcagctgggcgagctgtgcaccgagcgcgacccctgcgacccgcacaagggcctcttctgtgacttcggctccccggccaaccgcaagatcggcgtgtgcaccgccaaagatggtgctccctgcatcttcggtggtacggtgtaccgcagcggagagtccttccagagcagctgcaagtaccagtgcacgtgcctggacggggcggtgggctgcatgcccctgtgcagcatggacgttcgtctgcccagccctgactgccccttcccgaggagggtcaagctgcccgggaaatgctgcgaggagtgggtgtgtgacgagcccaaggaccaaaccgtggttgggcctgccctcgcggcttaccgactggaagacacgtttggcccagacccaactatgattagagccaactgcctggtccagaccacagagtggagcgcctgttccaagacctgtgggatgggcatctccacccgggttaccaatgacaacgcctcctgcaggctagagaagcagagccgcctgtgcatggtcaggccttgcgaagctgacctggaagagaacattaagaagggcaaaaagtgcatccgtactcccaaaatctccaagcctatcaagtttgagctttctggctgcaccagcatgaagacataccgagctaaattctgtggagtatgtaccgacggccgatgctgcaccccccacagaaccaccaccctgccggtggagttcaagtgccctgacggcgaggtcatgaagaagaacatgatgttcatcaagacctgtgcctgccattacaactgtcccggagacaatgacatctttgaatcgctgtactacaggaagatgtacggagacatggcatgaagccagagagtgagagacattaactcattagactggaacttgaactgattcacatctcatttttccgtaaaaatgatttcagtagcacaagttatttaaatctgtttttctaactgggggaaaagattcccacccaattcaaaacattgtgccatgtcaaacaaatagtctatcaaccccagacactggtttgaagaatgttaagacttgacagtggaactacattagtacacagcaccagaatgtatattaaggtgtggctttaggagcagtgggagggtaccagcagaaaggttagtatcatcagatagcatcttatacgagtaatatgcctgctatttgaagtgtaattgagaaggaaaattttagcgtgctcactgacctgcctgtagccccagtgacagctaggatgtgcattctccagccatcaagagactgagtcaagttgttccttaagtcagaacagcagactcagctctgacattctgattcgaatgacactgttcaggaatcggaatcctgtcgattagactggacagcttgtggcaagtgaatttgcctgtaacaagccagattttttaaaatttatattgtaaatattgtgtgtgtgtgtgtgtgtgtatatatatatatatgtacagttatctaagttaatttaaagttgtttgtgcctttttatttttgtttttaatgctttgatatttcaatgttagcctcaatttctgaacaccataggtagaatgtaaagcttgtctgatcgttcaaagcatgaaatggatacttatatggaaattctgctcagatagaatgacagtccgtcaaaacagattgtttgcaaaggggaggcatcagtgtccttgtctatatagctgatcagttttttcacctggaagcatttgtttctactttgatatgactgtttttcggacagtttatttgttgagagtgtgaccaaaagttacatgtttgcacctttctagttgaaaataaagtgtatattttttctataaa

SEQ ID NO: 331323 - DNA, 2176 bp, Homo sapiens
acaacaactcttccccgctgagaggagacagccagtgcgactccaccctccagctcgacggcagccgccccggccgacagccccgagacgacagcccggcgcgtcccggtccccacctccgaccaccgccagcgctccaggccccgccgctccccgctcgccgccaccgcgccctccgctccgcccgcagtgccaaccatgaccgccgccagtatgggccccgtccgcgtcgccttcgtggtcctcctcgccctctgcagccggccggccgtcggccagaactgcagcgggccgtgccggtgcccggacgagccggcgccgcgctgcccggcgggcgtgagcctcgtgctggacggctgcggctgctgccgcgtctgcgccaagcagctgggcgagctgtgcaccgagcgcgacccctgcgacccgcacaagggcctcttctgtgacttcggctccccggccaaccgcaagatcggcgtgtgcaccgccaaagatggtgctccctgcatcttcggtggtacggtgtaccgcagcggagagtccttccagagcagctgcaagtaccagtgcacgtgcctggacggggcggtgggctgcatgcccctgtgcagcatggacgttcgtctgcccagccctgactgccccttcccgaggagggtcaagctgcccgggaaatgctgcgaggagtgggtgtgtgacgagcccaaggaccaaaccgtggttgggcctgccctcgcggcttaccgactggaagacacgtttggcccagacccaactatgattagagccaactgcctggtccagaccacagagtggagcgcctgttccaagacctgtgggatgggcatctccacccgggttaccaatgacaacgcctcctgcaggctagagaagcagagccgcctgtgcatggtcaggccttgcgaagctgacctggaagagaacattaagaagggcaaaaagtgcatccgtactcccaaaatctccaagcctatcaagtttgagctttctggctgcaccagcatgaagacataccgagctaaattctgtggagtatgtaccgacggccgatgctgcaccccccacagaaccaccaccctgccggtggagttcaagtgccctgacggcgaggtcatgaagaagaacatgatgttcatcaagacctgtgcctgccattacaactgtcccggagacaatgacatctttgaatcgctgtactacaggaagatgtacggagacatggcatgaagccagagagtgagagacattaactcattagactggaacttgaactgattcacatctcatttttccgtaaaaatgatttcagtagcacaagttatttaaatctgtttttctaactgggggaaaagattcccacccaattcaaaacattgtgccatgtcaaacaaatagtctatcaaccccagacactggtttgaagaatgttaagacttgacagtggaactacattagtacacagcaccagaatgtatattaaggtgtggctttaggagcagtgggagggtaccagcagaaaggttagtatcatcagatagcatcttatacgagtaatatgcctgctatttgaagtgtaattgagaaggaaaattttagcgtgctcactgacctgcctgtagccccagtgacagctaggatgtgcattctccagccatcaagagactgagtcaagttgttccttaagtcagaacagcagactcagctctgacattctgattcgaatgacactgttcaggaatcggaatcctgtcgattagactggacagcttgtggcaagtgaatttgcctgtaacaagccagattttttaaaatttatattgtaaatattgtgtgtgtgtgtgtgtgtgtatatatatatatatgtacagttatctaagttaatttaaagttgtttgtgcctttttatttttgtttttaatgctttgatatttcaatgttagcctcaatttctgaacaccataggtagaatgtaaagcttgtctgatcgtcaagctgaagggtactttttgggaatcggccgatagaagagacccggcaccgatgtttgccgggggagcacacgccggcagcgatcaaggagaaggggccccttgagagggtctaaggggcttatggccaccggaagtctaaagggccatggagcaccaggtccaat

SEQ ID NO: 331324 - DNA, 793 bp, Homo sapiens
  misc_feature (776)..(776): n is a, c, g, or t
  misc_feature (785)..(785): n is a, c, g, or t
acaacaactcttccccgctgagaggagacagccagtgcgactccaccctccagctcgacggcagccgccccggccgacagccccgagacgacagcccggcgcgtcccggtccccacctccgaccaccgccagcgctccaggccccgccgctccccgctcgccgccaccgcgccctccgctccgcccgcagtgccaaccatgaccgccgccagtatgggccccgtccgcgtcgccttcgtggtcctcctcgccctctgcagccggccggccgtcggccagaactgcagcgggccgtgccggtgcccggacgagccggcgccgcgctgcccggcgggcgtgagcctcgtgctggacggctgcggctgctgccgcgtctgcgccaagcagctgggcgagctgtgcaccgagcgcgacccctgcgacccgcacaagggcctcttctgtgacttcggctccccggccaaccgcaagatcggcgtgtgcaccgccaaagatggtgctccctgcatcttcggtggtacggtgtaccgcagcggagagtccttccagagcagctgcaagtaccagtgcacgtgcctggacggggcggtgggctgcatgcccctgtgcagcatggacgttcgtctgcccagccctgactgccccttcccgaggagggtcaagctgcccgggaaatgctgcgaggagtgggtgtgtgacgagcccaaggaccaaaccgggtggctgcttgggtacatgaaaacttgcaacacttataagcatgtgcaacaaatgangttcaactngatggatt

SEQ ID NO: 331325 - DNA, 858 bp, Homo sapiens
  misc_feature (20)..(20): n is a, c, g, or t
tactactactaaattcgcgnccgcgtcgactttgatatttcaatgttagcctcaatttctgaacaccataggtagaatgtaaagcttgtctgatcgttcaaagcatgaaatggatacttatatggaaattctgctcagatagaatgacagtccgtcaaaacagattgtttgcaaaggggaggcatcagtgtccttggcaggctgatttctaggtaggaaatgtggtagcctcacttttaatgaacaaatggcctttattaaaaactgagtgactctatatagctgatcagttttttcacctggaagcatttgtttctactttgatatgactgtttttcggacagtttatttgttgagagtgtgaccaaaagttacatgtttgcacctttctagttgaaaataaagtgtatattttttctataaaaaaaaaaacaaaaaaaacaaaaaaaaaaaaaaaaacaccacacaacacaaaaaagaaaacacaagaagacacaacagcagaacaaacacaacacggcagacaacccaacgcaaagagccgcgggcgggcgcgagccgcgcacagtgcaccccgcgcgcggcgaggaccccgcgctcggcgcgcaccacgcggcagcgccacacacgcgcgacgccccgcatacaacataggggtcggcggcctgtcaccgtaatggtacgcggccggaaccggccacgcgcgagggccgcacaaaaagcaagccggagcagcgatcgcacggccgcaaccgcaccacacgtgcacactagacgcgtcacagcccaccacgcacgaacaaacaagccccatacacaccgacgcgcgcgcgcccaacaccaaccactcacagccac

SEQ ID NO: 331326 - DNA, 2467 bp, Homo sapiens
acaacaactcttccccgctgagaggagacagccagtgcgactccaccctccagctcgacggcagccgccccggccgacagccccgagacgacagcccggcgcgtcccggtccccacctccgaccaccgccagcgctccaggccccgccgctccccgctcgccgccaccgcgccctccgctccgcccgcagtgccaaccatgaccgccgccagtatgggccccgtccgcgtcgccttcgtggtcctcctcgccctctgcagccggccggccgtcggccagaactgcagcgggccgtgccggtgcccggacgagccggcgccgcgctgcccggcgggcgtgagcctcgtgctggacggctgcggctgctgccgcgtctgcgccaagcagctgggcgagctgtgcaccgagcgcgacccctgcgacccgcacaagggcctcttctgtgacttcggctccccggccaaccgcaagatcggcgtgtgcaccgccaaagatggtgctccctgcatcttcggtggtacggtgtaccgcagcggagagtccttccagagcagctgcaagtaccagtgcacgtgcctggacggggcggtgggctgcatgcccctgtgcagcatggacgttcgtctgcccagccctgactgccccttcccgaggagggtcaagctgcccgggaaatgctgcgaggagtgggtgtgtgacgagcccaaggaccaaaccgtggttgggcctgccctcgcgggtgagtcgagtcttcctctaagtcagggtcgtgattctctcccagggagggagtcctaactgtgccgaccgaacgggggaaataccttatccaggcgttttacatggtgtttgtgtgctctgctctcgcagcttaccgactggaagacacgtttggcccagacccaactatgattagagccaactgcctggtccagaccacagagtggagcgcctgttccaagacctgtgggatgggcatctccacccgggttaccaatgacaacgcctcctgcaggctagagaagcagagccgcctgtgcatggtcaggccttgcgaagctgacctggaagagaacattaagaagggcaaaaagtgcatccgtactcccaaaatctccaagcctatcaagtttgagctttctggctgcaccagcatgaagacataccgagctaaattctgtggagtatgtaccgacggccgatgctgcaccccccacagaaccaccaccctgccggtggagttcaagtgccctgacggcgaggtcatgaagaagaacatgatgttcatcaagacctgtgcctgccattacaactgtcccggagacaatgacatctttgaatcgctgtactacaggaagatgtacggagacatggcatgaagccagagagtgagagacattaactcattagactggaacttgaactgattcacatctcatttttccgtaaaaatgatttcagtagcacaagttatttaaatctgtttttctaactgggggaaaagattcccacccaattcaaaacattgtgccatgtcaaacaaatagtctatcaaccccagacactggtttgaagaatgttaagacttgacagtggaactacattagtacacagcaccagaatgtatattaaggtgtggctttaggagcagtgggagggtaccagcagaaaggttagtatcatcagatagcatcttatacgagtaatatgcctgctatttgaagtgtaattgagaaggaaaattttagcgtgctcactgacctgcctgtagccccagtgacagctaggatgtgcattctccagccatcaagagactgagtcaagttgttccttaagtcagaacagcagactcagctctgacattctgattcgaatgacactgttcaggaatcggaatcctgtcgattagactggacagcttgtggcaagtgaatttgcctgtaacaagccagattttttaaaatttatattgtaaatattgtgtgtgtgtgtgtgtgtgtatatatatatatatgtacagttatctaagttaatttaaagttgtttgtgcctttttatttttgtttttaatgctttgatatttcaatgttagcctcaatttctgaacaccataggtagaatgtaaagcttgtctgatcgttcaaagcatgaaatggatacttatatggaaattctgctcagatagaatgacagtccgtcaaaacagattgtttgcaaaggggaggcatcagtgtccttggcaggctgatttctaggtaggaaatgtggtagcctcacttttaatgaacaaatggcctttattaaaaactgagtgactctatatagctgatcagttttttcacctggaagcatttgtttctactttgatatgactgtttttcggacagtttatttgttgagagtgtgaccaaaagttacatgtttgcacctttctagttgaaaataaagtgtatattttttctataaa

SEQ ID NO: 331327 - DNA, 2238 bp, Homo sapiens
acaacaactcttccccgctgagaggagacagccagtgcgactccaccctccagctcgacggcagccgccccggccgacagccccgagacgacagcccggcgcgtcccggtccccacctccgaccaccgccagcgctccaggccccgccgctccccgctcgccgccaccgcgccctccgctccgcccgcagtgccaaccatgaccgccgccagtatgggccccgtccgcgtcgccttcgtggtcctcctcgccctctgcagccggccggccgtcggccagaactgcagcgggccgtgccggtgcccggacgagccggcgccgcgctgcccggcgggcgtgagcctcgtgctggacggctgcggctgctgccgcgtctgcgccaagcagctgggcgagctgtgcaccgagcgcgacccctgcgacccgcacaagggcctcttctgtgacttcggctccccggccaaccgcaagatcggcgtgtgcaccgccaaagatggtgctccctgcatcttcggtggtacggtgtaccgcagcggagagtccttccagagcagctgcaagtaccagtgcacgtgcctggacggggcggtgggctgcatgcccctgtgcagcatggacgttcgtctgcccagccctgactgcttaccgactggaagacacgtttggcccagacccaactatgattagagccaactgcctggtccagaccacagagtggagcgcctgttccaagacctgtgggatgggcatctccacccgggttaccaatgacaacgcctcctgcaggctagagaagcagagccgcctgtgcatggtcaggccttgcgaagctgacctggaagagaacattaagaagggcaaaaagtgcatccgtactcccaaaatctccaagcctatcaagtttgagctttctggctgcaccagcatgaagacataccgagctaaattctgtggagtatgtaccgacggccgatgctgcaccccccacagaaccaccaccctgccggtggagttcaagtgccctgacggcgaggtcatgaagaagaacatgatgttcatcaagacctgtgcctgccattacaactgtcccggagacaatgacatctttgaatcgctgtactacaggaagatgtacggagacatggcatgaagccagagagtgagagacattaactcattagactggaacttgaactgattcacatctcatttttccgtaaaaatgatttcagtagcacaagttatttaaatctgtttttctaactgggggaaaagattcccacccaattcaaaacattgtgccatgtcaaacaaatagtctatcaaccccagacactggtttgaagaatgttaagacttgacagtggaactacattagtacacagcaccagaatgtatattaaggtgtggctttaggagcagtgggagggtaccagcagaaaggttagtatcatcagatagcatcttatacgagtaatatgcctgctatttgaagtgtaattgagaaggaaaattttagcgtgctcactgacctgcctgtagccccagtgacagctaggatgtgcattctccagccatcaagagactgagtcaagttgttccttaagtcagaacagcagactcagctctgacattctgattcgaatgacactgttcaggaatcggaatcctgtcgattagactggacagcttgtggcaagtgaatttgcctgtaacaagccagattttttaaaatttatattgtaaatattgtgtgtgtgtgtgtgtgtgtatatatatatatatgtacagttatctaagttaatttaaagttgtttgtgcctttttatttttgtttttaatgctttgatatttcaatgttagcctcaatttctgaacaccataggtagaatgtaaagcttgtctgatcgttcaaagcatgaaatggatacttatatggaaattctgctcagatagaatgacagtccgtcaaaacagattgtttgcaaaggggaggcatcagtgtccttggcaggctgatttctaggtaggaaatgtggtagcctcacttttaatgaacaaatggcctttattaaaaactgagtgactctatatagctgatcagttttttcacctggaagcatttgtttctactttgatatgactgtttttcggacagtttatttgttgagagtgtgaccaaaagttacatgtttgcacctttctagttgaaaataaagtgtatattttttctataaa

SEQ ID NO: 331328 - DNA, 2279 bp, Homo sapiens
acaacaactcttccccgctgagaggagacagccagtgcgactccaccctccagctcgacggcagccgccccggccgacagccccgagacgacagcccggcgcgtcccggtccccacctccgaccaccgccagcgctccaggccccgccgctccccgctcgccgccaccgcgccctccgctccgcccgcagtgccaaccatgaccgccgccagtatgggccccgtccgcgtcgccttcgtggtcctcctcgccctctgcagccggccggccgtcggccagaactgcagcgggccgtgccggtgcccggacgagccggcgccgcgctgcccggcgggcgtgagcctcgtgctggacggctgcggctgctgccgcgtctgcgccaagcagctgggcgagctgtgcaccgagcgcgacccctgcgacccgcacaagggcctcttctgtgacttcggctccccggccaaccgcaagatcggcgtgtgcaccgccaaagatggtgctccctgcatcttcggtggtacggtgtaccgcagcggagagtccttccagagcagctgcaagtaccagtgcacgtgcctggacggggcggtgggctgcatgcccctgtgcagcatggacgttcgtctgcccagccctgactgccccttcccgaggagggtcaagctgcccgggaaatgctgcgaggagtgggtgtgtgacgagcccaaggaccaaaccgtggttgggcctgccctcgcggcttaccgactggaagacacgtttggcccagacccaactatgattagagccaactgcctggtccagaccacagagtggagcgcctgttccaagacctgtgggatgggcatctccacccgggttaccaatgacaacgcctcctgcaggctagagaagcagagccgcctgtgcatggtcaggccttgcgaagctgacctggaagagaacattaagaagggcaaaaagtgcatccgtacataccgagctaaattctgtggagtatgtaccgacggccgatgctgcaccccccacagaaccaccaccctgccggtggagttcaagtgccctgacggcgaggtcatgaagaagaacatgatgttcatcaagacctgtgcctgccattacaactgtcccggagacaatgacatctttgaatcgctgtactacaggaagatgtacggagacatggcatgaagccagagagtgagagacattaactcattagactggaacttgaactgattcacatctcatttttccgtaaaaatgatttcagtagcacaagttatttaaatctgtttttctaactgggggaaaagattcccacccaattcaaaacattgtgccatgtcaaacaaatagtctatcaaccccagacactggtttgaagaatgttaagacttgacagtggaactacattagtacacagcaccagaatgtatattaaggtgtggctttaggagcagtgggagggtaccagcagaaaggttagtatcatcagatagcatcttatacgagtaatatgcctgctatttgaagtgtaattgagaaggaaaattttagcgtgctcactgacctgcctgtagccccagtgacagctaggatgtgcattctccagccatcaagagactgagtcaagttgttccttaagtcagaacagcagactcagctctgacattctgattcgaatgacactgttcaggaatcggaatcctgtcgattagactggacagcttgtggcaagtgaatttgcctgtaacaagccagattttttaaaatttatattgtaaatattgtgtgtgtgtgtgtgtgtgtatatatatatatatgtacagttatctaagttaatttaaagttgtttgtgcctttttatttttgtttttaatgctttgatatttcaatgttagcctcaatttctgaacaccataggtagaatgtaaagcttgtctgatcgttcaaagcatgaaatggatacttatatggaaattctgctcagatagaatgacagtccgtcaaaacagattgtttgcaaaggggaggcatcagtgtccttggcaggctgatttctaggtaggaaatgtggtagcctcacttttaatgaacaaatggcctttattaaaaactgagtgactctatatagctgatcagttttttcacctggaagcatttgtttctactttgatatgactgtttttcggacagtttatttgttgagagtgtgaccaaaagttacatgtttgcacctttctagttgaaaataaagtgtatattttttctataaa

SEQ ID NO: 331329 - DNA, 2378 bp, Homo sapiens
  misc_feature (2351)..(2351): n is a, c, g, or t
acaacaactcttccccgctgagaggagacagccagtgcgactccaccctccagctcgacggcagccgccccggccgacagccccgagacgacagcccggcgcgtcccggtccccacctccgaccaccgccagcgctccaggccccgccgctccccgctcgccgccaccgcgccctccgctccgcccgcagtgccaaccatgaccgccgccagtatgggccccgtccgcgtcgccttcgtggtcctcctcgccctctgcagccggccggccgtcggccagaactgcagcgggccgtgccggtgcccggacgagccggcgccgcgctgcccggcgggcgtgagcctcgtgctggacggctgcggctgctgccgcgtctgcgccaagcagctgggcgagctgtgcaccgagcgcgacccctgcgacccgcacaagggcctcttctgtgacttcggctccccggccaaccgcaagatcggcgtgtgcaccgccaaagatggtgctccctgcatcttcggtggtacggtgtaccgcagcggagagtccttccagagcagctgcaagtaccagtgcacgtgcctggacggggcggtgggctgcatgcccctgtgcagcatggacgttcgtctgcccagccctgactgccccttcccgaggagggtcaagctgcccgggaaatgctgcgaggagtgggtgtgtgacgagcccaaggaccaaaccgtggttgggcctgccctcgcggcttaccgactggaagacacgtttggcccagacccaactatgattagagccaactgcctggtccagaccacagagtggagcgcctgttccaagacctgtgggatgggcatctccacccgggttaccaatgacaacgcctcctgcaggctagagaagcagagccgcctgtgcatggtcaggccttgcgaagctgacctggaagagaacattaagaagggcaaaaagtgcatccgtactcccaaaatctccaagcctatcaagtttgagctttctggctgcaccagcatgaagacataccgagctaaattctgtggagtatgtaccgacggccgatgctgcaccccccacagaaccaccaccctgccggtggagttcaagtgccctgacggcgaggtcatgaagaagaacatgatgttcatcaagacctgtgcctgccattacaactgtcccggagacaatgacatctttgaatcgctgtactacaggaagatgtacggagacatggcatgaagccagagagtgagagacattaactcattagactggaacttgaactgattcacatctcatttttccgtaaaaatgatttcagtagcacaagttatttaaatctgtttttctaactgggggaaaagattcccacccaattcaaaacattgtgccatgtcaaacaaatagtctatcaaccccagacactggtttgaagaatgttaagacttgacagtggaactacattagtacacagcaccagaatgtatattaaggtgtggctttaggagcagtgggagggtaccagcagaaaggttagtatcatcagatagcatcttatacgagtaatatgcctgctatttgaagtgtaattgagaaggaaaattttagcgtgctcactgacctgcctgtagccccagtgacagctaggatgtgcattctccagccatcaagagactgagtcaagttgttccttaagtcagaacagcagactcagctctgacattctgattcgaatgacactgttcaggaatcggaatcctgtcgattagactggacagcttgtggcaagtgaatttgcctgtaacaagccagattttttaaaatttatattgtaaatattgtgtgtgtgtgtgtgtgtgtatatatatatatatgtacagttatctaagttaatttaaagttgtttgtgcctttttatttttgtttttaatgctttgatatttcaatgttagcctcaatttctgaacaccataggtagaatgtaaagcttgtctgatcgttcaaagcatgaaatggatacttatatggaaattctgctcagatagaatgacagtccgtcaaaacagattgtttgcaaaggggaggcatcagtgtccttggcaggctgatttctaggtaggaaatgtggtagcctcacttttaatgaacaaatggcctttattaaaaactgagtgactctatatagctgatcagttttttcacctggaagcatttgtttctactttgatatgactgtttttcggacagtttatttgttgagagtgtgaccaaaagttacatgtttgcacctttctagttgaaaataaagtgtatattttttctataaaaaaaaaaaaaaaaanaacaaaatgtggcgcggccctggcaca

SEQ ID NO: 331330 - DNA, 1539 bp, Homo sapiens
  misc_feature (1523)..(1523): n is a, c, g, or t
  misc_feature (1530)..(1530): n is a, c, g, or t
acaacaactcttccccgctgagaggagacagccagtgcgactccaccctccagctcgacggcagccgccccggccgacagccccgagacgacagcccggcgcgtcccggtccccacctccgaccaccgccagcgctccaggccccgccgctccccgctcgccgccaccgcgccctccgctccgcccgcagtgccaaccatgaccgccgccagtatgggccccgtccgcgtcgccttcgtggtcctcctcgccctctgcagccggccggccgtcggccagaactgcagcgggccgtgccggtgcccggacgagccggcgccgcgctgcccggcgggcgtgagcctcgtgctggacggctgcggctgctgccgcgtctgcgccaagcagctgggcgagctgtgcaccgagcgcgacccctgcgacccgcacaagggcctcttctgtgacttcggctccccggccaaccgcaagatcggcgtgtgcaccgccaaagatggtgctccctgcatcttcggtggtacggtgtaccgcagcggagagtccttccagagcagctgcaagtaccagtgcacgtgcctggacggggcggtgggctgcatgcccctgtgcagcatggacgttcgtctgcccagccctgactgccccttcccgaggagggtcaagctgcccgggaaatgctgcgaggagtgggtgtgtgacgagcccaaggaccaaaccgtggttgggcctgccctcgcggcttaccgactggaagacacgtttggcccagacccaactatgattagagccaactgcctggtccagaccacagagtggagcgcctgttccaagacctgtgggatgggcatctccacccgggttaccaatgacaacgcctcctgcaggctagagaagcagagccgcctgtgcatggtcaggccttgcgaagctgacctggaagagaacattaagaagggcaaaaagtgcatccgtactcccaaaatctccaagcctatcaagtttgagctttctggctgcaccagcatgaagacataccgagctaaattctgtggagtatgtaccgacggccgatgctgcaccccccacagaaccaccaccctgccggtggagttcaagtgccctgacggcgaggtcatgaagaagaacatgatgttcatcaagacctgtgcctgccattacaactgtcccggagacaatgacatctttgaatcgctgtactacaggaagatgtacggagacatggcatgaagccagagagtgagagacattaactcattagactggaacttgaactgattcacatctcatttttccgtaaaaatgatttcagtagcacaagttatttaaatctgtttttctaactgggggaaaagattcccacccaattcaaaacattgtgccatgtcaaacaaatagtctatcaaccccagacactggtttgaagaatgttaagacttgacagtggaactacattagtacacagcaccagaatgtatattaaggtgtggcttgggtgccgtgtnaatcctntagatcgac

SEQ ID NO: 331331 - DNA, 194 bp, Homo sapiens
catttttcagtcatgccttgaagttcgttcttctagcccattgcctagaatgtaaccccctccctccttttcacgttctttgtgcttgtccttcaaggccccagttaaatgtctgctacaagttggccccttcttttctgtgctcctgtaactctcctgtagcgcttttcaggtccggccgaagtgatcttcat

SEQ ID NO: 331332 - DNA, 255 bp, Homo sapiens
gcttacagtataagatccaaactgtgggcaaacaacgcacttcacaacgtggccaactctctggacctaacctcccacaaattcctttcaatccactgtaattctgccacactgaacattacattatgtccagctacagcaaaccatcttttgaccacatgcctttgctcatgctgttctctgaatagagcctccctcagagcctgttaaactcatccttcaaaactcaattcctaagggccggcgtggtagctc

SEQ ID NO: 331333 - DNA, 412 bp, Homo sapiens
tctcttggtatcacaatgtaacacaacaacaatctggcccacacacacacaacacacacacacagaagcagccacattttttcccgatatatgggctatttcagagtaacagtgaggacagacgccagaaggcgttttattctgccacagttcagaataaaatggtctctggttcactacagtctcttttctacatcttaggcaaataaagactttttttcacagaaagaaaggcaccaatgctgctgtactccagttaactactgatgctgtattttcatcacctgagactggaccaagagttgcatctcaaatgacagagtccccacaatcaaatctctttatccaactctcaaattgagttttgctttgcaattgttgacctatttaattgctttttctcttcctcaag

SEQ ID NO: 331334 - DNA, 3358 bp, Homo sapiens
tggctttgcgcatgcccagagagagtggcgcgagcctgcgttttccggccagaggacatgatgcagggggaggcacaccctagtgcttcccttattgacagaaccatcaagatgagaaaagaaacagaggctaggaaagtggtcttagcctggggactcctaaatgtatctatggctggaatgatatatactgaaatgactggaaaattgattagttcatactacaatgtgacatactggcccctctggtatattgagcttgcccttgcatctctcttcagccttaatgccttatttgatttttggagatatttcaaatatactgtggcaccaacaagtctggttgttagtcctggacagcaaacacttttagggttgaaaacagctgttgtacagactacgcctccacatgatctggcagcaacccaaatccctcccgctccaccttccccttcaattcagggtcagagtgtgttgagttatagcccttctcgttcgcccagtaccagtcccaagttcaccaccagctgtatgactggttacagccctcagctgcaaggtctgtcctcaggtggcagtggttcttatagccctggagtgacctactcgcccgtcagtggttataataagttggcgagctttagcccctctcctccttctccgtaccctaccactgttggaccagtggagagcagtggattgagatctcgctaccgttcttcacctaccgtctacaactcacctactgacaaagaagactacatgaccgacctacgaactttggatacttttctcagaagtgaagaggagaaacagcatagggttaagctggggagcccagattctacctctccttccagcagtcctactttctggaactatagtcgttctatgggggattatgcacaaactttaaagaagtttcagtatcagcttgcctgtaggtctcaggccccatgtgctaacaaagatgaagccgatctcagctctaaacaagccgcagaagaggtctgggcaagagtggctatgaatagacaacttcttgatcatatggattcatggacagctaaatttagaaattggatcaatgagacaatattagtgccacttgttcaagagattgagtctgtcagcacacagatgagacgaatgggttgtccagagctacagataggagaggctagtattactagcttgaaacaagctgccctggttaaagcgcctctcattccgactttgaacacaatcgttcagtatctagaccttactccaaatcaggaatacttgtttgaaaggatcaaagaactatctcagggaggttgtatgagctcatttcgatggaacagaggtggcgacttcaaaggacgaaagtgggatacagacctgcccaccgattctgctatcatcatgcatgtattttgcacctaccttgattccagattacctccacatccgaagtatcccgacggaaaaacttttacttctcagcactttgttcagacaccaaataaaccagatgttacaaatgagaatgttttttgcatttatcagagtgctatcaaccctccccattatgagctcatctaccagcgtcatgtatacaacctgccaaagggcagaaataatatgtttcatacattgttgatgtttctctacatcataaagaccaaagagtcaggaatgcttgggagagttaatcttggtctatctggtgtgaatatattgtggatctttggcgagtagcaagtcatatatttaattctgacatttagactatttcactgaaccagaagtcgaaactaaacatctctgagccactgactcttctgaaataaaatacacatgggtgtatgttacagactctttagatttaacagaaaatgtagctgttatgaaatgtaattgtaaaaatatgtcccgtatcttctatatcgagacattgcctttaattttatatcgcttttcagaaatttcagttgactacaaaactgcaacccttcggatttttattgactcaaaatagtgccattccccttaatgaaatagattttgagtctttttttcattgtaacccccaaatgagaatcatctacctgattcttgtaccaaaaaaaaatttttttcagtcttttttttttttagagagggtctctgtcaacgcagactggagtgcagtggcacgatcttagctcactacaacttctgcctcccaggctcaagcaattctcctgcctcagcctcctgagtagctgggattataggtgcgagccactgcgcccagcctcagttattttatttaacagtgtaagtacttagaaagtaagaaaattgctgatttagttttttttttttttttttttttaatgtttccccagcattctgcaagttaggccaaagcccacattcaaagaaatgagattaactcttaagtaatgtattaagtttatgtatattttaaaatattattaaaggaggtttgaaagtattgacatttaaaaagtcaacacttagattaaatttagctggtagttttaatttgggttttagttaagagtgtgaggacatcaggaaaactgtttactactttggttttagcagctcagttttactattccataatgtgttatttttaaagttctctttttaagatcacagtgatatcctatcttcaaattttttaaatatgttcaaaatatctggagggtgagaagttaccaagtttgtatgttttgtttgactcaccatctttattttctgtatatgtagtagctggcaattgcatatattttcttgattaacatattagagactgcttccatcatcttatgtaaacctggaaacagctgaaactagtcttttctgaagaaccgtgtatcagtgttagatgtgcatcccgttttgtcattccctcagactttgaatacagtcattactctctggaagagaaatgtaagtatattttttgttatctgcagtatggtttaacatgtattaataatacacatatgcagactcactaaagtatccccagtaattagtaaattccaaatttaagtcagtacagttctgtatttgtaaattctgtctttcaaaaagttgttcgtgtttttaaaagttgatgtccaaaggaaaggagcttcttttaagtacttttggtgtatgttgaatatttatttgctatgatattctagaagaaaatatcaaacatgttaaatataagaacatgttaaaatttaaatttgctatttcaaaagttactgaagatgtcttggaataacaattgtcatgctgttaaactagttgcatatacttcattaaaagcaccatggagaaacattttaacaatgataagatgaaa

SEQ ID NO: 331335 - DNA, 1018 bp, Homo sapiens
  misc_feature (491)..(491): n is a, c, g, or t
agctgggactacaggtgcccgccaccacacccagctaatttttttgtacttttagtagagacggggtttcaccatgttagccaggatggtctcgatctcctgaccccgtgattcgcccacctagacctcccaaagtgctgggactacaagcttggcgagctttagcccctctcctccttctccgtaccctaccactgttggaccagtggagagcagtggattgagatctcgctaccgttcttcacctaccgtctacaactcacctactgacaaagaagactacatgaccgacctacgaactttggatacttttctcagaagtgaagaggagaaacagcatagggttaagctggggagcccagattctaactataattaagaagatacatattaaatggaaatatagtcgttctatgggggattatgcaaaaataaaaagaagataaagaaatacaaatagaaatgaaaagataaaaaaaaaaagataaaanaaaaagaatgaaagaaagaatatcaagaattataaaaaaaagaagaagaaaaagagaatcaggagaaaagatgtaggaataacaaataagaagaagataaattagaaaatatcagagatttaattagcgaaagatccatcttaagaaaatccggatcaaatagaaaaaaatatcaagtgaaaaaaatagctataaaaggaaacaattgcagaatatgctcacgactaacaagcaatgaagaaagcaaatgaggaatagataagagaaaaaaaacaaaatatgcagaggcataaatcttcaattcacatgaaacaccacacagagacaaccagggactaaaacaaagcaaaaaacaaacaacagaaatccaggaaacacaaaccagcagccagcccaaccacacaacaaaccaacgccccacacccccacctccaacgcccccgccaacccgcacaaacacacacctcaaagcacacgacgcaacacacaaaaaaaaagacacacaacaaaatcagaaaaaacaaaaa

SEQ ID NO: 331336 - DNA, 3495 bp, Homo sapiens
tggctttgcgcatgcccagagagagtggcgcgagcctgcgttttccggccagaggacatgatgcagggggaggcacaccctagtgcttcccttattgacagaaccatcaagatgagaaaagaaacagaggctaggaaagtggtcttagcctggggactcctaaatgtatctatggctggaatgatatatactgaaatgactggaaaattgattagttcatactacaatgtgacatactggcccctctggtatattgagcttgcccttgcatctctcttcagccttaatgccttatttgatttttggagatatttcaaatatactgtggcaccaacaagtctggttgttagtcctggacagcaaacacttttagggttgaaaacagctgttgtacagactacgcctccacatgatctggcagcaacccaaatccctcccgctccaccttccccttcaattcagggtcagagtgtgttgagttatagcccttctcgttcgcccagtaccagtcccaagttcaccaccagctgtatgactggttacagccctcagctgcaaggtctgtcctcaggtggcagtggttcttatagccctggagtgacctactcgcccgtcagtggttataataagttggcgagctttagcccctctcctccttctccgtaccctaccactgttggaccagtggagagcagtggattgagatctcgctaccgttcttcacctaccgtctacaactcacctactgacaaagaagactacatgaccgacctacgaactttggatacttttctcagaagtgaagaggagaaacagcatagggttaagctggggagcccagattctacctctccttccagcagtcctactttctggaactatagtcgttctatgggggattatgcacaaactttaaagaagtttcagtatcagcttgcctgtaggtctcaggccccatgtgctaacaaagatgaagccgatctcagctctaaacaagccgcagaagaggtctgggcaagagtggctatgaatagacaacttcttgatcatatggattcatggacagctaaatttagaaattggatcaatgagacaatattagtgccacttgttcaagagattgagtctgtcagcacacagatgagacgaatgggttgtccagagctacagataggagaggctagtattactagcttgaaacaagctgccctggttaaagcgcctctcattccgactttgaacacaatcgttcagtatctagaccttactccaaatcaggaatacttgtttgaaaggatcaaagaactatctcagggaggttgtatgagctcatttcgatggaacagaggtggcgacttcaaaggacgaaagtgggatacagacctgcccaccgattctgctatcatcatgcatgtattttgcacctaccttgattccagattacctccacatccgaagtatcccgacggaaaaacttttacttctcagcactttgttcagacaccaaataaaccagatgttacaaatgagaatgttttttgcatttatcagagtgctatcaaccctccccattatgagctcatctaccagcgtcatgtatacaacctgccaaagggcagaaataatatgtttcatacattgttgatgtttctctacatcataaagaccaaagagtcaggaatgcttgggagagttaatcttggtctatctggtgtgaatatattgtggatctttggcgagtagcaagtcatatatttaattctgacatttagactatttcactgaaccagaagtcgaaactaaacatctctgagccactgactcttctgaaataaaatacacatgggtgtatgttacagactctttagatttaacagaaaatgtagctgttatgaaatgtaattgtaaaaatatgtcccgtatcttctatatcgagacattgcctttaattttatatcgcttttcagaaatttcagttgactacaaaactgcaacccttcggatttttattgactcaaaatagtgccattccccttaatgaaatagattttgagtctttttttcattgtaacccccaaatgagaatcatctacctgattcttgtaccaaaaaaaaatttttttcagtcttttttttttttagagagggtctctgtcaacgcagactggagtgcagtggcacgatcttagctcactacaacttctgcctcccaggctcaagcaattctcctgcctcagcctcctgagtagctggggattacaggcatgcaccaccacgcccagctaatttttgtatttttagtagagacagggtttcaccatgttggccaggctggtcccgaactcctgacctcaggtgatccacccacctcggcctcccaaagtgcctgggattataggtgcgagccactgcgcccagcctcagttattttatttaacagtgtaagtacttagaaagtaagaaaattgctgatttagttttttttttttttttttttttaatgtttccccagcattctgcaagttaggccaaagcccacattcaaagaaatgagattaactcttaagtaatgtattaagtttatgtatattttaaaatattattaaaggaggtttgaaagtattgacatttaaaaagtcaacacttagattaaatttagctggtagttttaatttgggttttagttaagagtgtgaggacatcaggaaaactgtttactactttggttttagcagctcagttttactattccataatgtgttatttttaaagttctctttttaagatcacagtgatatcctatcttcaaattttttaaatatgttcaaaatatctggagggtgagaagttaccaagtttgtatgttttgtttgactcaccatctttattttctgtatatgtagtagctggcaattgcatatattttcttgattaacatattagagactgcttccatcatcttatgtaaacctggaaacagctgaaactagtcttttctgaagaaccgtgtatcagtgttagatgtgcatcccgttttgtcattccctcagactttgaatacagtcattactctctggaagagaaatgtaagtatattttttgttatctgcagtatggtttaacatgtattaataatacacatatgcagactcactaaagtatccccagtaattagtaaattccaaatttaagtcagtacagttctgtatttgtaaattctgtctttcaaaaagttgttcgtgtttttaaaagttgatgtccaaaggaaaggagcttcttttaagtacttttggtgtatgttgaatatttatttgctatgatattctagaagaaaatatcaaacatgttaaatataagaacatgttaaaatttaaatttgctatttcaaaagttactgaagatgtcttggaataacaattgtcatgctgttaaactagttgcatatacttcattaaaagcaccatggagaaacattttaacaatgataagatgaaa

SEQ ID NO: 331337 - DNA, 3441 bp, Homo sapiens
tggctttgcgcatgcccagagagagtggcgcgagcctgcgttttccggccagaggacatgatgcagggggaggcacaccctagtgcttcccttattgacagaaccatcaagatgagaaaagaaacagaggctaggaaagtggtcttagcctggggactcctaaatgtatctatggctggaatgatatatactgaaatgactggaaaattgattagttcatactacaatgtgacatactggcccctctggtatattgagcttgcccttgcatctctcttcagccttaatgccttatttgatttttggagatatttcaaatatactgtggcaccaacaagtctggttgttagtcctggacagcaaacacttttagggttgaaaacagctgttgtacagactacgcctccacatgatctggcagcaacccaaatccctcccgctccaccttccccttcaattcagggtcagagtgtgttgagttatagcccttctcgttcgcccagtaccagtcccaagttcaccaccagctgtatgactggttacagccctcagctgcaaggtctgtcctcaggtggcagtggttcttatagccctggagtgacctactcgcccgtcagtggttataataagttggcgagctttagcccctctcctccttctccgtaccctaccactgttggaccagtggagagcagtggattgagatctcgctaccgttcttcacctaccgtctacaactcacctactgacaaagaagactacatgaccgacctacgaactttggatacttttctcagaagtgaagaggagaaacagcatagggttaagctggggagcccagattctacctctccttccagcagtcctactttctggaactatagtcgttctatgggggattatgcacaaactttaaagaagtttcagtatcagcttgcctgtaggtctcaggccccatgtgctaacaaagatgaagccgatctcagctctaaacaagccgcagaagaggtctgggcaagagtggctatgaatagacaacttcttgatcatatggattcatggacagctaaatttagaaattggatcaatgagacaatattagtgccacttgttcaagagattgagtctgtcagcacacagatgagacgaatgggttgtccagagctacagataggagaggctagtattactagcttgaaacaagctgccctggttaaagcgcctctcattccgactttgaacacaatcgttcagtatctagaccttactccaaatcaggaatacttgtttgaaaggatcaaagaactatctcagggaggttgtatgagctcatttcgatggaacagaggtggcgacttcaaaggacgaaagtgggatacagacctgcccaccgattctgctatcatcatgcatgtattttgcacctaccttgattccagattacctccacatccgaagtatcccgacggaaaaacttttacttctcagcactttgttcagacaccaaataaaccagatgttacaaatgagaatgttttttgcatttatcagagtgctatcaaccctccccattatgagctcatctaccagcgtcatgtatacaacctgccaaagggcagaaataatatgtttcatacattgttgatgtttctctacatcataaagaccaaagagtcaggaatgcttgggagagttaatcttggtctatctggtgtgaatatattgtggatctttggcgagtagcaagtcatatatttaattctgacatttagactatttcactgaaccagaagtcgaaactaaacatctctgagccactgactcttctgaaataaaatacacatgggtgtatgttacagactctttagatttaacagaaaatgtagctgttatgaaatgtaattgtaaaaatatgtcccgtatcttctatatcgagacattgcctttaattttatatcgcttttcagaaatttcagttgactacaaaactgcaacccttcggatttttattgactcaaaatagtgccattccccttaatgaaatagattttgagtctttttttcattgtaacccccaaatgagaatcatctacctgattcttgtaccaaaaaaaaatttttttcagtcttttttttttttagagagggtctctgtcaacgcagactggagtgcagtggcacgatcttagctcactacaacttctgcctcccaggctcaagcaattctcctgcctcagcctcctgagtagctggggattacaggcatgcaccaccacgcccagctaatttttgtatttttagtagagacagggtttcaccatgttggccaggctggtcccgaactcctgacctcaggtgatccacccacctcggcctcccaaagtgcctgggattataggtgcgagccactgcgcccagcctcagttattttatttaacagtgtaagtacttagaaagtaagaaaattgctgatttagttttttttttttttttttttttaatgtttccccagcattctgcaagttaggccaaagcccacattcaaagaaatgagattaactcttaagtaatgtattaagtttatgtatattttaaaatattattaaaggaggtttgaaagtattgacatttaaaaagtcaacacttagattaaatttagctggtagttttaatttgggttttagttaagagtgtgaggacatcaggaaaactgtttactactttggttttagcagctcagttttactattccataatgtgttatttttaaagttctctttttaagatcacagtgatatcctatcttcaaattttttaaatatgttcatctttattttctgtatatgtagtagctggcaattgcatatattttcttgattaacatattagagactgcttccatcatcttatgtaaacctggaaacagctgaaactagtcttttctgaagaaccgtgtatcagtgttagatgtgcatcccgttttgtcattccctcagactttgaatacagtcattactctctggaagagaaatgtaagtatattttttgttatctgcagtatggtttaacatgtattaataatacacatatgcagactcactaaagtatccccagtaattagtaaattccaaatttaagtcagtacagttctgtatttgtaaattctgtctttcaaaaagttgttcgtgtttttaaaagttgatgtccaaaggaaaggagcttcttttaagtacttttggtgtatgttgaatatttatttgctatgatattctagaagaaaatatcaaacatgttaaatataagaacatgttaaaatttaaatttgctatttcaaaagttactgaagatgtcttggaataacaattgtcatgctgttaaactagttgcatatacttcattaaaagcaccatggagaaacattttaacaatgataagatgaaa

SEQ ID NO: 331338 - DNA, 3354 bp, Homo sapiens
gcatctcgaggatctccctggatctagcctggctgccaagtgatatatactgaaatgactggaaaattgattagttcatactacaatgtgacatactggcccctctggtatattgagcttgcccttgcatctctcttcagccttaatgccttatttgatttttggagatatttcaaatatactgtggcaccaacaagtctggttgttagtcctggacagcaaacacttttagggttgaaaacagctgttgtacagactacgcctccacatgatctggcagcaacccaaatccctcccgctccaccttccccttcaattcagggtcagagtgtgttgagttatagcccttctcgttcgcccagtaccagtcccaagttcaccaccagctgtatgactggttacagccctcagctgcaaggtctgtcctcaggtggcagtggttcttatagccctggagtgacctactcgcccgtcagtggttataataagttggcgagctttagcccctctcctccttctccgtaccctaccactgttggaccagtggagagcagtggattgagatctcgctaccgttcttcacctaccgtctacaactcacctactgacaaagaagactacatgaccgacctacgaactttggatacttttctcagaagtgaagaggagaaacagcatagggttaagctggggagcccagattctacctctccttccagcagtcctactttctggaactatagtcgttctatgggggattatgcacaaactttaaagaagtttcagtatcagcttgcctgtaggtctcaggccccatgtgctaacaaagatgaagccgatctcagctctaaacaagccgcagaagaggtctgggcaagagtggctatgaatagacaacttcttgatcatatggattcatggacagctaaatttagaaattggatcaatgagacaatattagtgccacttgttcaagagattgagtctgtcagcacacagatgagacgaatgggttgtccagagctacagataggagaggctagtattactagcttgaaacaagctgccctggttaaagcgcctctcattccgactttgaacacaatcgttcagtatctagaccttactccaaatcaggaatacttgtttgaaaggatcaaagaactatctcagggaggttgtatgagctcatttcgatggaacagaggtggcgacttcaaaggacgaaagtgggatacagacctgcccaccgattctgctatcatcatgcatgtattttgcacctaccttgattccagattacctccacatccgaagtatcccgacggaaaaacttttacttctcagcactttgttcagacaccaaataaaccagatgttacaaatgagaatgttttttgcatttatcagagtgctatcaaccctccccattatgagctcatctaccagcgtcatgtatacaacctgccaaagggcagaaataatatgtttcatacattgttgatgtttctctacatcataaagaccaaagagtcaggaatgcttgggagagttaatcttggtctatctggtgtgaatatattgtggatctttggcgagtagcaagtcatatatttaattctgacatttagactatttcactgaaccagaagtcgaaactaaacatctctgagccactgactcttctgaaataaaatacacatgggtgtatgttacagactctttagatttaacagaaaatgtagctgttatgaaatgtaattgtaaaaatatgtcccgtatcttctatatcgagacattgcctttaattttatatcgcttttcagaaatttcagttgactacaaaactgcaacccttcggatttttattgactcaaaatagtgccattccccttaatgaaatagattttgagtctttttttcattgtaacccccaaatgagaatcatctacctgattcttgtaccaaaaaaaaatttttttcagtcttttttttttttagagagggtctctgtcaacgcagactggagtgcagtggcacgatcttagctcactacaacttctgcctcccaggctcaagcaattctcctgcctcagcctcctgagtagctggggattacaggcatgcaccaccacgcccagctaatttttgtatttttagtagagacagggtttcaccatgttggccaggctggtcccgaactcctgacctcaggtgatccacccacctcggcctcccaaagtgcctgggattataggtgcgagccactgcgcccagcctcagttattttatttaacagtgtaagtacttagaaagtaagaaaattgctgatttagttttttttttttttttttttttaatgtttccccagcattctgcaagttaggccaaagcccacattcaaagaaatgagattaactcttaagtaatgtattaagtttatgtatattttaaaatattattaaaggaggtttgaaagtattgacatttaaaaagtcaacacttagattaaatttagctggtagttttaatttgggttttagttaagagtgtgaggacatcaggaaaactgtttactactttggttttagcagctcagttttactattccataatgtgttatttttaaagttctctttttaagatcacagtgatatcctatcttcaaattttttaaatatgttcaaaatatctggagggtgagaagttaccaagtttgtatgttttgtttgactcaccatctttattttctgtatatgtagtagctggcaattgcatatattttcttgattaacatattagagactgcttccatcatcttatgtaaacctggaaacagctgaaactagtcttttctgaagaaccgtgtatcagtgttagatgtgcatcccgttttgtcattccctcagactttgaatacagtcattactctctggaagagaaatgtaagtatattttttgttatctgcagtatggtttaacatgtattaataatacacatatgcagactcactaaagtatccccagtaattagtaaattccaaatttaagtcagtacagttctgtatttgtaaattctgtctttcaaaaagttgttcgtgtttttaaaagttgatgtccaaaggaaaggagcttcttttaagtacttttggtgtatgttgaatatttatttgctatgatattctagaagaaaatatcaaacatgttaaatataagaacatgttaaaatttaaatttgctatttcaaaagttactgaagatgtcttggaataacaattgtcatgctgttaaactagttgcatatacttcattaaaagcaccatggagaaacattttaacaatgataagatgaaa

SEQ ID NO: 331339 - DNA, 2638 bp, Homo sapiens
ttgataaaaattacctgtttcgaaaggcatttttggcagctttttatcaaagttaatacattcttataattttaaaagtcatagagggctaaaagttcatgacagaaatgagcaattccctgtattccccaagtctgcttctcgaagtggactgtattccccaagtggctttttcttcagttattactctcatagttccaaataatagaggtatacagctctcttgattcttcagtttcagatattatctgttgatttttttattttgttaggtgagtaatttctttctcttatagccctcttattccctcagactttgaatacagtcatactactctctggaagagaagtatatgtattttgttgttgttgttatatgtagtaggatttaatgtattactaatacacatatgaaaactcactaaagtatccccagtagttagtaaattcctaattcaaatcaagtaatacagttctctgagaggctagcatctccatatcttccatcttttaaatacaattgatacttttactttaatcttgcttgttaaaattattctgttagctattacctggtgtaatagttcttgtttactgaaaaactgtcaacactccataaatctatttattctaaatttgggttttaggcatagttaagaaagtaattactgttactggaattcacctgataaaccatgtataacataattcattgcagaatcacattaaatatcaattaaacatgtattattcataaagttttttgttattagaaaaagaccttaaatgcttggcaaccaattctaataaaaattttttttctctttataggagagttaatcttggtctatctggtgtgaatatattgtggatctttggcgagtagcaagtcatatatttaattctgacatttagactatttcactgaaccagaagtcgaaactaaacatctctgagccactgactcttctgaaataaaatacacatgggtgtatgttacagactctttagatttaacagaaaatgtagctgttatgaaatgtaattgtaaaaatatgtcccgtatcttctatatcgagacattgcctttaattttatatcgcttttcagaaatttcagttgactacaaaactgcaacccttcggatttttattgactcaaaatagtgccattccccttaatgaaatagattttgagtctttttttcattgtaacccccaaatgagaatcatctacctgattcttgtaccaaaaaaaaatttttttcagtcttttttttttttagagagggtctctgtcaacgcagactggagtgcagtggcacgatcttagctcactacaacttctgcctcccaggctcaagcaattctcctgcctcagcctcctgagtagctggggattacaggcatgcaccaccacgcccagctaatttttgtatttttagtagagacagggtttcaccatgttggccaggctggtcccgaactcctgacctcaggtgatccacccacctcggcctcccaaagtgcctgggattataggtgcgagccactgcgcccagcctcagttattttatttaacagtgtaagtacttagaaagtaagaaaattgctgatttagttttttttttttttttttttttaatgtttccccagcattctgcaagttaggccaaagcccacattcaaagaaatgagattaactcttaagtaatgtattaagtttatgtatattttaaaatattattaaaggaggtttgaaagtattgacatttaaaaagtcaacacttagattaaatttagctggtagttttaatttgggttttagttaagagtgtgaggacatcaggaaaactgtttactactttggttttagcagctcagttttactattccataatgtgttatttttaaagttctctttttaagatcacagtgatatcctatcttcaaattttttaaatatgttcaaaatatctggagggtgagaagttaccaagtttgtatgttttgtttgactcaccatctttattttctgtatatgtagtagctggcaattgcatatattttcttgattaacatattagagactgcttccatcatcttatgtaaacctggaaacagctgaaactagtcttttctgaagaaccgtgtatcagtgttagatgtgcatcccgttttgtcattccctcagactttgaatacagtcattactctctggaagagaaatgtaagtatattttttgttatctgcagtatggtttaacatgtattaataatacacatatgcagactcactaaagtatccccagtaattagtaaattccaaatttaagtcagtacagttctgtatttgtaaattctgtctttcaaaaagttgttcgtgtttttaaaagttgatgtccaaaggaaaggagcttcttttaagtacttttggtgtatgttgaatatttatttgctatgatattctagaagaaaatatcaaacatgttaaatataagaacatgttaaaatttaaatttgctatttcaaaagttactgaagatgtcttggaataacaattgtcatgctgttaaactagttgcatatacttcattaaaagcaccatggagaaacattttaacaatgataagatgaaa

SEQ ID NO: 331340 - DNA, 406 bp, Homo sapiens
caagacactgtctcaaaaaacaaaaagagaagaagaaaaaaagtacattggacagtggttagtgctaaggaggaaaaaagcacaggagggtaatgttattaatgtttagagaggaggggtgaaatttgaggtagggtcgtcaggggagacgtcattgacttgtatgaagacctgaaggtagtgaggaaccagctgtatgaacacatgagaagagcattttaagttcttttggaaactcacttttagaataatcagtgttctctgtgttttatgttaacagaggctagtattactagcttgaaacaagctgccctggttaaagcgcctctcattccgactttgaacacaatcgttcagtatctagaccttactccaaatcaggaatacttgtttgaaaggatcaaag

SEQ ID NO: 331341 - DNA, 2283 bp, Homo sapiens
  misc_feature (1194)..(1194): n is a, c, g, or t
tggctttgcgcatgcccagagagagtggcgcgagcctgcgttttccggccagaggacatgatgcagggggaggcacaccctagtgcttcccttattgacagaaccatcaagatgagaaaagaaacagaggctaggaaagtggtcttagcctggggactcctaaatgtatctatggctggaatgatatatactgaaatgactggaaaattgattagttcatactacaatgtgacatactggcccctctggtatattgagcttgcccttgcatctctcttcagccttaatgccttatttgatttttggagatatttcaaatatactgtggcaccaacaagtctggttgttagtcctggacagcaaacacttttagggttgaaaacagctgttgtacagactacgcctccacatgatctggcagcaacccaaatccctcccgctccaccttccccttcaattcagggtcagagtgtgttgagttatagcccttctcgttcgcccagtaccagtcccaagttcaccaccagctgtatgactggttacagccctcagctgcaaggtctgtcctcaggtggcagtggttcttatagccctggagtgacctactcgcccgtcagtggttataataaggtaatgactctcttctcttgtctagtcacattattttagaattgagaggtatactaaaaatcatctaatgagtcaaaacttatcagtgagcaaactgagagttgatttgcccagaacacccatttaaaaaccgagaatagaacataatatcttaaacacaacatcttaaaatgaaagagaaaaaattagcatttacagagataacaaacttagtgcaccatctacgatctttcagctgtctttaaaacaagttgaaacaaggataattttttactttagttgcttttactcctgttttccctcttgctttccttcttcatgtgaggcctttgtatacctttttagagttttagtgtggtttatcatgttggagtgtcttctaagctaaaagctgagattgtcacatagtttctttttttttccaatgagtacaaatgattcttgaatatggacgctttccatggaatagtaggaaccttcatttccactcccacagtaatgtgaaattttgttctaatttttaggattaatagaaacaggattgacaaattgaaattttgactncttcttgaagcataaaactatttttttttttttttttttttttttttgagacagagtctcgctctgttgcctagactggagtgcagtggcgtgatctcagctcactgcaaactccgcctcccgggctcatgccattctcctgcctcagcctcccgagtagctgggactacaggcgtccaccaccgtgcccggctaattttttgtactttcagtagagacggggtttcgccatgttagccaggatggtctcgatctcctgaccttgcgatctgccctcctcgacctcccaaacatttacacatttctttgtaatgaaattccatactactggttatccaatattaaaattaattttggcaggtaatagaattttgaaaattttgtacaagttaaatttttatgagaaagtatatatgtagtgaaaattaataactcataggtaaatgtgacttttaaaaataatttttcacaagatgatactatatgatccttatagaaaattggaaaagtaaaacagaaggaaaattattatagtcctgccacacaaaaataatctgtttaatggctatttaatactcatctaatggatataccataatttactcttgaatgtttaagtcattttcatttataaaaaaactttttaatgtatactaaatagccctgtacataaaattattgataaatttgggatgggagtgtcgatccaaaagaattgtaccaatttacattgtcacagaaatgtagaagagtgtttgttttaccacactgttgaccatcaagttaattttttaaaaaaataaatctctgctaataagaaacatgacaatagtctatcgtaacttttaacatacatttatttcaaagccgcatagctaaatcaggaagttctcgtgctttactcgcttgtcttttgggtctgtatcctctgattttttttcttgggttgctgtttaattatagagtttaatatatatatatatagagagagagaaactttaaatgtttaatagtcctatctgtttatctccttgtggtttgctctgtttttaaatttagaaattttcttactttcagaattgattcccc

SEQ ID NO: 331342 - DNA, 3524 bp, Homo sapiens
tggctttgcgcatgcccagagagagtggcgcgagcctgcgttttccggccagaggacatgatgcagggggaggcacaccctagtgcttcccttattgacagaaccatcaagatgagaaaagaaacagaggctaggaaagtggtcttagcctggggactcctaaatgtatctatggctggaatgatatatactgaaatgactggaaaattgattagttcatactacaatgtgacatactggcccctctggtatattgagcttgcccttgcatctctcttcagccttaatgccttatttgatttttggagatatttcaaatatactgtggcaccaacaagtctggttgttagtcctggacagcaaacacttttagggttgaaaacagctgttgtacagactacgcctccacatgatctggcagcaacccaaatccctcccgctccaccttccccttcaattcagggtcagagtgtgttgagttatagcccttctcgttcgcccagtaccagtcccaagttcaccaccagctgtatgactggttacagccctcagctgcaaggtctgtcctcaggtggcagtggttcttatagccctggagtgacctactcgcccgtcagtggttataataagttggcgagctttagcccctctcctccttctccgtaccctaccactgttggaccagtggagagcagtggattgagatctcgctaccgttcttcacctaccgtctacaactcacctactgacaaagaagactacatgaccgacctacgaactttggatacttttctcagaagtgaagaggagaaacagcatagggttaagctggggagcccagattctacctctccttccagcagtcctactttctggaactatagtcgttctatgggggattatgcacaaactttaaagaagtttcagtatcagcttgcctgtaggtctcaggccccatgtgctaacaaagatgaagccgatctcagctctaaacaagccgcagaagaggtctgggcaagagtggctatgaatagacaacttcttgatcatatggattcatggacagctaaatttagaaattggatcaatgagacaatattagtgccacttgttcaagagattgagtctgtcagcacacagatgagacgaatgggttgtccagagctacagataggagaggctagtattactagcttgaaacaagctgccctggttaaagcgcctctcattccgactttgaacacaatcgttcagtatctagaccttactccaaatcaggaatacttgtttgaaaggatcaaagcttttaaaaatttcaccttgttgccacagaactatctcagggaggttgtatgagctcatttcgatggaacagaggtggcgacttcaaaggacgaaagtgggatacagacctgcccaccgattctgctatcatcatgcatgtattttgcacctaccttgattccagattacctccacatccgaagtatcccgacggaaaaacttttacttctcagcactttgttcagacaccaaataaaccagatgttacaaatgagaatgttttttgcatttatcagagtgctatcaaccctccccattatgagctcatctaccagcgtcatgtatacaacctgccaaagggcagaaataatatgtttcatacattgttgatgtttctctacatcataaagaccaaagagtcaggaatgcttgggagagttaatcttggtctatctggtgtgaatatattgtggatctttggcgagtagcaagtcatatatttaattctgacatttagactatttcactgaaccagaagtcgaaactaaacatctctgagccactgactcttctgaaataaaatacacatgggtgtatgttacagactctttagatttaacagaaaatgtagctgttatgaaatgtaattgtaaaaatatgtcccgtatcttctatatcgagacattgcctttaattttatatcgcttttcagaaatttcagttgactacaaaactgcaacccttcggatttttattgactcaaaatagtgccattccccttaatgaaatagattttgagtctttttttcattgtaacccccaaatgagaatcatctacctgattcttgtaccaaaaaaaaatttttttcagtcttttttttttttagagagggtctctgtcaacgcagactggagtgcagtggcacgatcttagctcactacaacttctgcctcccaggctcaagcaattctcctgcctcagcctcctgagtagctggggattacaggcatgcaccaccacgcccagctaatttttgtatttttagtagagacagggtttcaccatgttggccaggctggtcccgaactcctgacctcaggtgatccacccacctcggcctcccaaagtgcctgggattataggtgcgagccactgcgcccagcctcagttattttatttaacagtgtaagtacttagaaagtaagaaaattgctgatttagttttttttttttttttttttttaatgtttccccagcattctgcaagttaggccaaagcccacattcaaagaaatgagattaactcttaagtaatgtattaagtttatgtatattttaaaatattattaaaggaggtttgaaagtattgacatttaaaaagtcaacacttagattaaatttagctggtagttttaatttgggttttagttaagagtgtgaggacatcaggaaaactgtttactactttggttttagcagctcagttttactattccataatgtgttatttttaaagttctctttttaagatcacagtgatatcctatcttcaaattttttaaatatgttcaaaatatctggagggtgagaagttaccaagtttgtatgttttgtttgactcaccatctttattttctgtatatgtagtagctggcaattgcatatattttcttgattaacatattagagactgcttccatcatcttatgtaaacctggaaacagctgaaactagtcttttctgaagaaccgtgtatcagtgttagatgtgcatcccgttttgtcattccctcagactttgaatacagtcattactctctggaagagaaatgtaagtatattttttgttatctgcagtatggtttaacatgtattaataatacacatatgcagactcactaaagtatccccagtaattagtaaattccaaatttaagtcagtacagttctgtatttgtaaattctgtctttcaaaaagttgttcgtgtttttaaaagttgatgtccaaaggaaaggagcttcttttaagtacttttggtgtatgttgaatatttatttgctatgatattctagaagaaaatatcaaacatgttaaatataagaacatgttaaaatttaaatttgctatttcaaaagttactgaagatgtcttggaataacaattgtcatgctgttaaactagttgcatatacttcattaaaagcaccatggagaaacattttaacaatgataagatgaaa

SEQ ID NO: 331343 - DNA, 1739 bp, Homo sapiens
tggctttgcgcatgcccagagagagtggcgcgagcctgcgttttccggccagaggacatgatgcagggggaggcacaccctagtgcttcccttattgacagaaccatcaagatgagaaaagaaacagaggctaggaaagtggtcttagcctggggactcctaaatgtatctatggctggaatgatatatactgaaatgactggaaaattgattagttcatactacaatgtgacatactggcccctctggtatattgagcttgcccttgcatctctcttcagccttaatgccttatttgatttttggagatatttcaaatatactgtggcaccaacaagtctggttgttagtcctggacagcaaacacttttagggttgaaaacagctgttgtacagactacgcctccacatgatctggcagcaacccaaatccctcccgctccaccttccccttcaattcagggtcagagtgtgttgagttatagcccttctcgttcgcccagtaccagtcccaagttcaccaccagctgtatgactggttacagccctcagctgcaaggtctgtcctcaggtggcagtggttcttatagccctggagtgacctactcgcccgtcagtggttataataagttggcgagctttagcccctctcctccttctccgtaccctaccactgttggaccagtggagagcagtggattgagatctcgctaccgttcttcacctaccgtctacaactcacctactgacaaagaagactacatgaccgacctacgaactttggatacttttctcagaagtgaagaggagaaacagcatagggttaagctggggagcccagattctacctctccttccagcagtcctactttctggaactatagtcgttctatgggggattatgcacaaactttaaagaagtttcagtatcagcttgcctgtaggtctcaggccccatgtgctaacaaagatgaagccgatctcagctctaaacaagccgcagaagaggtctgggcaagagtggctatgaatagacaacttcttgatcatatggattcatggacagctaaatttagaaattggatcaatgagacaatattagtgccacttgttcaagagattgagtctgtcagcacacagatgagacgaatgggttgtccagagctacagataggagaggctagtattactagcttgaaacaagctgccctggttaaagcgcctctcattccgactttgaacacaatcgttcagtatctagaccttactccaaatcaggaatacttgtttgaaaggatcaaagaactatctcagggaggttgtatgagctcatttcgatggaacagaggtggcgacttcaaaggacgaaagtgggatacagacctgcccaccgattctgctgtaagcccctagattctttcattcatttatttatttactgttgattgactgacacagggtcttactctgtcacccaggctgtagtgcagtggcacagtcacgtctcactgcagctttgatctcccagggctcaagtgctcctcccagctcagcctcccaagtagctgggactaggcctgaaccaccacacccagctaatttttttaattttttgtagagatggggtctcacttttttgcccaggctggtcttgaagtcctgggttcaagtgatccccctgcctcagcttcccaaagtgctgggtttacagacacgagctactgtgcctgacccttaga

SEQ ID NO: 331344 - DNA, 648 bp, Homo sapiens
gtaaaatgtggataatacggccgggcgcggtggttcatgcctgtaatcccagcactttgggagaccgaggcgggtggattgcctgaggtcaggagttcgagaccagtctggccaacatggtgaaaccccgtctctactaaaaaatacaaaataaatttgccaggcatggtggcatgcgactgtaatcccagctactcaggaggctgaggcaggggaattgcttgaaccagggaggtggaggttgcagtgagctgagatcgcaccactgcactccagcctggatggcagagcgagactccgtctcaaaaatacataaataaataaaataaataaaataaaatggggagaataacagtatctacattttagagttattgtaaggattaggtaagttaatacatgtaaaagtgcttaggacaatgcctcgtaagcagaggcaataaatgctaatattaccatcatcggaggcatttaggcaggactcatgacaggatgacagtcacatttggtagacaccatcaaccaatgatctctaatttgcggcccccaagaagcaatggggttctgtgggctacatctggaatttgaaatgtctcatggaaatcatgttcttaccctggagaagggtggctgcttaggtgctactta

SEQ ID NO: 331345 - DNA, 211 bp, Homo sapiens
acaaccttttaatatttctgccatcagcacctattgtctggtgctgtgctagatgcccagaacgcaaaggcgagagaggcgtcccagtctgaaagtccaatgggcctagggctattggctgttgactgctctgctgatgacttcctctctctggtggagaagctcaaggagggtattgcaggcaagggagacggtgggagcagaggcttgg

SEQ ID NO: 331346 - DNA, 1361 bp, Homo sapiens
tctgtcatcgaggctggagtgcaatggtgcaatcttggctcactgcaacctccaccttccagactcaagtgattatcgtgcctcagccttctgagtagctgggatcacaggcgtgtgccaccattcccggctaatttttgtatttttagtagagacaggtttttgccacgttggccagtctggtctcaagctcctgacctcaagtgatccacatgccttggttgaccaaattgctgggattacaggcatgagccaatatgaccagctcaaacatcttctttttaaatgtcagaagcatgtatagtgattatttcttattttttcccccttgatccatctcaccagatgtttgttgattttataagaattttcaaactaccagcttctggctttgttgaacttggatttctgtttcactaattttctttctcctgtctttgtacttactttgttgctctttttctaagttttaaagatggatgccaatctcaggcttcttttcgtgtgtgtatgtgcgtatgtccataaattctcttctaattacagtgtaagccgcatcccacaagttttgatagtcacagaactgtatcgtcacactattttttaatttcagtaagttcttcactgatccctgtgtaatttagaaatgtttcataatttccctacattggaggggaagatagttttgtttttattattaatttctagctgtattgagctcttgtcagagaatatggtttattttagtcgtttgaaatttaagatctgcttaatggcaaaatgtatggtcagtttttgtaaatgttgccagtaagcttgcgaatcatatgtactctagttttgaaatccattgctcagtggatgttcattaggccaatttgtataatcatgttgtacaaatctattctattcttaactgttttttgttttaaaggtgtggggtcttactatgttgcccgggctggactcaaattcctcagcctcccaagtatctagaactacaggcacgtgcagcttggtttaaaaaaaaaaaaaaaaatcagtgagaagaggatttgttgatctccccgttaggattatgggtttgtctgttcctccttctcagcttatgctgtatatattttggggctgtgttattaggtgcatccaagtgtatagttgttatagttaccatgtgagctcaaccttggatctttacatagagattctctgtatttagtaatgttttgttcttaaaatctgcttccatctaacattaatataaatgtaccagctttattttatatgtatgtttcttggactttgtctttatgtattacaagaaattgtgataaagacctcatttaactggattgtgaaag

SEQ ID NO: 331347 - DNA, 213 bp, Homo sapiens
aaagtttgattcgtatggtaacatatgtgtttctaccagattgggaatttgttgagggcaggaactgtctattcatttatttcttcattcatgctatttgcaggcactaagctagggaccagggctctcactgtctggctgggagataaacaggtgaacttaccagtattgcgtagaaggacaattgctgtgatagaggacaaatgcaacgct

SEQ ID NO: 331348 - DNA, 446 bp, Homo sapiens
tgcagggaacggtcagaccggactcgggggaggcacggctgccagagctgagtgctgaggggcaagaaggaatccaccagacttaagtgcacaggacacagaagtgatcaaagggcccaaggccagaagaatttgacaaaggatcttgcaaatgaacaaataagaaatctttgctattaacgatagaggggtttgtctgctgctatgcattttcttgaactctctctctggaatctaactcagcgctcacttgctgggtgtctgcagtatgaaagcacagcacaggcagcagggagaaaggtctgctgtcacacacacagccagcctcgtccttcagtgtccaccccagatgccaccatctgatcattcagcaacaggatctcgagtccctggggcacccgcatgccagcaagcatgcccaagctggagggtgccccttctgacct

SEQ ID NO: 331349 - DNA, 5747 bp, Homo sapiens
  misc_feature (1133)..(1133): n is a, c, g, or t
cggggacgctgtgtggatggggtctgtgagtgtgccctcggctccgtgtccggagccctgtggttcttggggtgtatctggccccacccccactgcgtggtgtccagggtggggcttcacggctgcagctgcgggagctgctgcccctgccttgtgctccagtggggccttgcctctgggcttggttcgtccctctctggaacattctttctcagctgctgtccgacccatggtggcatgacgtggccctggctgaagcagcccttgtgcggttgctgtggttgggtctgcctggccgagccggaagggaagggctgggagggcgtcagggtggcgtggcttgacccccgctcggtgatggtcctgcagcaaggcctctcccagcaggaagcgtccatcccggggggaggccggcgcccctcacgcagttggggttgcgggaggcagtgcgtgcctgaggcagccggtgcacagattccaagggcctggaatctgtttgttccattgacctctgatgtcacttgacttctcagaagcagccactccctgcactgggcgtttgtaggaaatgagctcctggaggagggggtggggaagttcccccattgcagggcacactcagccccaggaaggaaacgtgcctcgtccctgctgactccgaatcgcagtcagagtcgttctgcttgtgccgtgttgaattcccggcatccggcatccagactcagcctcctccccaggccacggccgccgtggccagtcggtcaagcccttctaggaacttcctttgagctggcgcccttgttcactgctgacgccactcagaggcttgtgcacgtgtcctgcttccaggcagagctgggaactcgcaccccgtcttctgcacgcggccgtggaatgtcgggatgccggcgcttccttcccgtgtgctcttggcggggtgggcttcttgccctgagccgcatgtcacagtttctgcagaagtttagggttggagtgggctgacctctctgcaggtgtccccagcctctgcctggggtctgcctcctactcccaggaccccctgtcccccagaggggccccaagctggcaggctcacactcagggcagcctcctttgttctgacttctgcacantgggcctgggtggctgcccgcggctcgcttgcttgatgccagtgggtggagagggtgatgggcagagaggcaggtggtcaggcccccagtcccgtcctcacactctgtgccctctgccgccccccgccccacagggaaggtgctgagctactggtgcttcagtcccggccacagcatgcacgagctggtccgccagggcgtccgctccctcatccttaccagcggcacgctggccccggtgtcctcctttgctctggagatgcagatgtacgggccacccctgccagggcctgagcaccggtgacacctctgacatcagcggggtggaagtggtgggggtccccatgagccgggtgctgggggtctcgggcctcgagggctaaaggggtgctggtgcacttccccactgtctgctccctctggccacgctcagccctttcccagtctgcctggagaacccacacatcatcgacaagcaccagatctgggtgggggtcgtccccagaggccccgatggagcccagttgagctccgcgtttgacagacggttttccgaggagtgcttatcctccctggggaaggctctgggcaacatcgcccgcgtggtgccctatgggctcctgatcttcttcccttcctatcctgtcatggagaagagcctggagttctggcgggcccgcgacttggccaggaagatggaggcgctgaagccgctgtttgtggagcccaggagcaaaggcagcttctccgagaccatcagtgcttactatgcaagggttgccgcccctgggtccaccggcgccaccttcctggcggtctgccggggcaaggccagcgaggggctggacttctcagacacgaatggccgtggtgtgattgtcacgggcctcccgtaccccccacgcatggacccccgggttgtcctcaagatgcagttcctggatgagatgaagggccagggtggggctgggggccagttcctctctgggcaggagtggtaccggcagcaggcgtccagggctgtgaaccaggccatcgggcgagtgatccggcaccgccaggactacggagctgtcttcctctgtgaccacaggttcgcctttgccgacgcaagagcccaactgccctcctgggtgcgtccccacgtcagggtgtatgacaactttggccatgtcatccgagacgtggcccagttcttccgtgttgccgagcgaactatgccagcgccggccccccgggctacagcacccagtgtgcgtggagaagatgctgtcagcgaggccaagtcgcctggccccttcttctccaccaggaaagctaagagtctggacctgcatgtccccagcctgaagcagaggtcctcagggtcaccagctgccggggaccccgagagtagcctgtgtgtggagtatgagcaggagccagttcctgcccggcagaggcccagggggctgctggccgccctggagcacagcgaacagcgggcggggagccctggcgaggagcaggcccacagctgctccaccctgtccctcctgtctgagaagaggccggcagaagaaccgcgaggagggaggaagaagatccggctggtcagccacccggaggagcccgtggctggtgcacagacggacagggccaagctcttcatggtggccgtgaagcaggagttgagccaagccaactttgccaccttcacccaggccctgcaggactacaagggttccgatgacttcgccgccctggccgcctgtctcggccccctctttgctgaggaccccaagaagcacaacctgctccaaggcttctaccagtttgtgcggccccaccataagcagcagtttgaggaggtctgtatccagctgacaggacgaggctgtggctatcggcctgagcacagcattccccgaaggcagcgggcacagccggtcctggaccccactggaagaacggcgccggatcccaagctgaccgtgtccacggctgcagcccagcagctggacccccaagagcacctgaaccagggcaggccccacctgtcgcccaggccacccccaacaggagaccctggcagccaaccacagtgggggtctggagtgcccagagcagggaagcagggccagcacgccgtgagcgcctacctggctgatgcccgcagggccctggggtccgcgggctgtagccaactcttggcagcgctgacagcctataagcaagacgacgacctcgacaaggtgctggctgtgttggccgccctgaccactgcaaagccagaggacttccccctgctgcacaggttcagcatgtttgtgcgtccacaccacaagcagcgcttctcacagacgtgcacagacctgaccggccggccctacccgggcatggagccaccgggaccccaggaggagaggcttgccgtgcctcctgtgcttacccacagggctccccaaccaggcccctcacggtccgagaagaccgggaagacccagagcaagatctcgtccttccttagacagaggccagcagggactgtgggggcgggcggtgaggatgcaggtcccagccagtcctcaggacctccccacgggcctgcagcatctgagtggggcctctaggatgtgcccagcctgccacaccgcctccaggaagcagagcgtcatgcaggtcttctggccagagccccagtgagtgcccacggaggcccccagcacacccaacgtggcttgatcacctgcctgtccagctctggtgggccaagaacccacccaacagaataggccagcccatgccagccggcttggcccgctgcaggcctcaggcaggcggggcccatggttggtccctgcggtgggaccggatctgggcctgcctctgagaagccctgagctaccttggggtctggggtgggtttctgggaaagtgcttccccagaacttccctggctcctggcctgtgagtggtgccacaggggcaccccagctgagcccctcaccgggaaggaggagacccccgtgggcacgtgtccacttttaatcaggggacagggctctctaataaagctgctggcagtgcccaggacggtgtcttcgtggcctgggcttggtggtgggagttgagggacagggagttggcagaggcccctcccagcctgccatgtgacactgtacttcctccacggtgggctcagccctgccctcatcctcacagccgcagccaagctgcagttggtaggggatccaccgacacaccaggctgcctgggctggtctctgggttgggagctgccccaggtgctgaggagggcagctccctggctggtgaggcccctcccagaaccacccttggactgagctctggggagggatggtaccaggtgggtgaggggggctgcctggggagggaggggttcctatggggcgtggcgaggctggcccagccctctccccgcccatatatgtagggcagcagcaggatgggcttctggacttgggcggcccctccgcaggcggaccgggggcaaaggaggtggcatgtcggtcaggcacagcagggtcctgtgtccgcgctgagccgcgctctccctgctccagcaaggaccatgagggcgctggaggggccaggcctgtcgctgctgtgcctggtgttggcgctgcctgccctgctgccggtgccggctgtacgcggagtggcagaaacacccacctacccctggcgggacgcagagacaggggagcggctggtgtgcgcccagtgccccccaggcacctttgtgcagcggccgtgccgccgagacagccccacgacgtgtggcccgtgtccaccgcgccactacacgcagttctggaactacctggagcgctgccgctactgcaacgtcctctgcggggagcgtgaggaggaggcacgggcttgccacgccacccacaaccgtgcctgccgctgccgcaccggcttcttcgcgcacgctggtttctgcttggagcacgcatcgtgtccacctggtgccggcgtgattgccccgggcacccccagccagaacacgcagtgccagccgtgccccccaggcaccttctcagccagcagctccagctcagagcagtgccagccccaccgcaactgcacggccctgggcctggccctcaatgtgccaggctcttcctcccatgacaccctgtgcaccagctgcactggcttccccctcagcaccagggtaccaggagctgaggagtgtgagcgtgccgtcatcgactttgtggctttccaggacatctccatcaagaggctgcagcggctgctgcaggccctcgaggccccggagggctggggtccgacaccaagggcgggccgcgcggccttgcagctgaagctgcgtcggcggctcacggagctcctgggggcgcaggacggggcgctgctggtgcggctgctgcaggcgctgcgcgtggccaggatgcccgggctggagcggagcgtccgtgagcgcttcctccctgtgcactgatcctggccccctcttatttattctacatccttggcaccccacttgcactgaaagaggcttttttttaaatagaagaaatgaggtttcttaaagcttatttttataaagctttttcat

SEQ ID NO: 331350 - DNA, 2322 bp, Homo sapiens
gggggttaaaaagaaaaaaaaaaaaaaaaaaaaaaaaaaaaaaaaaaaagagcctctccggctactcggggtcagcgtggggcccctgcagcagatgagggtcttcacttcggtgaactgaacccttgaagcggctgtgggcagggcagcagggctatggccaccccccaggttcgcctttgccgacgcaagagcccaactgccctcctgggtgcgtccccacgtcagggtgtatgacaactttggccatgtcatccgagacgtggcccagttcttccgtgttgccgagcgaactatgccagcgccggccccccgggctacagcacccagtgtgcgtggagaagatgctgtcagcgaggccaagtcgcctggccccttcttctccaccaggaaagctaagagtctggacctgcatgtccccagcctgaagcagaggtcctcagggtcaccagctgccggggaccccgagagtagcctgtgtgtggagtatgagcaggagccagttcctgcccggcagaggcccagggggctgctggccgccctggagcacagcgaacagcgggcggggagccctggcgaggagcaggcccacagctgctccaccctgtccctcctgtctgagaagaggccggcagaagaaccgcgaggagggaggaagaagatccggctggtcagccacccggaggagcccgtggctggtgcacagacggacagggccaagctcttcatggtggccgtgaagcaggagttgagccaagccaactttgccaccttcacccaggccctgcaggactacaagggttccgatgacttcgccgccctggccgcctgtctcggccccctctttgctgaggaccccaagaagcacaacctgctccaaggcttctaccagtttgtgcggccccaccataagcagcagtttgaggaggtctgtatccagctgacaggacgaggctgtggctatcggcctgagcacagcattccccgaaggcagcgggcacagccggtcctggaccccactggaagaacggcgccggatcccaagctgaccgtgtccacggctgcagcccagcagctggacccccaagagcacctgaaccagggcaggccccacctgtcgcccaggccacccccaacaggagaccctggcagccaaccacagtgggggtctggagtgcccagagcagggaagcagggccagcacgccgtgagcgcctacctggctgatgcccgcagggccctggggtccgcgggctgtagccaactcttggcagcgctgacagcctataagcaagacgacgacctcgacaaggtgctggctgtgttggccgccctgaccactgcaaagccagaggacttccccctgctgcacaggttcagcatgtttgtgcgtccacaccacaagcagcgcttctcacagacgtgcacagacctgaccggccggccctacccgggcatggagccaccgggaccccaggaggagaggcttgccgtgcctcctgtgcttacccacagggctccccaaccaggcccctcacggtccgagaagaccgggaagacccagagcaagatctcgtccttccttagacagaggccagcagggactgtgggggcgggcggtgaggatgcaggtcccagccagtcctcaggacctccccacgggcctgcagcatctgagtggggtgagcctcatgggagagacatcgctgggcagcaggccacgggagctccgggcgggcccctctcagcaggctgtgtgtgccagggctgtggggcagaggacgtggtgcccttccagtgccctgcctgtgacttccagcgctgccaagcctgctggcaacggcaccttcaggcctctaggatgtgcccagcctgccacaccgcctccaggaagcagagcgtcatgcaggtcttctggccagagccccagtgagtgcccacggaggcccccagcacacccaacgtggcttgatcacctgcctgtccagctctggtgggccaagaacccacccaacagaataggccagcccatgccagccggcttggcccgctgcaggcctcaggcaggcggggcccatggttggtccctgcggtgggaccggatctgggcctgcctctgagaagccctgagctaccttggggtctggggtgggtttctgggaaagtgcttccccagaacttccctggctcctggcctgtgagtggtgccacaggggcaccccagctgagcccctcaccgggaaggaggagacccccgtgggcacgtgtccacttttaatcaggggacagggctctctaataaagctgctggcagtgcccagg

SEQ ID NO: 331351 - DNA, 892 bp, Homo sapiens
  misc_feature (7)..(7): n is a, c, g, or t
  misc_feature (10)..(11): n is a, c, g, or t
  misc_feature (19)..(19): n is a, c, g, or t
  misc_feature (754)..(754): n is a, c, g, or t
agggatnatnnaaaaaacntaggctaggtacgaggctgggtgatgctgtcagcgaggccaagtcgcctggccccttcttctccaccaggaaagctaagagtctggacctgcatgtccccagcctgaagcagaggtcctcagggtcaccagctgccggggaccccgagagtagcctgtgtgtggagtatgagcaggagccagttcctgcccggcagaggcccagggggctgctggccgccctggagcacagcgaacagcgggcggggagccctggcgaggagcaggcccacagctgctccaccctgtccctcctgtctgagaagaggccggcagaagaaccgcgaggagggaggaagaagatccggctggtcagccacccggaggagcccgtggctggtgcacagacggacagggccaagctcttcatggtggccgtgaagcaggagttgagccaagccaactttgccaccttcacccaggccctgcaggactacaagggttccgatgacttcgccgccctggccgcctgtctcggccccctctttgctgaggaccccaagaagcacaacctgctccaaggcttctaccagtttgtgcggccccaccataagcagcagtttgaggaggtctgtatccagctgacaggacgaggctgtggctatcggcctgagcacagcattccccgaaggcagcgggcacagccggtcctggaccccactgagaacggcgccggatccaagctgacgtgtcaggntgagccagagtggacccagagcactgaacaggaggccactgtggccaggcaccccaaagggacctggggcacacaagggggtctgggtgccccagcgggaaaggggcggccgggaggcactgggtatgccccaggccg

SEQ ID NO: 331352 - DNA, 494 bp, Homo sapiens
cccgagtggggcccagaaagcagggtacctggcagcccccgccagtgtgtgtgggtgaaatgatcggaccgctgcctccccaccccactgcaggagctgaggagtgtgagcgtgccgtcatcgactttgtggctttccaggacatctccatcaagaggctgcagcggctgctgcaggccctcgaggccccggagggctggggtccgacaccaagggcgggccgcgcggccttgcagctgaagctgcgtcggcggctcacggagctcctgggggcgcaggacggggcgctgctggtgcggctgctgcaggcgctgcgcgtggccaggatgcccgggctggagcggagcgtccgtgagcgcttcctccctgtgcactgatcctggccccctcttatttattctacatccttggcaccccacttgcactgaaagaggcttttttttaaatagaagaaatgaggtttcttaaagcttatttttataaagctttttcat

SEQ ID NO: 331353 - DNA, 6699 bp, Homo sapiens
ccgagtctcagataggcagcctgcagttccttcaccacaacaggcacatggggctgggtgccagtgagtgctggggcttctccgagcactatctcacacccaggagcgtgggcacgcatggcattcgcatgtgccgtcagtggacattaaacacagccatgaagaagccacgaagaagtgctgcctgccggccgtgcgcggtcacgcagcgccaactccctcctggggccttctggggccttctggggcatgggagctggggccgcctgagacaaacatccgtgacgctgggctgaccccacagaacggtgcgggcctcgctcttggagtcagccctgctgccagccagtgccgggtgctggggactcagggaggcccgccgggaccactgcgggacagtgagccgagcagaagctggaacgcaggagaggaaggagagggggcggtcagggctctcaggagccgggtcctgggcaaggcgcagccgttttcaaattttcaggaaagcggtcggctcacactcgagcagtaaaaagatgcctctggggaggaggcccgtgcagctctccgggcaatggtggtggctcggcctagagaggcggtagtggaacgcagaccctggtgggggaatgacatcaagggaggagacgggcgggaccccagatttctgcctgtgggcgatggaagtgaggttcactggccagcggagccggacacagaacgcgcaaaacgccgtgtaggcctggaggagccgaagagcaggcggaccccctccgcgggggaacagtttccgccgggagcacaaagcaacggaccggaagtggggggcggaagtgcagtgggctcagcgccgactgcgcgcctctgcccgcgaaaactctgagctggctgacagctggggacgggtggcggccctcgactggagtcggttgagttcctgagggaccccggttctggaaggttcgccgcggagacaagtgagcagtctgtgccatagggattctcgaagagaacagcgttgtgtcccagtgcacatgctcgcatcgcttaccaggagtgcccgagaccctaagatgttcggagtggttttttcgcacagacccgaatagcctgcccctcagccacgctctgtgcccttctgagaacaggctgatatgcccaagatagtcctgaatggtgtgaccgtagacttccctttccagccctacaaatgccaacaggagtacatgaccaaggtcctggaatgtctgcagcagaaggtgaatggcatcctggagagccctacgggtacagggaagacgctgtgcctgctgtgcaccacgctggcctggcgagaacacctccgagacggcatctctgcccgcaagattgccgagagggcgcaaggagagcttttcccggatcgggccttgtcatcctggggcaacgctgctgctgctgctggagaccccatagcttgctacacggacatcccaaagattatttacgcctccaggacccactcgcaactcacacaggtcatcaacgagcttcggaacacctcctaccggcctaaggtgtgtgtgctgggctcccgggagcagctgtgcatccatcctgaggtgaagaaacaagagagtaaccatctacagatccacttgtgccgtaagaaggtggcaagtcgctcctgtcatttctacaacaacgtagaagaaaaaagcctggagcaggagctggccagccccatcctggacattgaggacttggtcaagagcggaagcaagcacagggtgtgcccttactacctgtcccggaacctgaagcagcaagccgacatcatattcatgccgtacaattacttgttggatgccaagagccgcagagcacacaacattgacctgaaggggacagtcgtgatctttgacgaagctcacaacgtggagaagatgtgtgaagaatcggcatcctttgacctgactccccatgacctggcttcaggactggacgtcatagaccaggtgctggaggagcagaccaaggcagcgcagcagggtgagccccacccggagttcagcgcggactcccccagcccagggctgaacatggagctggaagacattgcaaagctgaagatgatcctgctgcgcctggagggggccatcgatgctgttgagctgcctggagacgacagcggtgtcaccaagccagggagctacatctttgagctgtttgctgaagcccagatcacgtttcagaccaagggctgcatcctggactcgctggaccagatcatccagcacctggcaggacgtgctggagtgttcaccaacacggccggactgcagaagctggcggacattatccagattgtgttcagtgtggacccctccgagggcagccctggttccccagcagggctgggggccttacagtcctataaggtgcacatccatcctgatgctggtcaccggaggacggctcagcggtctgatgcctggagcaccactgcagccagaaagcgagggaaggtgctgagctactggtgcttcagtcccggccacagcatgcacgagctggtccgccagggcgtccgctccctcatccttaccagcggcacgctggccccggtgtcctcctttgctctggagatgcagatccctttcccagtctgcctggagaacccacacatcatcgacaagcaccagatctgggtgggggtcgtccccagaggccccgatggagcccagttgagctccgcgtttgacagacggttttccgaggagtgcttatcctccctggggaaggctctgggcaacatcgcccgcgtggtgccctatgggctcctgatcttcttcccttcctatcctgtcatggagaagagcctggagttctggcgggcccgcgacttggccaggaagatggaggcgctgaagccgctgtttgtggagcccaggagcaaaggcagcttctccgagaccatcagtgcttactatgcaagggttgccgcccctgggtccaccggcgccaccttcctggcggtctgccggggcaaggccagcgaggggctggacttctcagacacgaatggccgtggtgtgattgtcacgggcctcccgtaccccccacgcatggacccccgggttgtcctcaagatgcagttcctggatgagatgaagggccagggtggggctgggggccagttcctctctgggcaggagtggtaccggcagcaggcgtccagggctgtgaaccaggccatcgggcgagtgatccggcaccgccaggactacggagctgtcttcctctgtgaccacaggttcgcctttgccgacgcaagagcccaactgccctcctgggtgcgtccccacgtcagggtgtatgacaactttggccatgtcatccgagacgtggcccagttcttccgtgttgccgagcgaactatgccagcgccggccccccgggctacagcacccagtgtgcgtggagaagatgctgtcagcgaggccaagtcgcctggccccttcttctccaccaggaaagctaagagtctggacctgcatgtccccagcctgaagcagaggtcctcagggtcaccagctgccggggaccccgagagtagcctgtgtgtggagtatgagcaggagccagttcctgcccggcagaggcccagggggctgctggccgccctggagcacagcgaacagcgggcggggagccctggcgaggagcaggcccacagctgctccaccctgtccctcctgtctgagaagaggccggcagaagaaccgcgaggagggaggaagaagatccggctggtcagccacccggaggagcccgtggctggtgcacagacggacagggccaagctcttcatggtggccgtgaagcaggagttgagccaagccaactttgccaccttcacccaggccctgcaggactacaagggttccgatgacttcgccgccctggccgcctgtctcggccccctctttgctgaggaccccaagaagcacaacctgctccaaggcttctaccagtttgtgcggccccaccataagcagcagtttgaggaggtctgtatccagctgacaggacgaggctgtggctatcggcctgagcacagcattccccgaaggcagcgggcacagccggtcctggaccccactggaagaacggcgccggatcccaagctgaccgtgtccacggctgcagcccagcagctggacccccaagagcacctgaaccagggcaggccccacctgtcgcccaggccacccccaacaggagaccctggcagccaaccacagtgggggtctggagtgcccagagcagggaagcagggccagcacgccgtgagcgcctacctggctgatgcccgcagggccctggggtccgcgggctgtagccaactcttggcagcgctgacagcctataagcaagacgacgacctcgacaaggtgctggctgtgttggccgccctgaccactgcaaagccagaggacttccccctgctgcacaggttcagcatgtttgtgcgtccacaccacaagcagcgcttctcacagacgtgcacagacctgaccggccggccctacccgggcatggagccaccgggaccccaggaggagaggcttgccgtgcctcctgtgcttacccacagggctccccaaccaggcccctcacggtccgagaagaccgggaagacccagagcaagatctcgtccttccttagacagaggccagcagggactgtgggggcgggcggtgaggatgcaggtcccagccagtcctcaggacctccccacgggcctgcagcatctgagtggggtgagcctcatgggagagacatcgctgggcagcaggccacgggagctccgggcgggcccctctcagcaggctgtgtgtgccagggctgtggggcagaggacgtggtgcccttccagtgccctgcctgtgacttccagcgctgccaagcctgctggcaacggcaccttcaggcctctaggatgtgcccagcctgccacaccgcctccaggaagcagagcgtcatgcaggtcttctggccagagccccacaaggaccatgagggcgctggaggggccaggcctgtcgctgctgtgcctggtgttggcgctgcctgccctgctgccggtgccggctgtacgcggagtggcagaaacacccacctacccctggcgggacgcagagacaggggagcggctggtgtgcgcccagtgccccccaggcacctttgtgcagcggccgtgccgccgagacagccccacgacgtgtggcccgtgtccaccgcgccactacacgcagttctggaactacctggagcgctgccgctactgcaacgtcctctgcggggagcgtgaggaggaggcacgggcttgccacgccacccacaaccgtgcctgccgctgccgcaccggcttcttcgcgcacgctggtttctgcttggagcacgcatcgtgtccacctggtgccggcgtgattgccccgggcacccccagccagaacacgcagtgccagccgtgccccccaggcaccttctcagccagcagctccagctcagagcagtgccagccccaccgcaactgcacggccctgggcctggccctcaatgtgccaggctcttcctcccatgacaccctgtgcaccagctgcactggcttccccctcagcaccagggtaccaggagctgaggagtgtgagcgtgccgtcatcgactttgtggctttccaggacatctccatcaagaggctgcagcggctgctgcaggccctcgaggccccggagggctggggtccgacaccaagggcgggccgcgcggccttgcagctgaagctgcgtcggcggctcacggagctcctgggggcgcaggacggggcgctgctggtgcggctgctgcaggcgctgcgcgtggccaggatgcccgggctggagcggagcgtccgtgagcgcttcctccctgtgcactgatcctggccccctcttatttattctacatccttggcaccccacttgcactgaaagaggcttttttttaaatagaagaaatgaggtttcttaaagcttatttttataaagctttttcataaaactggttgtagttgcacagctactgggagggcagccggggacacctgagccgcccgctgtgcccagatccctcaggctgcctgccatcagaactgctgcccggggcttcccctacctcagacagaccctccctgggaggatcagtggggagtgccacctctgcccccagtggctgtggcacgtggcaggggcccctgaagctcagcgagggtcagggcctgggagggtatcattgctggaagaacaggatggggctcaggccagccctagtcgccggggcccacactaaccccccacttatgaattcctcccactcccaactcacaggggatttcccgagaggggacctgccaaagacctcctccaggcctcccatgctttccgggaagtgaagcttctccctctctggggcaggctctgaagcctcccgatgcacccagagcaaccggggggctgcaccagccactcgcctccccagcacggccaggttcccggggctggaggtcccccccaggtcctgggaaccaacctgcagaacacacacagggtcccctggagaggacgcggggacttccagggcccgactcctgtgagtcacagccccgcagctgctgc

SEQ ID NO: 331354 - DNA, 7136 bp, Homo sapiens
ccgagtctcagataggcagcctgcagttccttcaccacaacaggcacatggggctgggtgccagtgagtgctggggcttctccgagcactatctcacacccaggagcgtgggcacgcatggcattcgcatgtgccgtcagtggacattaaacacagccatgaagaagccacgaagaagtgctgcctgccggccgtgcgcggtcacgcagcgccaactccctcctggggccttctggggccttctggggcatgggagctggggccgcctgagacaaacatccgtgacgctgggctgaccccacagaacggtgcgggcctcgctcttggagtcagccctgctgccagccagtgccgggtgctggggactcagggaggcccgccgggaccactgcgggacagtgagccgagcagaagctggaacgcaggagaggaaggagagggggcggtcagggctctcaggagccgggtcctgggcaaggcgcagccgttttcaaattttcaggaaagcggtcggctcacactcgagcagtaaaaagatgcctctggggaggaggcccgtgcagctctccgggcaatggtggtggctcggcctagagaggcggtagtggaacgcagaccctggtgggggaatgacatcaagggaggagacgggcgggaccccagatttctgcctgtgggcgatggaagtgaggttcactggccagcggagccggacacagaacgcgcaaaacgccgtgtaggcctggaggagccgaagagcaggcggaccccctccgcgggggaacagtttccgccgggagcacaaagcaacggaccggaagtggggggcggaagtgcagtgggctcagcgccgactgcgcgcctctgcccgcgaaaactctgagctggctgacagctggggacgggtggcggccctcgactggagtcggttgagttcctgagggaccccggttctggaaggttcgccgcggagacaagtgagcagtctgtgccatagggattctcgaagagaacagcgttgtgtcccagtgcacatgctcgcatcgcttaccaggagtgcccgagaccctaagatgttcggagtggttttttcgcacagacccgaatagcctgcccctcagccacgctctgtgcccttctgagaacaggctgatatgcccaagatagtcctgaatggtgtgaccgtagacttccctttccagccctacaaatgccaacaggagtacatgaccaaggtcctggaatgtctgcagcagaaggtgaatggcatcctggagagccctacgggtacagggaagacgctgtgcctgctgtgcaccacgctggcctggcgagaacacctccgagacggcatctctgcccgcaagattgccgagagggcgcaaggagagcttttcccggatcgggccttgtcatcctggggcaacgctgctgctgctgctggagaccccatagcttgctacacggacatcccaaagattatttacgcctccaggacccactcgcaactcacacaggtcatcaacgagcttcggaacacctcctaccgctccctcctacgcccgggccacgtttcagttatgctcacttcctctgaccgccgaggctcctgcgtgtctccatacagctcacgctgcagggccacgctgtgggtgttggagacagctcctcctcgacccacggtgctctctcccaccaggcctaaggtgtgtgtgctgggctcccgggagcagctgtgcatccatcctgaggtgaagaaacaagagagtaaccatctacagatccacttgtgccgtaagaaggtggcaagtcgctcctgtcatttctacaacaacgtagaagaaaaaagcctggagcaggagctggccagccccatcctggacattgaggacttggtcaagagcggaagcaagcacagggtgtgcccttactacctgtcccggaacctgaagcagcaagccgacatcatattcatgccgtacaattacttgttggatgccaagagccgcagagcacacaacattgacctgaaggggacagtcgtgatctttgacgaagctcacaacgtggagaagatgtgtgaagaatcggcatcctttgacctgactccccatgacctggcttcaggactggacgtcatagaccaggtgctggaggagcagaccaaggcagcgcagcagggtgagccccacccggagttcagcgcggactcccccagcccagggctgaacatggagctggaagacattgcaaagctgaagatgatcctgctgcgcctggagggggccatcgatgctgttgagctgcctggagacgacagcggtgtcaccaagccagggagctacatctttgagctgtttgctgaagcccagatcacgtttcagaccaagggctgcatcctggactcgctggaccagatcatccagcacctggcaggacgtgctggagtgttcaccaacacggccggactgcagaagctggcggacattatccagattgtgttcagtgtggacccctccgagggcagccctggttccccagcagggctgggggccttacagtcctataaggtgcacatccatcctgatgctggtcaccggaggacggctcagcggtctgatgcctggagcaccactgcagccagaaagcgagggaaggtgctgagctactggtgcttcagtcccggccacagcatgcacgagctggtccgccagggcgtccgctccctcatccttaccagcggcacgctggccccggtgtcctcctttgctctggagatgcagatccctttcccagtctgcctggagaacccacacatcatcgacaagcaccagatctgggtgggggtcgtccccagaggccccgatggagcccagttgagctccgcgtttgacagacggttttccgaggagtgcttatcctccctggggaaggctctgggcaacatcgcccgcgtggtgccctatgggctcctgatcttcttcccttcctatcctgtcatggagaagagcctggagttctggcgggcccgcgacttggccaggaagatggaggcgctgaagccgctgtttgtggagcccaggagcaaaggcagcttctccgagaccatcagtgcttactatgcaagggttgccgcccctgggtccaccggcgccaccttcctggcggtctgccggggcaaggccagcgaggggctggacttctcagacacgaatggccgtggtgtgattgtcacgggcctcccgtaccccccacgcatggacccccgggttgtcctcaagatgcagttcctggatgagatgaagggccagggtggggctgggggccagttcctctctgggcaggagtggtaccggcagcaggcgtccagggctgtgaaccaggccatcgggcgagtgatccggcaccgccaggactacggagctgtcttcctctgtgaccacaggttcgcctttgccgacgcaagagcccaactgccctcctgggtgcgtccccacgtcagggtgtatgacaactttggccatgtcatccgagacgtggcccagttcttccgtgttgccgagcgaactatgccagcgccggccccccgggctacagcacccagtgtgcgtggagaagatgctgtcagcgaggccaagtcgcctggccccttcttctccaccaggaaagctaagagtctggacctgcatgtccccagcctgaagcagaggtcctcagggtcaccagctgccggggaccccgagagtagcctgtgtgtggagtatgagcaggagccagttcctgcccggcagaggcccagggggctgctggccgccctggagcacagcgaacagcgggcggggagccctggcgaggagcaggcccacagctgctccaccctgtccctcctgtctgagaagaggccggcagaagaaccgcgaggagggaggaagaagatccggctggtcagccacccggaggagcccgtggctggtgcacagacggacagggccaagctcttcatggtggccgtgaagcaggagttgagccaagccaactttgccaccttcacccaggccctgcaggactacaagggttccgatgacttcgccgccctggccgcctgtctcggccccctctttgctgaggaccccaagaagcacaacctgctccaaggcttctaccagtttgtgcggccccaccataagcagcagtttgaggaggtctgtatccagctgacaggacgaggctgtggctatcggcctgagcacagcattccccgaaggcagcgggcacagccggtcctggaccccactggaagaacggcgccggatcccaagctgaccgtgtccacggctgcagcccagcagctggacccccaagagcacctgaaccagggcaggccccacctgtcgcccaggccacccccaacaggagaccctggcagccaaccacagtgggggtctggagtgcccagagcagggaagcagggccagcacgccgtgagcgcctacctggctgatgcccgcagggccctggggtccgcgggctgtagccaactcttggcagcgctgacagcctataagcaagacgacgacctcgacaaggtgctggctgtgttggccgccctgaccactgcaaagccagaggacttccccctgctgcacaggttcagcatgtttgtgcgtccacaccacaagcagcgcttctcacagacgtgcacagacctgaccggccggccctacccgggcatggagccaccgggaccccaggaggagaggcttgccgtgcctcctgtgcttacccacagggctccccaaccaggcccctcacggtccgagaagaccgggaagacccagagcaagatctcgtccttccttagacagaggccagcagggactgtgggggcgggcggtgaggatgcaggtcccagccagtcctcaggacctccccacgggcctgcagcatctgagtggggtgagcctcatgggagagacatcgctgggcagcaggccacgggagctccgggcgggcccctctcagcaggctgtgtgtgccagggctgtggggcagaggacgtggtgcccttccagtgccctgcctgtgacttccagcgctgccaagcctgctggcaacggcaccttcaggcctctaggatgtgcccagcctgccacaccgcctccaggaagcagagcgtcatgcaggtcttctggccagagccccagtgagtgcccacggaggcccccagcacacccaacgtggcttgatcacctgcctgtccagctctggtgggccaagaacccacccaacagaataggccagcccatgccagccggcttggcccgctgcaggcctcaggcaggcggggcccatggttggtccctgcggtgggaccggatctgggcctgcctctgagaagccctgagctaccttggggtctggggtgggtttctgggaaagtgcttccccagaacttccctggctcctggcctgtgagtggtgccacaggggcaccccagctgagcccctcaccgggaaggaggagacccccgtgggcacgtgtccacttttaatcaggggacagggctctctaataaagctgctggcagtgcccaggacggtgtcttcgtggcctgggcttggtggtgggagttgagggacagggagttggcagaggcccctcccagcctgccatgtgacactgtacttcctccacggtgggctcagccctgccctcatcctcacagccgcagccaagctgcagttggtaggggatccaccgacacaccaggctgcctgggctggtctctgggttgggagctgccccaggtgctgaggagggcagctccctggctggtgaggcccctcccagaaccacccttggactgagctctggggagggatggtaccaggtgggtgaggggggctgcctggggagggaggggttcctatggggcgtggcgaggctggcccagccctctccccgcccatatatgtagggcagcagcaggatgggcttctggacttgggcggcccctccgcaggcggaccgggggcaaaggaggtggcatgtcggtcaggcacagcagggtcctgtgtccgcgctgagccgcgctctccctgctccagcaaggaccatgagggcgctggaggggccaggcctgtcgctgctgtgcctggtgttggcgctgcctgccctgctgccggtgccggctgtacgcggagtggcagaaacacccacctacccctggcgggacgcagagacaggggagcggctggtgtgcgcccagtgccccccaggcacctttgtgcagcggccgtgccgccgagacagccccacgacgtgtggcccgtgtccaccgcgccactacacgcagttctggaactacctggagcgctgccgctactgcaacgtcctctgcggggagcgtgaggaggaggcacgggcttgccacgccacccacaaccgtgcctgccgctgccgcaccggcttcttcgcgcacgctggtttctgcttggagcacgcatcgtgtccacctggtgccggcgtgattgccccgggcacccccagccagaacacgcagtgccagccgtgccccccaggcaccttctcagccagcagctccagctcagagcagtgccagccccaccgcaactgcacggccctgggcctggccctcaatgtgccaggctcttcctcccatgacaccctgtgcaccagctgcactggcttccccctcagcaccagggtaccaggagctgaggagtgtgagcgtgccgtcatcgactttgtggctttccaggacatctccatcaagaggctgcagcggctgctgcaggccctcgaggccccggagggctggggtccgacaccaagggcgggccgcgcggccttgcagctgaagctgcgtcggcggctcacggagctcctgggggcgcaggacggggcgctgctggtgcggctgctgcaggcgctgcgcgtggccaggatgcccgggctggagcggagcgtccgtgagcgcttcctccctgtgcactgatcctggccccctcttatttattctacatccttggcaccccacttgcactgaaagaggcttttttttaaatagaagaaatgaggtttcttaaagcttatttttataaagctttttcat

SEQ ID NO: 331355 - DNA, 5751 bp, Homo sapiens
  misc_feature (1133)..(1133): n is a, c, g, or t
cggggacgctgtgtggatggggtctgtgagtgtgccctcggctccgtgtccggagccctgtggttcttggggtgtatctggccccacccccactgcgtggtgtccagggtggggcttcacggctgcagctgcgggagctgctgcccctgccttgtgctccagtggggccttgcctctgggcttggttcgtccctctctggaacattctttctcagctgctgtccgacccatggtggcatgacgtggccctggctgaagcagcccttgtgcggttgctgtggttgggtctgcctggccgagccggaagggaagggctgggagggcgtcagggtggcgtggcttgacccccgctcggtgatggtcctgcagcaaggcctctcccagcaggaagcgtccatcccggggggaggccggcgcccctcacgcagttggggttgcgggaggcagtgcgtgcctgaggcagccggtgcacagattccaagggcctggaatctgtttgttccattgacctctgatgtcacttgacttctcagaagcagccactccctgcactgggcgtttgtaggaaatgagctcctggaggagggggtggggaagttcccccattgcagggcacactcagccccaggaaggaaacgtgcctcgtccctgctgactccgaatcgcagtcagagtcgttctgcttgtgccgtgttgaattcccggcatccggcatccagactcagcctcctccccaggccacggccgccgtggccagtcggtcaagcccttctaggaacttcctttgagctggcgcccttgttcactgctgacgccactcagaggcttgtgcacgtgtcctgcttccaggcagagctgggaactcgcaccccgtcttctgcacgcggccgtggaatgtcgggatgccggcgcttccttcccgtgtgctcttggcggggtgggcttcttgccctgagccgcatgtcacagtttctgcagaagtttagggttggagtgggctgacctctctgcaggtgtccccagcctctgcctggggtctgcctcctactcccaggaccccctgtcccccagaggggccccaagctggcaggctcacactcagggcagcctcctttgttctgacttctgcacantgggcctgggtggctgcccgcggctcgcttgcttgatgccagtgggtggagagggtgatgggcagagaggcaggtggtcaggcccccagtcccgtcctcacactctgtgccctctgccgccccccgccccacagggaaggtgctgagctactggtgcttcagtcccggccacagcatgcacgagctggtccgccagggcgtccgctccctcatccttaccagcggcacgctggccccggtgtcctcctttgctctggagatgcagatccctttcccagtctgcctggagaacccacacatcatcgacaagcaccagatctgggtgggggtcgtccccagaggccccgatggagcccagttgagctccgcgtttgacagacggttttccgaggagtgcttatcctccctggggaaggctctgggcaacatcgcccgcgtggtgccctatgggctcctgatcttcttcccttcctatcctgtcatggagaagagcctggagttctggcgggcccgcgacttggccaggaagatggaggcgctgaagccgctgtttgtggagcccaggagcaaaggcagcttctccgagaccatcagtgcttactatgcaagggttgccgcccctgggtccaccggcgccaccttcctggcggtctgccggggcaaggccagcgaggggctggacttctcagacacgaatggccgtggtgtgattgtcacgggcctcccgtaccccccacgcatggacccccgggttgtcctcaagatgcagttcctggatgagatgaagggccagggtggggctgggggccagttcctctctgggcaggagtggtaccggcagcaggcgtccagggctgtgaaccaggccatcgggcgagtgatccggcaccgccaggactacggagctgtcttcctctgtgaccacaggttcgcctttgccgacgcaagagcccaactgccctcctgggtgcgtccccacgtcagggtgtatgacaactttggccatgtcatccgagacgtggcccagttcttccgtgttgccgagcgaactatgccagcgccggccccccgggctacagcacccagtgtgcgtggagaagatgctgtcagcgaggccaagtcgcctggccccttcttctccaccaggaaagctaagagtctggacctgcatgtccccagcctgaagcagaggtcctcagggtcaccagctgccggggaccccgagagtagcctgtgtgtggagtatgagcaggagccagttcctgcccggcagaggcccagggggctgctggccgccctggagcacagcgaacagcgggcggggagccctggcgaggagcaggcccacagctgctccaccctgtccctcctgtctgagaagaggccggcagaagaaccgcgaggagggaggaagaagatccggctggtcagccacccggaggagcccgtggctggtgcacagacggacagggccaagctcttcatggtggccgtgaagcaggagttgagccaagccaactttgccaccttcacccaggccctgcaggactacaagggttccgatgacttcgccgccctggccgcctgtctcggccccctctttgctgaggaccccaagaagcacaacctgctccaaggcttctaccagtttgtgcggccccaccataagcagcagtttgaggaggtctgtatccagctgacaggacgaggctgtggctatcggcctgagcacagcattccccgaaggcagcgggcacagccggtcctggaccccactggaagaacggcgccggatcccaagctgaccgtgtccacggctgcagcccagcagctggacccccaagagcacctgaaccagggcaggccccacctgtcgcccaggccacccccaacaggagaccctggcagccaaccacagtgggggtctggagtgcccagagcagggaagcagggccagcacgccgtgagcgcctacctggctgatgcccgcagggccctggggtccgcgggctgtagccaactcttggcagcgctgacagcctataagcaagacgacgacctcgacaaggtgctggctgtgttggccgccctgaccactgcaaagccagaggacttccccctgctgcacaggttcagcatgtttgtgcgtccacaccacaagcagcgcttctcacagacgtgcacagacctgaccggccggccctacccgggcatggagccaccgggaccccaggaggagaggcttgccgtgcctcctgtgcttacccacagggctccccaaccaggcccctcacggtccgagaagaccgggaagacccagagcaagatctcgtccttccttagacagaggccagcagggactgtgggggcgggcggtgaggatgcaggtcccagccagtcctcaggacctccccacgggcctgcagcatctgagtggggtgagcctcatgggagagacatcgctgggcagcaggccacgggagctccgggcgggcccctctcagcaggctgtgtgtgccagggctgtggggcagaggacgtggtgcccttccagtgccctgcctgtgacttccagcgctgccaagcctgctggcaacggcaccttcaggcctctaggatgtgcccagcctgccacaccgcctccaggaagcagagcgtcatgcaggtcttctggccagagccccagtgagtgcccacggaggcccccagcacacccaacgtggcttgatcacctgcctgtccagctctggtgggccaagaacccacccaacagaataggccagcccatgccagccggcttggcccgctgcaggcctcaggcaggcggggcccatggttggtccctgcggtgggaccggatctgggcctgcctctgagaagccctgagctaccttggggtctggggtgggtttctgggaaagtgcttccccagaacttccctggctcctggcctgtgagtggtgccacaggggcaccccagctgagcccctcaccgggaaggaggagacccccgtgggcacgtgtccacttttaatcaggggacagggctctctaataaagctgctggcagtgcccaggacggtgtcttcgtggcctgggcttggtggtgggagttgagggacagggagttggcagaggcccctcccagcctgccatgtgacactgtacttcctccacggtgggctcagccctgccctcatcctcacagccgcagccaagctgcagttggtaggggatccaccgacacaccaggctgcctgggctggtctctgggttgggagctgccccaggtgctgaggagggcagctccctggctggtgaggcccctcccagaaccacccttggactgagctctggggagggatggtaccaggtgggtgaggggggctgcctggggagggaggggttcctatggggcgtggcgaggctggcccagccctctccccgcccatatatgtagggcagcagcaggatgggcttctggacttgggcggcccctccgcaggcggaccgggggcaaaggaggtggcatgtcggtcaggcacagcagggtcctgtgtccgcgctgagccgcgctctccctgctccagcaaggaccatgagggcgctggaggggccaggcctgtcgctgctgtgcctggtgttggcgctgcctgccctgctgccggtgccggctgtacgcggagtggcagaaacacccacctacccctggcgggacgcagagacaggggagcggctggtgtgcgcccagtgccccccaggcacctttgtgcagcggccgtgccgccgagacagccccacgacgtgtggcccgtgtccaccgcgccactacacgcagttctggaactacctggagcgctgccgctactgcaacgtcctctgcggggagcgtgaggaggaggcacgggcttgccacgccacccacaaccgtgcctgccgctgccgcaccggcttcttcgcgcacgctggtttctgcttggagcacgcatcgtgtccacctggtgccggcgtgattgccccgggcacccccagccagaacacgcagtgccagccgtgccccccaggcaccttctcagccagcagctccagctcagagcagtgccagccccaccgcaactgcacggccctgggcctggccctcaatgtgccaggctcttcctcccatgacaccctgtgcaccagctgcactggcttccccctcagcaccagggtaccaggagctgaggagtgtgagcgtgccgtcatcgactttgtggctttccaggacatctccatcaagaggctgcagcggctgctgcaggccctcgaggccccggagggctggggtccgacaccaagggcgggccgcgcggccttgcagctgaagctgcgtcggcggctcacggagctcctgggggcgcaggacggggcgctgctggtgcggctgctgcaggcgctgcgcgtggccaggatgcccgggctggagcggagcgtccgtgagcgcttcctccctgtgcactgatcctggccccctcttatttattctacatccttggcaccccacttgcactgaaagaggcttttttttaaatagaagaaatgaggtttcttaaagcttatttttataaagctttttcat

SEQ ID NO: 331356 - DNA, 3560 bp, Homo sapiens
  misc_feature (7)..(7): n is a, c, g, or t
  misc_feature (10)..(11): n is a, c, g, or t
  misc_feature (19)..(19): n is a, c, g, or t
agggatnatnnaaaaaacntaggctaggtacgaggctgggtgatgctgtcagcgaggccaagtcgcctggccccttcttctccaccaggaaagctaagagtctggacctgcatgtccccagcctgaagcagaggtcctcagggtcaccagctgccggggaccccgagagtagcctgtgtgtggagtatgagcaggagccagttcctgcccggcagaggcccagggggctgctggccgccctggagcacagcgaacagcgggcggggagccctggcgaggagcaggcccacagctgctccaccctgtccctcctgtctgagaagaggccggcagaagaaccgcgaggagggaggaagaagatccggctggtcagccacccggaggagcccgtggctggtgcacagacggacagggccaagctcttcatggtggccgtgaagcaggagttgagccaagccaactttgccaccttcacccaggccctgcaggactacaagggttccgatgacttcgccgccctggccgcctgtctcggccccctctttgctgaggaccccaagaagcacaacctgctccaaggcttctaccagtttgtgcggccccaccataagcagcagtttgaggaggtctgtatccagctgacaggacgaggctgtggctatcggcctgagcacagcattccccgaaggcagcgggcacagccggtcctggaccccactggaagaacggcgccggatcccaagctgaccgtgtccacggctgcagcccagcagctggacccccaagagcacctgaaccagggcaggccccacctgtcgcccaggccacccccaacaggagaccctggcagccaaccacagtgggggtctggagtgcccagagcagggaagcagggccagcacgccgtgagcgcctacctggctgatgcccgcagggccctggggtccgcgggctgtagccaactcttggcagcgctgacagcctataagcaagacgacgacctcgacaaggtgctggctgtgttggccgccctgaccactgcaaagccagaggacttccccctgctgcacaggttcagcatgtttgtgcgtccacaccacaagcagcgcttctcacagacgtgcacagacctgaccggccggccctacccgggcatggagccaccgggaccccaggaggagaggcttgccgtgcctcctgtgcttacccacagggctccccaaccaggcccctcacggtccgagaagaccgggaagacccagagcaagatctcgtccttccttagacagaggccagcagggactgtgggggcgggcggtgaggatgcaggtcccagccagtcctcaggacctccccacgggcctgcagcatctgagtggggtgagcctcatgggagagacatcgctgggcagcaggccacgggagctccgggcgggcccctctcagcaggctgtgtgtgccagggctgtggggcagaggacgtggtgcccttccagtgccctgcctgtgacttccagcgctgccaagcctgctggcaacggcaccttcaggcctctaggatgtgcccagcctgccacaccgcctccaggaagcagagcgtcatgcaggtcttctggccagagccccagtgagtgcccacggaggcccccagcacacccaacgtggcttgatcacctgcctgtccagctctggtgggccaagaacccacccaacagaataggccagcccatgccagccggcttggcccgctgcaggcctcaggcaggcggggcccatggttggtccctgcggtgggaccggatctgggcctgcctctgagaagccctgagctaccttggggtctggggtgggtttctgggaaagtgcttccccagaacttccctggctcctggcctgtgagtggtgccacaggggcaccccagctgagcccctcaccgggaaggaggagacccccgtgggcacgtgtccacttttaatcaggggacagggctctctaataaagctgctggcagtgcccaggacggtgtcttcgtggcctgggcttggtggtgggagttgagggacagggagttggcagaggcccctcccagcctgccatgtgacactgtacttcctccacggtgggctcagccctgccctcatcctcacagccgcagccaagctgcagttggtaggggatccaccgacacaccaggctgcctgggctggtctctgggttgggagctgccccaggtgctgaggagggcagctccctggctggtgaggcccctcccagaaccacccttggactgagctctggggagggatggtaccaggtgggtgaggggggctgcctggggagggaggggttcctatggggcgtggcgaggctggcccagccctctccccgcccatatatgtagggcagcagcaggatgggcttctggacttgggcggcccctccgcaggcggaccgggggcaaaggaggtggcatgtcggtcaggcacagcagggtcctgtgtccgcgctgagccgcgctctccctgctccagcaaggaccatgagggcgctggaggggccaggcctgtcgctgctgtgcctggtgttggcgctgcctgccctgctgccggtgccggctgtacgcggagtggcagaaacacccacctacccctggcgggacgcagagacaggggagcggctggtgtgcgcccagtgccccccaggcacctttgtgcagcggccgtgccgccgagacagccccacgacgtgtggcccgtgtccaccgcgccactacacgcagttctggaactacctggagcgctgccgctactgcaacgtcctctgcggggagcgtgaggaggaggcacgggcttgccacgccacccacaaccgtgcctgccgctgccgcaccggcttcttcgcgcacgctggtttctgcttggagcacgcatcgtgtccacctggtgccggcgtgattgccccgggcacccccagccagaacacgcagtgccagccgtgccccccaggcaccttctcagccagcagctccagctcagagcagtgccagccccaccgcaactgcacggccctgggcctggccctcaatgtgccaggctcttcctcccatgacaccctgtgcaccagctgcactggcttccccctcagcaccagggtaccaggagctgaggagtgtgagcgtgccgtcatcgactttgtggctttccaggacatctccatcaagaggctgcagcggctgctgcaggccctcgaggccccggagggctggggtccgacaccaagggcgggccgcgcggccttgcagctgaagctgcgtcggcggctcacggagctcctgggggcgcaggacggggcgctgctggtgcggctgctgcaggcgctgcgcgtggccaggatgcccgggctggagcggagcgtccgtgagcgcttcctccctgtgcactgatcctggccccctcttatttattctacatccttggcaccccacttgcactgaaagaggcttttttttaaatagaagaaatgaggtttcttaaagcttatttttataaagctttttcat

SEQ ID NO: 331357 - DNA, 7604 bp, Homo sapiens
ccgagtctcagataggcagcctgcagttccttcaccacaacaggcacatggggctgggtgccagtgagtgctggggcttctccgagcactatctcacacccaggagcgtgggcacgcatggcattcgcatgtgccgtcagtggacattaaacacagccatgaagaagccacgaagaagtgctgcctgccggccgtgcgcggtcacgcagcgccaactccctcctggggccttctggggccttctggggcatgggagctggggccgcctgagacaaacatccgtgacgctgggctgaccccacagaacggtgcgggcctcgctcttggagtcagccctgctgccagccagtgccgggtgctggggactcagggaggcccgccgggaccactgcgggacagtgagccgagcagaagctggaacgcaggagaggaaggagagggggcggtcagggctctcaggagccgggtcctgggcaaggcgcagccgttttcaaattttcaggaaagcggtcggctcacactcgagcagtaaaaagatgcctctggggaggaggcccgtgcagctctccgggcaatggtggtggctcggcctagagaggcggtagtggaacgcagaccctggtgggggaatgacatcaagggaggagacgggcgggaccccagatttctgcctgtgggcgatggaagtgaggttcactggccagcggagccggacacagaacgcgcaaaacgccgtgtaggcctggaggagccgaagagcaggcggaccccctccgcgggggaacagtttccgccgggagcacaaagcaacggaccggaagtggggggcggaagtgcagtgggctcagcgccgactgcgcgcctctgcccgcgaaaactctgagctggctgacagctggggacgggtggcggccctcgactggagtcggttgagttcctgagggaccccggttctggaaggttcgccgcggagacaagtgagcagtctgtgccatagggattctcgaagagaacagcgttgtgtcccagtgcacatgctcgcatcgcttaccaggagtgcccgagaccctaagatgttcggagtggttttttcgcacagacccgaatagcctgcccctcagccacgctctgtgcccttctgagaacaggctgatatgcccaagatagtcctgaatggtgtgaccgtagacttccctttccagccctacaaatgccaacaggagtacatgaccaaggtcctggaatgtctgcagcagaaggtgaatggcatcctggagagccctacgggtacagggaagacgctgtgcctgctgtgcaccacgctggcctggcgagaacacctccgagacggcatctctgcccgcaagattgccgagagggcgcaaggagagcttttcccggatcgggccttgtcatcctggggcaacgctgctgctgctgctggagaccccatagcttgctacacggacatcccaaagattatttacgcctccaggacccactcgcaactcacacaggtcatcaacgagcttcggaacacctcctaccggcctaaggtgtgtgtgctgggctcccgggagcagctgtgcatccatcctgaggtgaagaaacaagagagtaaccatctacagatccacttgtgccgtaagaaggtggcaagtcgctcctgtcatttctacaacaacgtagaagaaaaaagcctggagcaggagctggccagccccatcctggacattgaggacttggtcaagagcggaagcaagcacagggtgtgcccttactacctgtcccggaacctgaagcagcaagccgacatcatattcatgccgtacaattacttgttggatgccaagagccgcagagcacacaacattgacctgaaggggacagtcgtgatctttgacgaagctcacaacgtggagaagatgtgtgaagaatcggcatcctttgacctgactccccatgacctggcttcaggactggacgtcatagaccaggtgctggaggagcagaccaaggcagcgcagcagggtgagccccacccggagttcagcgcggactcccccagcccagggctgaacatggagctggaagacattgcaaagctgaagatgatcctgctgcgcctggagggggccatcgatgctgttgagctgcctggagacgacagcggtgtcaccaagccagggagctacatctttgagctgtttgctgaagcccagatcacgtttcagaccaagggctgcatcctggactcgctggaccagatcatccagcacctggcaggacgtgctggagtgttcaccaacacggccggactgcagaagctggcggacattatccagattgtgttcagtgtggacccctccgagggcagccctggttccccagcagggctgggggccttacagtcctataaggtgcacatccatcctgatgctggtcaccggaggacggctcagcggtctgatgcctggagcaccactgcagccagaaagcgagggaaggtgctgagctactggtgcttcagtcccggccacagcatgcacgagctggtccgccagggcgtccgctccctcatccttaccagcggcacgctggccccggtgtcctcctttgctctggagatgcagatccctttcccagtctgcctggagaacccacacatcatcgacaagcaccagatctgggtgggggtcgtccccagaggccccgatggagcccagttgagctccgcgtttgacagacggttttccgaggagtgcttatcctccctggggaaggctctgggcaacatcgcccgcgtggtgccctatgggctcctgatcttcttcccttcctatcctgtcatggagaagagcctggagttctggcgggcccgcgacttggccaggaagatggaggcgctgaagccgctgtttgtggagcccaggagcaaaggcagcttctccgagaccatcagtgcttactatgcaagggttgccgcccctgggtccaccggcgccaccttcctggcggtctgccggggcaaggccagcgaggggctggacttctcagacacgaatggccgtggtgtgattgtcacgggcctcccgtaccccccacgcatggacccccgggttgtcctcaagatgcagttcctggatgagatgaagggccagggtggggctgggggccagttcctctctgggcaggagtggtaccggcagcaggcgtccagggctgtgaaccaggccatcgggcgagtgatccggcaccgccaggactacggagctgtcttcctctgtgaccacaggttcgcctttgccgacgcaagagcccaactgccctcctgggtgcgtccccacgtcagggtgtatgacaactttggccatgtcatccgagacgtggcccagttcttccgtgttgccgagcgaactatgccagcgccggccccccgggctacagcacccagtgtgcgtggagaagatgctgtcagcgaggccaagtcgcctggccccttcttctccaccaggaaagctaagagtctggacctgcatgtccccagcctgaagcagaggtcctcagggtcaccagctgccggggaccccgagagtagcctgtgtgtggagtatgagcaggagccagttcctgcccggcagaggcccagggggctgctggccgccctggagcacagcgaacagcgggcggggagccctggcgaggagcaggcccacagctgctccaccctgtccctcctgtctgagaagaggccggcagaagaaccgcgaggagggaggaagaagatccggctggtcagccacccggaggagcccgtggctggtgcacagacggacagggccaagctcttcatggtggccgtgaagcaggagttgagccaagccaactttgccaccttcacccaggccctgcaggactacaagggttccgatgacttcgccgccctggccgcctgtctcggccccctctttgctgaggaccccaagaagcacaacctgctccaaggcttctaccagtttgtgcggccccaccataagcagcagtttgaggaggtctgtatccagctgacaggacgaggctgtggctatcggcctgagcacagcattccccgaaggcagcgggcacagccggtcctggaccccactggaagaacggcgccggatcccaagctgaccgtgtccacggctgcagcccagcagctggacccccaagagcacctgaaccagggcaggccccacctgtcgcccaggccacccccaacaggagaccctggcagccaaccacagtgggggtctggagtgcccagagcagggaagcagggccagcacgccgtgagcgcctacctggctgatgcccgcagggccctggggtccgcgggctgtagccaactcttggcagcgctgacagcctataagcaagacgacgacctcgacaaggtgctggctgtgttggccgccctgaccactgcaaagccagaggacttccccctgctgcacaggttcagcatgtttgtgcgtccacaccacaagcagcgcttctcacagacgtgcacagacctgaccggccggccctacccgggcatggagccaccgggaccccaggaggagaggcttgccgtgcctcctgtgcttacccacagggctccccaaccaggcccctcacggtccgagaagaccgggaagacccagagcaagatctcgtccttccttagacagaggccagcagggactgtgggggcgggcggtgaggatgcaggtcccagccagtcctcaggacctccccacgggcctgcagcatctgagtggggtgagcctcatgggagagacatcgctgggcagcaggccacgggagctccgggcgggcccctctcagcaggctgtgtgtgccagggctgtggggcagaggacgtggtgcccttccagtgccctgcctgtgacttccagcgctgccaagcctgctggcaacggcaccttcaggcctctaggatgtgcccagcctgccacaccgcctccaggaagcagagcgtcatgcaggtcttctggccagagccccagtgagtgcccacggaggcccccagcacacccaacgtggcttgatcacctgcctgtccagctctggtgggccaagaacccacccaacagaataggccagcccatgccagccggcttggcccgctgcaggcctcaggcaggcggggcccatggttggtccctgcggtgggaccggatctgggcctgcctctgagaagccctgagctaccttggggtctggggtgggtttctgggaaagtgcttccccagaacttccctggctcctggcctgtgagtggtgccacaggggcaccccagctgagcccctcaccgggaaggaggagacccccgtgggcacgtgtccacttttaatcaggggacagggctctctaataaagctgctggcagtgcccaggacggtgtcttcgtggcctgggcttggtggtgggagttgagggacagggagttggcagaggcccctcccagcctgccatgtgacactgtacttcctccacggtgggctcagccctgccctcatcctcacagccgcagccaagctgcagttggtaggggatccaccgacacaccaggctgcctgggctggtctctgggttgggagctgccccaggtgctgaggagggcagctccctggctggtgaggcccctcccagaaccacccttggactgagctctggggagggatggtaccaggtgggtgaggggggctgcctggggagggaggggttcctatggggcgtggcgaggctggcccagccctctccccgcccatatatgtagggcagcagcaggatgggcttctggacttgggcggcccctccgcaggcggaccgggggcaaaggaggtggcatgtcggtcaggcacagcagggtcctgtgtccgcgctgagccgcgctctccctgctccagcaaggaccatgagggcgctggaggggccaggcctgtcgctgctgtgcctggtgttggcgctgcctgccctgctgccggtgccggctgtacgcggagtggcagaaacacccacctacccctggcgggacgcagagacaggggagcggctggtgtgcgcccagtgccccccaggcacctttgtgcagcggccgtgccgccgagacagccccacgacgtgtggcccgtgtccaccgcgccactacacgcagttctggaactacctggagcgctgccgctactgcaacgtcctctgcggggagcgtgaggaggaggcacgggcttgccacgccacccacaaccgtgcctgccgctgccgcaccggcttcttcgcgcacgctggtttctgcttggagcacgcatcgtgtccacctggtgccggcgtgattgccccgggcacccccagccagaacacgcagtgccagccgtgccccccaggcaccttctcagccagcagctccagctcagagcagtgccagccccaccgcaactgcacggccctgggcctggccctcaatgtgccaggctcttcctcccatgacaccctgtgcaccagctgcactggcttccccctcagcaccagggtaccaggagctgaggagtgtgagcgtgccgtcatcgactttgtggctttccaggacatctccatcaagaggctgcagcggctgctgcaggccctcgaggccccggagggctggggtccgacaccaagggcgggccgcgcggccttgcagctgaagctgcgtcggcggctcacggagctcctgggggcgcaggacggggcgctgctggtgcggctgctgcaggcgctgcgcgtggccaggatgcccgggctggagcggagcgtccgtgagcgcttcctccctgtgcactgatcctggccccctcttatttattctacatccttggcaccccacttgcactgaaagaggcttttttttaaatagaagaaatgaggtttcttaaagcttatttttataaagctttttcataaaactggttgtagttgcacagctactgggagggcagccggggacacctgagccgcccgctgtgcccagatccctcaggctgcctgccatcagaactgctgcccggggcttcccctacctcagacagaccctccctgggaggatcagtggggagtgccacctctgcccccagtggctgtggcacgtggcaggggcccctgaagctcagcgagggtcagggcctgggagggtatcattgctggaagaacaggatggggctcaggccagccctagtcgccggggcccacactaaccccccacttatgaattcctcccactcccaactcacaggggatttcccgagaggggacctgccaaagacctcctccaggcctcccatgctttccgggaagtgaagcttctccctctctggggcaggctctgaagcctcccgatgcacccagagcaaccggggggctgcaccagccactcgcctccccagcacggccaggttcccggggctggaggtcccccccaggtcctgggaaccaacctgcagaacacacacagggtcccctggagaggacgcggggacttccagggcccgactcctgtgagtcacagccccgcagctgctgc

SEQ ID NO: 331358 - DNA, 6529 bp, Homo sapiens
ccgagtctcagataggcagcctgcagttccttcaccacaacaggcacatggggctgggtgccagtgagtgctggggcttctccgagcactatctcacacccaggagcgtgggcacgcatggcattcgcatgtgccgtcagtggacattaaacacagccatgaagaagccacgaagaagtgctgcctgccggccgtgcgcggtcacgcagcgccaactccctcctggggccttctggggccttctggggcatgggagctggggccgcctgagacaaacatccgtgacgctgggctgaccccacagaacggtgcgggcctcgctcttggagtcagccctgctgccagccagtgccgggtgctggggactcagggaggcccgccgggaccactgcgggacagtgagccgagcagaagctggaacgcaggagaggaaggagagggggcggtcagggctctcaggagccgggtcctgggcaaggcgcagccgttttcaaattttcaggaaagcggtcggctcacactcgagcagtaaaaagatgcctctggggaggaggcccgtgcagctctccgggcaatggtggtggctcggcctagagaggcggtagtggaacgcagaccctggtgggggaatgacatcaagggaggagacgggcgggaccccagatttctgcctgtgggcgatggaagtgaggttcactggccagcggagccggacacagaacgcgcaaaacgccgtgtaggcctggaggagccgaagagcaggcggaccccctccgcgggggaacagtttccgccgggagcacaaagcaacggaccggaagtggggggcggaagtgcagtgggctcagcgccgactgcgcgcctctgcccgcgaaaactctgagctggctgacagctggggacgggtggcggccctcgactggagtcggttgagttcctgagggaccccggttctggaaggttcgccgcggagacaagtgagcagtctgtgccatagggattctcgaagagaacagcgttgtgtcccagtgcacatgctcgcatcgcttaccaggagtgcccgagaccctaagatgttcggagtggttttttcgcacagacccgaatagcctgcccctcagccacgctctgtgcccttctgagaacaggctgatatgcccaagatagtcctgaatggtgtgaccgtagacttccctttccagccctacaaatgccaacaggagtacatgaccaaggtcctggaatgtctgcagcagaaggtgaatggcatcctggagagccctacgggtacagggaagacgctgtgcctgctgtgcaccacgctggcctggcgagaacacctccgagacggcatctctgcccgcaagattgccgagagggcgcaaggagagcttttcccggatcgggccttgtcatcctggggcaacgctgctgctgctgctggagaccccatagcttgctacacggacatcccaaagattatttacgcctccaggacccactcgcaactcacacaggtcatcaacgagcttcggaacacctcctaccggcctaaggtgtgtgtgctgggctcccgggagcagctgtgcatccatcctgaggtgaagaaacaagagagtaaccatctacagatccacttgtgccgtaagaaggtggcaagtcgctcctgtcatttctacaacaacgtagaagaaaaaagcctggagcaggagctggccagccccatcctggacattgaggacttggtcaagagcggaagcaagcacagggtgtgcccttactacctgtcccggaacctgaagcagcaagccgacatcatattcatgccgtacaattacttgttggatgccaagagccgcagagcacacaacattgacctgaaggggacagtcgtgatctttgacgaagctcacaacgtggagaagatgtgtgaagaatcggcatcctttgacctgactccccatgacctggcttcaggactggacgtcatagaccaggtgctggaggagcagaccaaggcagcgcagcagggtgagccccacccggagttcagcgcggactcccccagcccagggctgaacatggagctggaagacattgcaaagctgaagatgatcctgctgcgcctggagggggccatcgatgctgttgagctgcctggagacgacagcggtgtcaccaagccagggagctacatctttgagctgtttgctgaagcccagatcacgtttcagaccaagggctgcatcctggactcgctggaccagatcatccagcacctggcaggacgtgctggagtgttcaccaacacggccggactgcagaagctggcggacattatccagattgtgttcagtgtggacccctccgagggcagccctggttccccagcagggctgggggccttacagtcctataaggtgcacatccatcctgatgctggtcaccggaggacggctcagcggtctgatgcctggagcaccactgcagccagaaagcgagggaaggtgctgagctactggtgcttcagtcccggccacagcatgcacgagctggtccgccagggcgtccgctccctcatccttaccagcggcacgctggccccggtgtcctcctttgctctggagatgcagatccctttcccagtctgcctggagaacccacacatcatcgacaagcaccagatctgggtgggggtcgtccccagaggccccgatggagcccagttgagctccgcgtttgacagacggttttccgaggagtgcttatcctccctggggaaggctctgggcaacatcgcccgcgtggtgccctatgggctcctgatcttcttcccttcctatcctgtcatggagaagagcctggagttctggcgggcccgcgacttggccaggaagatggaggcgctgaagccgctgtttgtggagcccaggagcaaaggcagcttctccgagaccatcagtgcttactatgcaagggttgccgcccctgggtccaccggcgccaccttcctggcggtctgccggggcaaggccagcgaggggctggacttctcagacacgaatggccgtggtgtgattgtcacgggcctcccgtaccccccacgcatggacccccgggttgtcctcaagatgcagttcctggatgagatgaagggccagggtggggctgggggccagttcctctctgggcaggagtggtaccggcagcaggcgtccagggctgtgaaccaggccatcgggcgagtgatccggcaccgccaggactacggagctgtcttcctctgtgaccacaggttcgcctttgccgacgcaagagcccaactgccctcctgggtgcgtccccacgtcagggtgtatgacaactttggccatgtcatccgagacgtggcccagttcttccgtgttgccgagcgaactatgccagcgccggccccccgggctacagcacccagtgtgcgtggagaagatgctgtcagcgaggccaagtcgcctggccccttcttctccaccaggaaagctaagagtctggacctgcatgtccccagcctgaagcagaggtcctcagggtcaccagctgccggggaccccgagagtagcctgtgtgtggagtatgagcaggagccagttcctgcccggcagaggcccagggggctgctggccgccctggagcacagcgaacagcgggcggggagccctggcgaggagcaggcccacagctgctccaccctgtccctcctgtctgagaagaggccggcagaagaaccgcgaggagggaggaagaagatccggctggtcagccacccggaggagcccgtggctggtgcacagacggacagggccaagctcttcatggtggccgtgaagcaggagttgagccaagccaactttgccaccttcacccaggccctgcaggactacaagggttccgatgacttcgccgccctggccgcctgtctcggccccctctttgctgaggaccccaagaagcacaacctgctccaaggcttctaccagtttgtgcggccccaccataagcagcagtttgaggaggtctgtatccagctgacaggacgaggctgtggctatcggcctgagcacagcattccccgaaggcagcgggcacagccggtcctggaccccactggaagaacggcgccggatcccaagctgaccgtgtccacggctgcagcccagcagctggacccccaagagcacctgaaccagggcaggccccacctgtcgcccaggccacccccaacaggagaccctggcagccaaccacagtgggggtctggagtgcccagagcagggaagcagggccagcacgccgtgagcgcctacctggctgatgcccgcagggccctggggtccgcgggctgtagccaactcttggcagcgctgacagcctataagcaagacgacgacctcgacaaggtgctggctgtgttggccgccctgaccactgcaaagccagaggacttccccctgctgcacaggttcagcatgtttgtgcgtccacaccacaagcagcgcttctcacagacgtgcacagacctgaccggccggccctacccgggcatggagccaccgggaccccaggaggagaggcttgccgtgcctcctgtgcttacccacagggctccccaaccaggcccctcacggtccgagaagaccgggaagacccagagcaagatctcgtccttccttagacagaggccagcagggactgtgggggcgggcggtgaggatgcaggtcccagccagtcctcaggacctccccacgggcctgcagcatctgagtggggcctctaggatgtgcccagcctgccacaccgcctccaggaagcagagcgtcatgcaggtcttctggccagagccccacaaggaccatgagggcgctggaggggccaggcctgtcgctgctgtgcctggtgttggcgctgcctgccctgctgccggtgccggctgtacgcggagtggcagaaacacccacctacccctggcgggacgcagagacaggggagcggctggtgtgcgcccagtgccccccaggcacctttgtgcagcggccgtgccgccgagacagccccacgacgtgtggcccgtgtccaccgcgccactacacgcagttctggaactacctggagcgctgccgctactgcaacgtcctctgcggggagcgtgaggaggaggcacgggcttgccacgccacccacaaccgtgcctgccgctgccgcaccggcttcttcgcgcacgctggtttctgcttggagcacgcatcgtgtccacctggtgccggcgtgattgccccgggcacccccagccagaacacgcagtgccagccgtgccccccaggcaccttctcagccagcagctccagctcagagcagtgccagccccaccgcaactgcacggccctgggcctggccctcaatgtgccaggctcttcctcccatgacaccctgtgcaccagctgcactggcttccccctcagcaccagggtaccaggagctgaggagtgtgagcgtgccgtcatcgactttgtggctttccaggacatctccatcaagaggctgcagcggctgctgcaggccctcgaggccccggagggctggggtccgacaccaagggcgggccgcgcggccttgcagctgaagctgcgtcggcggctcacggagctcctgggggcgcaggacggggcgctgctggtgcggctgctgcaggcgctgcgcgtggccaggatgcccgggctggagcggagcgtccgtgagcgcttcctccctgtgcactgatcctggccccctcttatttattctacatccttggcaccccacttgcactgaaagaggcttttttttaaatagaagaaatgaggtttcttaaagcttatttttataaagctttttcataaaactggttgtagttgcacagctactgggagggcagccggggacacctgagccgcccgctgtgcccagatccctcaggctgcctgccatcagaactgctgcccggggcttcccctacctcagacagaccctccctgggaggatcagtggggagtgccacctctgcccccagtggctgtggcacgtggcaggggcccctgaagctcagcgagggtcagggcctgggagggtatcattgctggaagaacaggatggggctcaggccagccctagtcgccggggcccacactaaccccccacttatgaattcctcccactcccaactcacaggggatttcccgagaggggacctgccaaagacctcctccaggcctcccatgctttccgggaagtgaagcttctccctctctggggcaggctctgaagcctcccgatgcacccagagcaaccggggggctgcaccagccactcgcctccccagcacggccaggttcccggggctggaggtcccccccaggtcctgggaaccaacctgcagaacacacacagggtcccctggagaggacgcggggacttccagggcccgactcctgtgagtcacagccccgcagctgctgc

SEQ ID NO: 331359 - DNA, 6505 bp, Homo sapiens
ccgagtctcagataggcagcctgcagttccttcaccacaacaggcacatggggctgggtgccagtgagtgctggggcttctccgagcactatctcacacccaggagcgtgggcacgcatggcattcgcatgtgccgtcagtggacattaaacacagccatgaagaagccacgaagaagtgctgcctgccggccgtgcgcggtcacgcagcgccaactccctcctggggccttctggggccttctggggcatgggagctggggccgcctgagacaaacatccgtgacgctgggctgaccccacagaacggtgcgggcctcgctcttggagtcagccctgctgccagccagtgccgggtgctggggactcagggaggcccgccgggaccactgcgggacagtgagccgagcagaagctggaacgcaggagaggaaggagagggggcggtcagggctctcaggagccgggtcctgggcaaggcgcagccgttttcaaattttcaggaaagcggtcggctcacactcgagcagtaaaaagatgcctctggggaggaggcccgtgcagctctccgggcaatggtggtggctcggcctagagaggcggtagtggaacgcagaccctggtgggggaatgacatcaagggaggagacgggcgggaccccagatttctgcctgtgggcgatggaagtgaggttcactggccagcggagccggacacagaacgcgcaaaacgccgtgtaggcctggaggagccgaagagcaggcggaccccctccgcgggggaacagtttccgccgggagcacaaagcaacggaccggaagtggggggcggaagtgcagtgggctcagcgccgactgcgcgcctctgcccgcgaaaactctgagctggctgacagctggggacgggtggcggccctcgactggagtcggttgagttcctgagggaccccggttctggaaggttcgccgcggagacaagtgagcagtctgtgccatagggattctcgaagagaacagcgttgtgtcccagtgcacatgctcgcatcgcttaccaggagtgcccgagaccctaagatgttcggagtggttttttcgcacagacccgaatagcctgcccctcagccacgctctgtgcccttctgagaacaggctgatatgcccaagatagtcctgaatggtgtgaccgtagacttccctttccagccctacaaatgccaacaggagtacatgaccaaggtcctggaatgtctgcagcagaaggtgaatggcatcctggagagccctacgggtacagggaagacgctgtgcctgctgtgcaccacgctggcctggcgagaacacctccgagacggcatctctgcccgcaagattgccgagagggcgcaaggagagcttttcccggatcgggccttgtcatcctggggcaacgctgctgctgctgctggagaccccatagcttgctacacggacatcccaaagattatttacgcctccaggacccactcgcaactcacacaggtcatcaacgagcttcggaacacctcctaccggcctaaggtgtgtgtgctgggctcccgggagcagctgtgcatccatcctgaggtgaagaaacaagagagtaaccatctacagatccacttgtgccgtaagaaggtggcaagtcgctcctgtcatttctacaacaacgtagaagaaaaaagcctggagcaggagctggccagccccatcctggacattgaggacttggtcaagagcggaagcaagcacagggtgtgcccttactacctgtcccggaacctgaagcagcaagccgacatcatattcatgccgtacaattacttgttggatgccaagagccgcagagcacacaacattgacctgaaggggacagtcgtgatctttgacgaagctcacaacgtggagaagatgtgtgaagaatcggcatcctttgacctgactccccatgacctggcttcaggactggacgtcatagaccaggtgctggaggagcagaccaaggcagcgcagcagggtgagccccacccggagttcagcgcggactcccccagcccagggctgaacatggagctggaagacattgcaaagctgaagatgatcctgctgcgcctggagggggccatcgatgctgttgagctgcctggagacgacagcggtgtcaccaagccagggagctacatctttgagctgtttgctgaagcccagatcacgtttcagaccaagggctgcatcctggactcgctggaccagatcatccagcacctggcaggacgtgctggagtgttcaccaacacggccggactgcagaagctggcggacattatccagattgtgttcagtgtggacccctccgagggcagccctggttccccagcagggctgggggccttacagtcctataaggtgcacatccatcctgatgctggtcaccggaggacggctcagcggtctgatgcctggagcaccactgcagccagaaagcgagggaaggtgctgagctactggtgcttcagtcccggccacagcatgcacgagctggtccgccagggcgtccgctccctcatccttaccagcggcacgctggccccggtgtcctcctttgctctggagatgcagatccctttcccagtctgcctggagaacccacacatcatcgacaagcaccagatctgggtgggggtcgtccccagaggccccgatggagcccagttgagctccgcgtttgacagacggttttccgaggagtgcttatcctccctggggaaggctctgggcaacatcgcccgcgtggtgccctatgggctcctgatcttcttcccttcctatcctgtcatggagaagagcctggagttctggcgggcccgcgacttggccaggaagatggaggcgctgaagccgctgtttgtggagcccaggagcaaaggcagcttctccgagaccatcagtgcttactatgcaagggttgccgcccctgggtccaccggcgccaccttcctggcggtctgccggggcaaggccagcgaggggctggacttctcagacacgaatggccgtggtgtgattgtcacgggcctcccgtaccccccacgcatggacccccgggttgtcctcaagatgcagttcctggatgagatgaagggccagggtggggctgggggccagttcctctctgggcaggagtggtaccggcagcaggcgtccagggctgtgaaccaggccatcgggcgagtgatccggcaccgccaggactacggagctgtcttcctctgtgaccacaggttcgcctttgccgacgcaagagcccaactgccctcctgggtgcgtccccacgtcagggtgtatgacaactttggccatgtcatccgagacgtggcccagttcttccgtgttgccgagcgaactatgccagcgccggccccccgggctacagcacccagtgtgcgtggagaagatgctgtcagcgaggccaagtcgcctggccccttcttctccaccaggaaagctaagagtctggacctgcatgtccccagcctgaagcagaggtcctcagggtcaccagctgccggggaccccgagagtagcctgtgtgtggagtatgagcaggagccagttcctgcccggcagaggcccagggggctgctggccgccctggagcacagcgaacagcgggcggggagccctggcgaggagcaggcccacagctgctccaccctgtccctcctgtctgagaagaggccggcagaagaaccgcgaggagggaggaagaagatccggctggtcagccacccggaggagcccgtggctggtgcacagacggacagggccaagctcttcatggtggccgtgaagcaggagttgagccaagccaactttgccaccttcacccaggccctgcaggactacaagggttccgatgacttcgccgccctggccgcctgtctcggccccctctttgctgaggaccccaagaagcacaacctgctccaaggcttctaccagtttgtgcggccccaccataagcagcagtttgaggaggtctgtatccagctgacaggacgaggctgtggctatcggcctgagcacagcattccccgaaggcagcgggcacagccggtcctggaccccactggaagaacggcgccggatcccaagctgaccgtgtccacggctgcagcccagcagctggacccccaagagcacctgaaccagggcaggccccacctgtcgcccaggccacccccaacaggagaccctggcagccaaccacagtgggggtctggagtgcccagagcagggaagcagggccagcacgccgtgagcgcctacctggctgatgcccgcagggccctggggtccgcgggctgtagccaactcttggcagcgctgacagcctataagcaagacgacgacctcgacaaggtgctggctgtgttggccgccctgaccactgcaaagccagaggacttccccctgctgcacaggttcagcatgtttgtgcgtccacaccacaagcagcgcttctcacagacgtgcacagacctgaccggccggccctacccgggcatggagccaccgggaccccaggaggagaggcttgccgtgcctcctgtgcttacccacagggctccccaaccaggcccctcacggtccgagaagaccgggaagacccagagcaagatctcgtccttccttagacagaggccagcagggactgtgggggcgggcggtgaggatgcaggtcccagccagtcctcaggacctccccacgggcctgcagcatctgagtggggtgagcctcatgggagagacatcgctgggcagcaggccacgggagctccgggcgggcccctctcagcaggctgtgtgtgccagggctgtggggcagaggacgtggtgcccttccagtgccctgcctgtgacttccagcgctgccaagcctgctggcaacggcaccttcaggcctctaggatgtgcccagcctgccacaccgcctccaggaagcagagcgtcatgcaggtcttctggccagagccccagtgagtgcccacggaggcccccagcacacccaacgtggcttgatcacctgcctgtccagctctggtgggccaagaacccacccaacagaataggccagcccatgccagccggcttggcccgctgcaggcctcaggcaggcggggcccatggttggtccctgcggtgggaccggatctgggcctgcctctgagaagccctgagctaccttggggtctggggtgggtttctgggaaagtgcttccccagaacttccctggctcctggcctgtgagtggtgccacaggggcaccccagctgagcccctcaccgggaaggaggagacccccgtgggcacgtgtccacttttaatcaggggacagggctctctaataaagctgctggcagtgcccaggacggtgtcttcgtggcctgggcttggtggtgggagttgagggacagggagttggcagaggcccctcccagcctgccatgtgacactgtacttcctccacggtgggctcagccctgccctcatcctcacagccgcagccaagctgcagttggtaggggatccaccgacacaccaggctgcctgggctggtctctgggttgggagctgccccaggtgctgaggagggcagctccctggctggtgaggcccctcccagaaccacccttggactgagctctggggagggatggtaccaggtgggtgaggggggctgcctggggagggaggggttcctatggggcgtggcgaggctggcccagccctctccccgcccatatatgtagggcagcagcaggatgggcttctggacttgggcggcccctccgcaggcggaccgggggcaaaggaggtggcatgtcggtcaggcacagcagggtcctgtgtccgcgctgagccgcgctctccctgctccagcaaggaccatgagggcgctggaggggccaggcctgtcgctgctgtgcctggtgttggcgctgcctgccctgctgccggtgccggctgtacgcggagtggcagaaacacccacctacccctggcgggacgcagagacaggggagcggctggtgtgcgcccagtgccccccaggcacctttgtgcagcggccgtgccgccgagacagccccacgacgtgtggcccgtgtccaccgcgccactacacgcagtttggggtccgacaccaagggcgggccgcgcggccttgcagctgaagctgcgtcggcggctcacggagctcctgggggcgcaggacggggcgctgctggtgcggctgctgcaggcgctgcgcgtggccaggatgcccgggctggagcggagcgtccgtgagcgcttcctccctgtgcactgatcctggccccctcttatttattctacatccttggcaccccacttgcactgaaagaggcttttttttaaatagaagaaatgaggtttcttaaagcttatttttataaagctttttcat

SEQ ID NO: 331360 - DNA, 4318 bp, Homo sapiens
  misc_feature (4180)..(4180): n is a, c, g, or t
ccgagtctcagataggcagcctgcagttccttcaccacaacaggcacatggggctgggtgccagtgagtgctggggcttctccgagcactatctcacacccaggagcgtgggcacgcatggcattcgcatgtgccgtcagtggacattaaacacagccatgaagaagccacgaagaagtgctgcctgccggccgtgcgcggtcacgcagcgccaactccctcctggggccttctggggccttctggggcatgggagctggggccgcctgagacaaacatccgtgacgctgggctgaccccacagaacggtgcgggcctcgctcttggagtcagccctgctgccagccagtgccgggtgctggggactcagggaggcccgccgggaccactgcgggacagtgagccgagcagaagctggaacgcaggagaggaaggagagggggcggtcagggctctcaggagccgggtcctgggcaaggcgcagccgttttcaaattttcaggaaagcggtcggctcacactcgagcagtaaaaagatgcctctggggaggaggcccgtgcagctctccgggcaatggtggtggctcggcctagagaggcggtagtggaacgcagaccctggtgggggaatgacatcaagggaggagacgggcgggaccccagatttctgcctgtgggcgatggaagtgaggttcactggccagcggagccggacacagaacgcgcaaaacgccgtgtaggcctggaggagccgaagagcaggcggaccccctccgcgggggaacagtttccgccgggagcacaaagcaacggaccggaagtggggggcggaagtgcagtgggctcagcgccgactgcgcgcctctgcccgcgaaaactctgagctggctgacagctggggacgggtggcggccctcgactggagtcggttgagttcctgagggaccccggttctggaaggttcgccgcggagacaagtgagcagtctgtgccatagggattctcgaagagaacagcgttgtgtcccagtgcacatgctcgcatcgcttaccaggagtgcccgagaccctaagatgttcggagtggttttttcgcacagacccgaatagcctgcccctcagccacgctctgtgcccttctgagaacaggctgatatgcccaagatagtcctgaatggtgtgaccgtagacttccctttccagccctacaaatgccaacaggagtacatgaccaaggtcctggaatgtctgcagcagaaggtgaatggcatcctggagagccctacgggtacagggaagacgctgtgcctgctgtgcaccacgctggcctggcgagaacacctccgagacggcatctctgcccgcaagattgccgagagggcgcaaggagagcttttcccggatcgggccttgtcatcctggggcaacgctgctgctgctgctggagaccccatagcttgctacacggacatcccaaagattatttacgcctccaggacccactcgcaactcacacaggtcatcaacgagcttcggaacacctcctaccggcctaaggtgtgtgtgctgggctcccgggagcagctgtgcatccatcctgaggtgaagaaacaagagagtaaccatctacagatccacttgtgccgtaagaaggtggcaagtcgctcctgtcatttctacaacaacgtagaagaaaaaagcctggagcaggagctggccagccccatcctggacattgaggacttggtcaagagcggaagcaagcacagggtgtgcccttactacctgtcccggaacctgaagcagcaagccgacatcatattcatgccgtacaattacttgttggatgccaagagccgcagagcacacaacattgacctgaaggggacagtcgtgatctttgacgaagctcacaacgtggagaagatgtgtgaagaatcggcatcctttgacctgactccccatgacctggcttcaggactggacgtcatagaccaggtgctggaggagcagaccaaggcagcgcagcagggtgagccccacccggagttcagcgcggactcccccagcccagggctgaacatggagctggaagacattgcaaagctgaagatgatcctgctgcgcctggagggggccatcgatgctgttgagctgcctggagacgacagcggtgtcaccaagccagggagctacatctttgagctgtttgctgaagcccagatcacgtttcagaccaagggctgcatcctggactcgctggaccagatcatccagcacctggcaggacgtgctggagtgttcaccaacacggccggactgcagaagctggcggacattatccagattgtgttcagtgtggacccctccgagggcagccctggttccccagcagggctgggggccttacagtcctataaggtgcacatccatcctgatgctggtcaccggaggacggctcagcggtctgatgcctggagcaccactgcagccagaaagcgagggaaggtgctgagctactggtgcttcagtcccggccacagcatgcacgagctggtccgccagggcgtccgctccctcatccttaccagcggcacgctggccccggtgtcctcctttgctctggagatgcagatccctttcccagtctgcctggagaacccacacatcatcgacaagcaccagatctgggtgggggtcgtccccagaggccccgatggagcccagttgagctccgcgtttgacagacggttttccgaggagtgcttatcctccctggggaaggctctgggcaacatcgcccgcgtggtgccctatgggctcctgatcttcttcccttcctatcctgtcatggagaagagcctggagttctggcgggcccgcgacttggccaggaagatggaggcgctgaagccgctgtttgtggagcccaggagcaaaggcagcttctccgagaccatcagtgcttactatgcaagggttgccgcccctgggtccaccggcgccaccttcctggcggtctgccggggcaaggccagcgaggggctggacttctcagacacgaatggccgtggtgtgattgtcacgggcctcccgtaccccccacgcatggacccccgggttgtcctcaagatgcagttcctggatgagatgaagggccagggtggggctgggggccagttcctctctgggcaggagtggtaccggcagcaggcgtccagggctgtgaaccaggccatcgggcgagtgatccggcaccgccaggactacggagctgtcttcctctgtgaccacaggttcgcctttgccgacgcaagagcccaactgccctcctgggtgcgtccccacgtcagggtgtatgacaactttggccatgtcatccgagacgtggcccagttcttccgtgttgccgagcgaactatgccagcgccggccccccgggctacagcacccagtgtgcgtggagaagatgctgtcagcgaggccaagtcgcctggccccttcttctccaccaggaaagctaagagtctggacctgcatgtccccagcctgaagcagaggtcctcagggtcaccagctgccggggaccccgagagtagcctgtgtgtggagtatgagcaggagccagttcctgcccggcagaggcccagggggctgctggccgccctggagcacagcgaacagcgggcggggagccctggcgaggagcaggcccacagctgctccaccctgtccctcctgtctgagaagaggccggcagaagaaccgcgaggagggaggaagaagatccggctggtcagccacccggaggagcccgtggctggtgcacagacggacagggccaagctcttcatggtggccgtgaagcaggagttgagccaagccaactttgccaccttcacccaggccctgcaggactacaagggttccgatgacttcgccgccctggccgcctgtctcggccccctctttgctgaggaccccaagaagcacaacctgctccaaggcttctaccagtttgtgcggccccaccataagcagcagtttgaggaggtctgtatccagctgacaggacgaggctgtggctatcggcctgagcacagcattccccgaaggcagcgggcacagccggtcctggaccccactgagaacggcgccggatccaagctgacgtgtcaggntgagccagagtggacccagagcactgaacaggaggccactgtggccaggcaccccaaagggacctggggcacacaagggggtctgggtgccccagcgggaaaggggcggccgggaggcactgggtatgccccaggccg

SEQ ID NO: 331361 - DNA, 1938 bp, Homo sapiens
ccgagtctcagataggcagcctgcagttccttcaccacaacaggcacatggggctgggtgccagtgagtgctggggcttctccgagcactatctcacacccaggagcgtgggcacgcatggcattcgcatgtgccgtcagtggacattaaacacagccatgaagaagccacgaagaagtgctgcctgccggccgtgcgcggtcacgcagcgccaactccctcctggggccttctggggccttctggggcatgggagctggggccgcctgagacaaacatccgtgacgctgggctgaccccacagaacggtgcgggcctcgctcttggagtcagccctgctgccagccagtgccgggtgctggggactcagggaggcccgccgggaccactgcgggacagtgagccgagcagaagctggaacgcaggagaggaaggagagggggcggtcagggctctcaggagccgggtcctgggcaaggcgcagccgttttcaaattttcaggaaagcggtcggctcacactcgagcagtaaaaagatgcctctggggaggaggcccgtgcagctctccgggcaatggtggtggctcggcctagagaggcggtagtggaacgcagaccctggtgggggaatgacatcaagggaggagacgggcgggaccccagatttctgcctgtgggcgatggaagtgaggttcactggccagcggagccggacacagaacgcgcaaaacgccgtgtaggcctggaggagccgaagagcaggcggaccccctccgcgggggaacagtttccgccgggagcacaaagcaacggaccggaagtggggggcggaagtgcagtgggctcagcgccgactgcgcgcctctgcccgcgaaaactctgagctggctgacagctggggacgggtggcggccctcgactggagtcggttgagttcctgagggaccccggttctggaaggttcgccgcggagacaagtgagcagtctgtgccatagggattctcgaagagaacagcgttgtgtcccagtgcacatgctcgcatcgcttaccaggagtgcccgagaccctaagatgttcggagtggttttttcgcacagacccgaatagcctgcccctcagccacgctctgtgcccttctgagaacaggctgatatgcccaagatagtcctgaatggtgtgaccgtagacttccctttccagccctacaaatgccaacaggagtacatgaccaaggtcctggaatgtctgcagcagaaggtgaatggcatcctggagagccctacgggtacagggaagacgctgtgcctgctgtgcaccacgctggcctggcgagaacacctccgagacggcatctctgcccgcaagattgccgagagggcgcaaggagagcttttcccggatcgggccttgtcatcctggggcaacgctgctgctgctgctggagaccccatagcttgctacacggacatcccaaagattatttacgcctccaggacccactcgcaactcacacaggtcatcaacgagcttcggaacacctcctaccgctccctcctacgcccgggccacgtttcagttatgctcacttcctctgaccgccgaggctcctgcgtgtctccatacagctcacgctgcagggccacgctgtgggtgttggagacagctcctcctcgacccacggtgctctctcccaccaggcctaaggtgtgtgtgctgggctcccgggagcagctgtgcatccatcctgaggtgaagaaacaagagagtaaccatctacagatccacttgtgccgtaagaaggtggcaagtcgctcctgtcatttctacaacaacgtagaaggtacaagcagctgggtgggaccagggtcgggttggagtgtgtgcagcctctcagggtggagctcagtggtgtcacagcctggttgtgcttgcccgg

SEQ ID NO: 331362 - DNA, 507 bp, Homo sapiens
gacagtcgtgatctttgacgaagctcacaacgtggtgagtctccgctggcctcctaaacacctcctattgcttctggcctttttgtcaagagccacgcaaacctttctggaggggctctggccaaactcctgaagccctaggtgcccaggactggggactgagcacaccaggagcttctgccaccccctcccgccctgatccgatgcctctgctggggctggagactggccagctgggccagggacctgcccgtcaggcgcagggcccccacaggccgctcaccagaccctttccctccagccagctcggggtcagcctgggccagggctgtctcctctgccctcggcagcagcaggcttgtggtcttgcctgcagtgtctctgcccttccggccacatggcttgagactgaggcaggagaatcgcttgaaccttggaggcagaggctgcagtgagccaggatcacaccactgcattccagcctgggtgacaaagcgggattctgtg

SEQ ID NO: 331363 - DNA, 419 bp, Homo sapiens
aggttgctggtcccagccttgcaccctgagctaggacaccagttcccctgaccctgttcttccctcctggctgcaggcacccccagccagaacacgcagtgccagccgtgccccccaggcaccttctcagccagcagctccagctcagagcagtgccagccccaccgcaactgcacggccctgggcctggccctcaatgtgccaggctcttcctcccatgacaccctgtgcaccagctgcactggcttccccctcagcaccagggtaccaggtgagccagaggcctgagggggcagcacactgcaggccaggcccacttgtgccctcactcctgcccctgcacgtgcatctagcctgaggcatgccagctggctctgggaaggggccacagtggatttgaggggtcaggggtccctcca

SEQ ID NO: 331364 - DNA, 5276 bp, Homo sapiens
ccgagtctcagataggcagcctgcagttccttcaccacaacaggcacatggggctgggtgccagtgagtgctggggcttctccgagcactatctcacacccaggagcgtgggcacgcatggcattcgcatgtgccgtcagtggacattaaacacagccatgaagaagccacgaagaagtgctgcctgccggccgtgcgcggtcacgcagcgccaactccctcctggggccttctggggccttctggggcatgggagctggggccgcctgagacaaacatccgtgacgctgggctgaccccacagaacggtgcgggcctcgctcttggagtcagccctgctgccagccagtgccgggtgctggggactcagggaggcccgccgggaccactgcgggacagtgagccgagcagaagctggaacgcaggagaggaaggagagggggcggtcagggctctcaggagccgggtcctgggcaaggcgcagccgttttcaaattttcaggaaagcggtcggctcacactcgagcagtaaaaagatgcctctggggaggaggcccgtgcagctctccgggcaatggtggtggctcggcctagagaggcggtagtggaacgcagaccctggtgggggaatgacatcaagggaggagacgggcgggaccccagatttctgcctgtgggcgatggaagtgaggttcactggccagcggagccggacacagaacgcgcaaaacgccgtgtaggcctggaggagccgaagagcaggcggaccccctccgcgggggaacagtttccgccgggagcacaaagcaacggaccggaagtggggggcggaagtgcagtgggctcagcgccgactgcgcgcctctgcccgcgaaaactctgagctggctgacagctggggacgggtggcggccctcgactggagtcggttgagttcctgagggaccccggttctggaaggttcgccgcggagacaagtgagcagtctgtgccatagggattctcgaagagaacagcgttgtgtcccagtgcacatgctcgcatcgcttaccaggagtgcccgagaccctaagatgttcggagtggttttttcgcacagacccgaatagcctgcccctcagccacgctctgtgcccttctgagaacaggctgatatgcccaagatagtcctgaatggtgtgaccgtagacttccctttccagccctacaaatgccaacaggagtacatgaccaaggtcctggaatgtctgcagcagaaggtgaatggcatcctggagagccctacgggtacagggaagacgctgtgcctgctgtgcaccacgctggcctggcgagaacacctccgagacggcatctctgcccgcaagattgccgagagggcgcaaggagagcttttcccggatcgggccttgtcatcctggggcaacgctgctgctgctgctggagaccccatagcttgctacacggacatcccaaagattatttacgcctccaggacccactcgcaactcacacaggtcatcaacgagcttcggaacacctcctaccggcctaaggtgtgtgtgctgggctcccgggagcagctgtgcatccatcctgaggtgaagaaacaagagagtaaccatctacagatccacttgtgccgtaagaaggtggcaagtcgctcctgtcatttctacaacaacgtagaagaaaaaagcctggagcaggagctggccagccccatcctggacattgaggacttggtcaagagcggaagcaagcacagggtgtgcccttactacctgtcccggaacctgaagcagcaagccgacatcatattcatgccgtacaattacttgttggatgccaagagccgcagagcacacaacattgacctgaaggggacagtcgtgatctttgacgaagctcacaacgtggagaagatgtgtgaagaatcggcatcctttgacctgactccccatgacctggcttcaggactggacgtcatagaccaggtgctggaggagcagaccaaggcagcgcagcagggtgagccccacccggagttcagcgcggactcccccagcccagggctgaacatggagctggaagacattgcaaagctgaagatgatcctgctgcgcctggagggggccatcgatgctgttgagctgcctggagacgacagcggtgtcaccaagccagggagctacatctttgagctgtttgctgaagcccagatcacgtttcagaccaagggctgcatcctggactcgctggaccagatcatccagcacctggcaggacgtgctggagtgttcaccaacacggccggactgcagaagctggcggacattatccagattgtgttcagtgtggacccctccgagggcagccctggttccccagcagggctgggggccttacagtcctataaggtgcacatccatcctgatgctggtcaccggaggacggctcagcggtctgatgcctggagcaccactgcagccagaaagcgagggaaggtgctgagctactggtgcttcagtcccggccacagcatgcacgagctggtccgccagggcgtccgctccctcatccttaccagcggcacgctggccccggtgtcctcctttgctctggagatgcagatccctttcccagtctgcctggagaacccacacatcatcgacaagcaccagatctgggtgggggtcgtccccagaggccccgatggagcccagttgagctccgcgtttgacagacggttttccgaggagtgcttatcctccctggggaaggctctgggcaacatcgcccgcgtggtgccctatgggctcctgatcttcttcccttcctatcctgtcatggagaagagcctggagttctggcgggcccgcgacttggccaggaagatggaggcgctgaagccgctgtttgtggagcccaggagcaaaggcagcttctccgagaccatcagtgcttactatgcaagggttgccgcccctgggtccaccggcgccaccttcctggcggtctgccggggcaaggccagcgaggggctggacttctcagacacgaatggccgtggtgtgattgtcacgggcctcccgtaccccccacgcatggacccccgggttgtcctcaagatgcagttcctggatgagatgaagggccagggtggggctgggggccagttcctctctgggcaggagtggtaccggcagcaggcgtccagggctgtgaaccaggccatcgggcgagtgatccggcaccgccaggactacggagctgtcttcctctgtgaccacaggttcgcctttgccgacgcaagagcccaactgccctcctgggtgcgtccccacgtcagggtgtatgacaactttggccatgtcatccgagacgtggcccagttcttccgtgttgccgagcgaactatgccagcgccggccccccgggctacagcacccagtgtgcgtggagaagatgctgtcagcgaggccaagtcgcctggccccttcttctccaccaggaaagctaagagtctggacctgcatgtccccagcctgaagcagaggtcctcagggtcaccagctgccggggaccccgagagtagcctgtgtgtggagtatgagcaggagccagttcctgcccggcagaggcccagggggctgctggccgccctggagcacagcgaacagcgggcggggagccctggcgaggagcaggcccacagctgctccaccctgtccctcctgtctgagaagaggccggcagaagaaccgcgaggagggaggaagaagatccggctggtcagccacccggaggagcccgtggctggtgcacagacggacagggccaagctcttcatggtggccgtgaagcaggagttgagccaagccaactttgccaccttcacccaggccctgcaggactacaagggttccgatgacttcgccgccctggccgcctgtctcggccccctctttgctgaggaccccaagaagcacaacctgctccaaggcttctaccagtttgtgcggccccaccataagcagcagtttgaggaggtctgtatccagctgacaggacgaggctgtggctatcggcctgagcacagcattccccgaaggcagcgggcacagccggtcctggaccccactggaagaacggcgccggatcccaagctgaccgtgtccacggctgcagcccagcagctggacccccaagagcacctgaaccagggcaggccccacctgtcgcccaggccacccccaacaggagaccctggcagccaaccacagtgggggtctggagtgcccagagcagggaagcagggccagcacgccgtgagcgcctacctggctgatgcccgcagggccctggggtccgcgggctgtagccaactcttggcagcgctgacagcctataagcaagacgacgacctcgacaaggtgctggctgtgttggccgccctgaccactgcaaagccagaggacttccccctgctgcacaggttcagcatgtttgtgcgtccacaccacaagcagcgcttctcacagacgtgcacagacctgaccggccggccctacccgggcatggagccaccgggaccccaggaggagaggcttgccgtgcctcctgtgcttacccacagggctccccaaccaggcccctcacggtccgagaagaccgggaagacccagagcaagatctcgtccttccttagacagaggccagcagggactgtgggggcgggcggtgaggatgcaggtcccagccagtcctcaggacctccccacgggcctgcagcatctgagtggggcctctaggatgtgcccagcctgccacaccgcctccaggaagcagagcgtcatgcaggtcttctggccagagccccagtgagtgcccacggaggcccccagcacacccaacgtggcttgatcacctgcctgtccagctctggtgggccaagaacccacccaacagaataggccagcccatgccagccggcttggcccgctgcaggcctcaggcaggcggggcccatggttggtccctgcggtgggaccggatctgggcctgcctctgagaagccctgagctaccttggggtctggggtgggtttctgggaaagtgcttccccagaacttccctggctcctggcctgtgagtggtgccacaggggcaccccagctgagcccctcaccgggaaggaggagacccccgtgggcacgtgtccacttttaatcaggggacagggctctctaataaagctgctggcagtgcccagg

SEQ ID NO: 331365 - DNA, 2592 bp, Homo sapiens
ccgagtctcagataggcagcctgcagttccttcaccacaacaggcacatggggctgggtgccagtgagtgctggggcttctccgagcactatctcacacccaggagcgtgggcacgcatggcattcgcatgtgccgtcagtggacattaaacacagccatgaagaagccacgaagaagtgctgcctgccggccgtgcgcggtcacgcagcgccaactccctcctggggccttctggggccttctggggcatgggagctggggccgcctgagacaaacatccgtgacgctgggctgaccccacagaacggtgcgggcctcgctcttggagtcagccctgctgccagccagtgccgggtgctggggactcagggaggcccgccgggaccactgcgggacagtgagccgagcagaagctggaacgcaggagaggaaggagagggggcggtcagggctctcaggagccgggtcctgggcaaggcgcagccgttttcaaattttcaggaaagcggtcggctcacactcgagcagtaaaaagatgcctctggggaggaggcccgtgcagctctccgggcaatggtggtggctcggcctagagaggcggtagtggaacgcagaccctggtgggggaatgacatcaagggaggagacgggcgggaccccagatttctgcctgtgggcgatggaagtgaggttcactggccagcggagccggacacagaacgcgcaaaacgccgtgtaggcctggaggagccgaagagcaggcggaccccctccgcgggggaacagtttccgccgggagcacaaagcaacggaccggaagtggggggcggaagtgcagtgggctcagcgccgactgcgcgcctctgcccgcgaaaactctgagctggctgacagctggggacgggtggcggccctcgactggagtcggttgagttcctgagggaccccggttctggaaggttcgccgcggagacaagtgagcagtctgtgccatagggattctcgaagagaacagcgttgtgtcccagtgcacatgctcgcatcgcttaccaggagtgcccgagaccctaagatgttcggagtggttttttcgcacagacccgaatagcctgcccctcagccacgctctgtgcccttctgagaacaggctgatatgcccaagatagtcctgaatggtgtgaccgtagacttccctttccagccctacaaatgccaacaggagtacatgaccaaggtcctggaatgtctgcagcagaaggtgaatggcatcctggagagccctacgggtacagggaagacgctgtgcctgctgtgcaccacgctggcctggcgagaacacctccgagacggcatctctgcccgcaagattgccgagagggcgcaaggagagcttttcccggatcgggccttgtcatcctggggcaacgctgctgctgctgctggagaccccatagcttgctacacggacatcccaaagattatttacgcctccaggacccactcgcaactcacacaggtcatcaacgagcttcggaacacctcctaccgctccctcctacgcccgggccacgtttcagttatgctcacttcctctgaccgccgaggctcctgcgtgtctccatacagctcacgctgcagggccacgctgtgggtgttggagacagctcctcctcgacccacggtgctctctcccaccaggcctaaggtgtgtgtgctgggctcccgggagcagctgtgcatccatcctgaggtgaagaaacaagagagtaaccatctacagatccacttgtgccgtaagaaggtggcaagtcgctcctgtcatttctacaacaacgtagaagaaaaaagcctggagcaggagctggccagccccatcctggacattgaggacttggtcaagagcggaagcaagcacagggtgtgcccttactacctgtcccggaacctgaagcagcaagccgacatcatattcatgccgtacaattacttgttggatgccaagagccgcagagcacacaacattgacctgaaggggacagtcgtgatctttgacgaagctcacaacgtggagaagatgtgtgaagaatcggcatcctttgacctgactccccatgacctggcttcaggactggacgtcatagaccaggtgctggaggagcagaccaaggcagcgcagcagggtgagccccacccggagttcagcgcggactcccccagcccagggtgtccgcaatgttgccagtgtctgtctgcagattggctacccaactgttgcatcagtaccccattctatcatcaacgggtacaaacgagtcctggccttgtctgtggagacggattacaccttcccacttgctgaaaaggtcaaggccttcttggctgatccatctgcctttgtggctgctgcccctgtggctgctgccaccacagctgctcctgctgctgctgcagccccagctaaggttgaagccaaggaagagtcggaggagtcggacgaggatatgggatttggtctctttgactaatcaccaaaaagcaaccaacttagccagttttatttgcaaaacaaggaaataaaggcttacttcttt

SEQ ID NO: 331366 - DNA, 458 bp, Homo sapiens
tcctttggctgctgctctaagtagccgctggtggatgactcagcttctgccagccctcgggtgcctggaggatgagggactgcacacagtgctcacccgcgttggctcctgagcccctgcagattgtgttcagtgtggacccctccgagggcagccctggttccccagcagggctgggggccttacagtcctataaggtgcacatccatcctgatgctggtcaccggaggacggctcagcggtctgatgcctggagcaccactgcagccagaaagcgaggtacagacctgggcccacacgctccccgcccgcccgggtgcagtgcccggcaccaccatgccacaggctaggcacatgcccagccgtggatctcctgcccccatgggcctggccaccttctccatatccaggccaatccagagcattctcctcactgtccctctgaagattggagttac

SEQ ID NO: 331367 - DNA, 6986 bp, Homo sapiens
ccgagtctcagataggcagcctgcagttccttcaccacaacaggcacatggggctgggtgccagtgagtgctggggcttctccgagcactatctcacacccaggagcgtgggcacgcatggcattcgcatgtgccgtcagtggacattaaacacagccatgaagaagccacgaagaagtgctgcctgccggccgtgcgcggtcacgcagcgccaactccctcctggggccttctggggccttctggggcatgggagctggggccgcctgagacaaacatccgtgacgctgggctgaccccacagaacggtgcgggcctcgctcttggagtcagccctgctgccagccagtgccgggtgctggggactcagggaggcccgccgggaccactgcgggacagtgagccgagcagaagctggaacgcaggagaggaaggagagggggcggtcagggctctcaggagccgggtcctgggcaaggcgcagccgttttcaaattttcaggaaagcggtcggctcacactcgagcagtaaaaagatgcctctggggaggaggcccgtgcagctctccgggcaatggtggtggctcggcctagagaggcggtagtggaacgcagaccctggtgggggaatgacatcaagggaggagacgggcgggaccccagatttctgcctgtgggcgatggaagtgaggttcactggccagcggagccggacacagaacgcgcaaaacgccgtgtaggcctggaggagccgaagagcaggcggaccccctccgcgggggaacagtttccgccgggagcacaaagcaacggaccggaagtggggggcggaagtgcagtgggctcagcgccgactgcgcgcctctgcccgcgaaaactctgagctggctgacagctggggacgggtggcggccctcgactggagtcggttgagttcctgagggaccccggttctggaaggttcgccgcggagacaagtgagcagtctgtgccatagggattctcgaagagaacagcgttgtgtcccagtgcacatgctcgcatcgcttaccaggagtgcccgagaccctaagatgttcggagtggttttttcgcacagacccgaatagcctgcccctcagccacgctctgtgcccttctgagaacaggctgatatgcccaagatagtcctgaatggtgtgaccgtagacttccctttccagccctacaaatgccaacaggagtacatgaccaaggtcctggaatgtctgcagcagaaggtgaatggcatcctggagagccctacgggtacagggaagacgctgtgcctgctgtgcaccacgctggcctggcgagaacacctccgagacggcatctctgcccgcaagattgccgagagggcgcaaggagagcttttcccggatcgggccttgtcatcctggggcaacgctgctgctgctgctggagaccccatagcttgctacacggacatcccaaagattatttacgcctccaggacccactcgcaactcacacaggtcatcaacgagcttcggaacacctcctaccggcctaaggtgtgtgtgctgggctcccgggagcagctgtgcatccatcctgaggtgaagaaacaagagagtaaccatctacagatccacttgtgccgtaagaaggtggcaagtcgctcctgtcatttctacaacaacgtagaagaaaaaagcctggagcaggagctggccagccccatcctggacattgaggacttggtcaagagcggaagcaagcacagggtgtgcccttactacctgtcccggaacctgaagcagcaagccgacatcatattcatgccgtacaattacttgttggatgccaagagccgcagagcacacaacattgacctgaaggggacagtcgtgatctttgacgaagctcacaacgtggagaagatgtgtgaagaatcggcatcctttgacctgactccccatgacctggcttcaggactggacgtcatagaccaggtgctggaggagcagaccaaggcagcgcagcagggtgagccccacccggagttcagcgcggactcccccagcccagggctgaacatggagctggaagacattgcaaagctgaagatgatcctgctgcgcctggagggggccatcgatgctgttgagctgcctggagacgacagcggtgtcaccaagccagggagctacatctttgagctgtttgctgaagcccagatcacgtttcagaccaagggctgcatcctggactcgctggaccagatcatccagcacctggcaggacgtgctggagtgttcaccaacacggccggactgcagaagctggcggacattatccagattgtgttcagtgtggacccctccgagggcagccctggttccccagcagggctgggggccttacagtcctataaggtgcacatccatcctgatgctggtcaccggaggacggctcagcggtctgatgcctggagcaccactgcagccagaaagcgagggaaggtgctgagctactggtgcttcagtcccggccacagcatgcacgagctggtccgccagggcgtccgctccctcatccttaccagcggcacgctggccccggtgtcctcctttgctctggagatgcagatccctttcccagtctgcctggagaacccacacatcatcgacaagcaccagatctgggtgggggtcgtccccagaggccccgatggagcccagttgagctccgcgtttgacagacggttttccgaggagtgcttatcctccctggggaaggctctgggcaacatcgcccgcgtggtgccctatgggctcctgatcttcttcccttcctatcctgtcatggagaagagcctggagttctggcgggcccgcgacttggccaggaagatggaggcgctgaagccgctgtttgtggagcccaggagcaaaggcagcttctccgagaccatcagtgcttactatgcaagggttgccgcccctgggtccaccggcgccaccttcctggcggtctgccggggcaaggccagcgaggggctggacttctcagacacgaatggccgtggtgtgattgtcacgggcctcccgtaccccccacgcatggacccccgggttgtcctcaagatgcagttcctggatgagatgaagggccagggtggggctgggggccagttcctctctgggcaggagtggtaccggcagcaggcgtccagggctgtgaaccaggccatcgggcgagtgatccggcaccgccaggactacggagctgtcttcctctgtgaccacaggttcgcctttgccgacgcaagagcccaactgccctcctgggtgcgtccccacgtcagggtgtatgacaactttggccatgtcatccgagacgtggcccagttcttccgtgttgccgagcgaactatgccagcgccggccccccgggctacagcacccagtgtgcgtggagaagatgctgtcagcgaggccaagtcgcctggccccttcttctccaccaggaaagctaagagtctggacctgcatgtccccagcctgaagcagaggtcctcagggtcaccagctgccggggaccccgagagtagcctgtgtgtggagtatgagcaggagccagttcctgcccggcagaggcccagggggctgctggccgccctggagcacagcgaacagcgggcggggagccctggcgaggagcaggcccacagctgctccaccctgtccctcctgtctgagaagaggccggcagaagaaccgcgaggagggaggaagaagatccggctggtcagccacccggaggagcccgtggctggtgcacagacggacagggccaagctcttcatggtggccgtgaagcaggagttgagccaagccaactttgccaccttcacccaggccctgcaggactacaagggttccgatgacttcgccgccctggccgcctgtctcggccccctctttgctgaggaccccaagaagcacaacctgctccaaggcttctaccagtttgtgcggccccaccataagcagcagtttgaggaggtctgtatccagctgacaggacgaggctgtggctatcggcctgagcacagcattccccgaaggcagcgggcacagccggtcctggaccccactggaagaacggcgccggatcccaagctgaccgtgtccacggctgcagcccagcagctggacccccaagagcacctgaaccagggcaggccccacctgtcgcccaggccacccccaacaggagaccctggcagccaaccacagtgggggtctggagtgcccagagcagggaagcagggccagcacgccgtgagcgcctacctggctgatgcccgcagggccctggggtccgcgggctgtagccaactcttggcagcgctgacagcctataagcaagacgacgacctcgacaaggtgctggctgtgttggccgccctgaccactgcaaagccagaggacttccccctgctgcacaggttcagcatgtttgtgcgtccacaccacaagcagcgcttctcacagacgtgcacagacctgaccggccggccctacccgggcatggagccaccgggaccccaggaggagaggcttgccgtgcctcctgtgcttacccacagggctccccaaccaggcccctcacggtccgagaagaccgggaagacccagagcaagatctcgtccttccttagacagaggccagcagggactgtgggggcgggcggtgaggatgcaggtcccagccagtcctcaggacctccccacgggcctgcagcatctgagtggggtgagcctcatgggagagacatcgctgggcagcaggccacgggagctccgggcgggcccctctcagcaggctgtgtgtgccagggctgtggggcagaggacgtggtgcccttccagtgccctgcctgtgacttccagcgctgccaagcctgctggcaacggcaccttcaggcctctaggatgtgcccagcctgccacaccgcctccaggaagcagagcgtcatgcaggtcttctggccagagccccagtgagtgcccacggaggcccccagcacacccaacgtggcttgatcacctgcctgtccagctctggtgggccaagaacccacccaacagaataggccagcccatgccagccggcttggcccgctgcaggcctcaggcaggcggggcccatggttggtccctgcggtgggaccggatctgggcctgcctctgagaagccctgagctaccttggggtctggggtgggtttctgggaaagtgcttccccagaacttccctggctcctggcctgtgagtggtgccacaggggcaccccagctgagcccctcaccgggaaggaggagacccccgtgggcacgtgtccacttttaatcaggggacagggctctctaataaagctgctggcagtgcccaggacggtgtcttcgtggcctgggcttggtggtgggagttgagggacagggagttggcagaggcccctcccagcctgccatgtgacactgtacttcctccacggtgggctcagccctgccctcatcctcacagccgcagccaagctgcagttggtaggggatccaccgacacaccaggctgcctgggctggtctctgggttgggagctgccccaggtgctgaggagggcagctccctggctggtgaggcccctcccagaaccacccttggactgagctctggggagggatggtaccaggtgggtgaggggggctgcctggggagggaggggttcctatggggcgtggcgaggctggcccagccctctccccgcccatatatgtagggcagcagcaggatgggcttctggacttgggcggcccctccgcaggcggaccgggggcaaaggaggtggcatgtcggtcaggcacagcagggtcctgtgtccgcgctgagccgcgctctccctgctccagcaaggaccatgagggcgctggaggggccaggcctgtcgctgctgtgcctggtgttggcgctgcctgccctgctgccggtgccggctgtacgcggagtggcagaaacacccacctacccctggcgggacgcagagacaggggagcggctggtgtgcgcccagtgccccccaggcacctttgtgcagcggccgtgccgccgagacagccccacgacgtgtggcccgtgtccaccgcgccactacacgcagttctggaactacctggagcgctgccgctactgcaacgtcctctgcggggagcgtgaggaggaggcacgggcttgccacgccacccacaaccgtgcctgccgctgccgcaccggcttcttcgcgcacgctggtttctgcttggagcacgcatcgtgtccacctggtgccggcgtgattgccccgggcacccccagccagaacacgcagtgccagccgtgccccccaggcaccttctcagccagcagctccagctcagagcagtgccagccccaccgcaactgcacggccctgggcctggccctcaatgtgccaggctcttcctcccatgacaccctgtgcaccagctgcactggcttccccctcagcaccagggtaccaggagctgaggagtgtgagcgtgccgtcatcgactttgtggctttccaggacatctccatcaagaggctgcagcggctgctgcaggccctcgaggccccggagggctggggtccgacaccaagggcgggccgcgcggccttgcagctgaagctgcgtcggcggctcacggagctcctgggggcgcaggacggggcgctgctggtgcggctgctgcaggcgctgcgcgtggccaggatgcccgggctggagcggagcgtccgtgagcgcttcctccctgtgcactgatcctggccccctcttatttattctacatccttggcaccccacttgcactgaaagaggcttttttttaaatagaagaaatgaggtttcttaaagcttatttttataaagctttttcat

SEQ ID NO: 331368 - DNA, 5605 bp, Homo sapiens
aactggagaccgcaagaggagcaggtttttatctgaggttatcctagtcatttttgagacagggtgtcactctgtcacccaggcagcggttcaacagcgccatctctgctcactgcaacctccacctcctgggctcaagccatcctcccacctcagcctcccgagtagccgggactacaggtgcacaccaccacgcccggctaatttttgtattttttgtagaggcggggtttcccagcgttgcccaggctggtcttgaacccctgagctcaagtgatctgcccaccttggcctcccaaagtgctgggattacaggtgtgagccaccgcgcccggcctgaaacaatcgtttctaaatattggtgtgggccacacagtcatgtttggacctacttgtggccttttacagaccccaggccaaggctttgggaacttggctgtcagcctcctgtgccttctgcacccccaccccatttctgctttctggaacccccgatcctgtcctgttctgtggtgattcgggtgtgcttgggctctaggagaagatgtgtgaagaatcggcatcctttgacctgactccccatgacctggcttcaggactggacgtcatagaccaggtgctggaggagcagaccaaggcagcgcagcagggtgagccccacccggagttcagcgcggactcccccagcccagggctgaacatggagctggaagacattgcaaagctgaagatgatcctgctgcgcctggagggggccatcgatgctgttgagctgcctggagacgacagcggtgtcaccaagccagggagctacatctttgagctgtttgctgaagcccagatcacgtttcagaccaagggctgcatcctggactcgctggaccagatcatccagcacctggcaggacgtgctggagtgttcaccaacacggccggactgcagaagctggcggacattatccagattgtgttcagtgtggacccctccgagggcagccctggttccccagcagggctgggggccttacagtcctataaggtgcacatccatcctgatgctggtcaccggaggacggctcagcggtctgatgcctggagcaccactgcagccagaaagcgagggaaggtgctgagctactggtgcttcagtcccggccacagcatgcacgagctggtccgccagggcgtccgctccctcatccttaccagcggcacgctggccccggtgtcctcctttgctctggagatgcagatccctttcccagtctgcctggagaacccacacatcatcgacaagcaccagatctgggtgggggtcgtccccagaggccccgatggagcccagttgagctccgcgtttgacagacggttttccgaggagtgcttatcctccctggggaaggctctgggcaacatcgcccgcgtggtgccctatgggctcctgatcttcttcccttcctatcctgtcatggagaagagcctggagttctggcgggcccgcgacttggccaggaagatggaggcgctgaagccgctgtttgtggagcccaggagcaaaggcagcttctccgagaccatcagtgcttactatgcaagggttgccgcccctgggtccaccggcgccaccttcctggcggtctgccggggcaaggccagcgaggggctggacttctcagacacgaatggccgtggtgtgattgtcacgggcctcccgtaccccccacgcatggacccccgggttgtcctcaagatgcagttcctggatgagatgaagggccagggtggggctgggggccagttcctctctgggcaggagtggtaccggcagcaggcgtccagggctgtgaaccaggccatcgggcgagtgatccggcaccgccaggactacggagctgtcttcctctgtgaccacaggttcgcctttgccgacgcaagagcccaactgccctcctgggtgcgtccccacgtcagggtgtatgacaactttggccatgtcatccgagacgtggcccagttcttccgtgttgccgagcgaactatgccagcgccggccccccgggctacagcacccagtgtgcgtggagaagatgctgtcagcgaggccaagtcgcctggccccttcttctccaccaggaaagctaagagtctggacctgcatgtccccagcctgaagcagaggtcctcagggtcaccagctgccggggaccccgagagtagcctgtgtgtggagtatgagcaggagccagttcctgcccggcagaggcccagggggctgctggccgccctggagcacagcgaacagcgggcggggagccctggcgaggagcaggcccacagctgctccaccctgtccctcctgtctgagaagaggccggcagaagaaccgcgaggagggaggaagaagatccggctggtcagccacccggaggagcccgtggctggtgcacagacggacagggccaagctcttcatggtggccgtgaagcaggagttgagccaagccaactttgccaccttcacccaggccctgcaggactacaagggttccgatgacttcgccgccctggccgcctgtctcggccccctctttgctgaggaccccaagaagcacaacctgctccaaggcttctaccagtttgtgcggccccaccataagcagcagtttgaggaggtctgtatccagctgacaggacgaggctgtggctatcggcctgagcacagcattccccgaaggcagcgggcacagccggtcctggaccccactggaagaacggcgccggatcccaagctgaccgtgtccacggctgcagcccagcagctggacccccaagagcacctgaaccagggcaggccccacctgtcgcccaggccacccccaacaggagaccctggcagccaaccacagtgggggtctggagtgcccagagcagggaagcagggccagcacgccgtgagcgcctacctggctgatgcccgcagggccctggggtccgcgggctgtagccaactcttggcagcgctgacagcctataagcaagacgacgacctcgacaaggtgctggctgtgttggccgccctgaccactgcaaagccagaggacttccccctgctgcacaggttcagcatgtttgtgcgtccacaccacaagcagcgcttctcacagacgtgcacagacctgaccggccggccctacccgggcatggagccaccgggaccccaggaggagaggcttgccgtgcctcctgtgcttacccacagggctccccaaccaggcccctcacggtccgagaagaccgggaagacccagagcaagatctcgtccttccttagacagaggccagcagggactgtgggggcgggcggtgaggatgcaggtcccagccagtcctcaggacctccccacgggcctgcagcatctgagtggggtgagcctcatgggagagacatcgctgggcagcaggccacgggagctccgggcgggcccctctcagcaggctgtgtgtgccagggctgtggggcagaggacgtggtgcccttccagtgccctgcctgtgacttccagcgctgccaagcctgctggcaacggcaccttcaggcctctaggatgtgcccagcctgccacaccgcctccaggaagcagagcgtcatgcaggtcttctggccagagccccagtgagtgcccacggaggcccccagcacacccaacgtggcttgatcacctgcctgtccagctctggtgggccaagaacccacccaacagaataggccagcccatgccagccggcttggcccgctgcaggcctcaggcaggcggggcccatggttggtccctgcggtgggaccggatctgggcctgcctctgagaagccctgagctaccttggggtctggggtgggtttctgggaaagtgcttccccagaacttccctggctcctggcctgtgagtggtgccacaggggcaccccagctgagcccctcaccgggaaggaggagacccccgtgggcacgtgtccacttttaatcaggggacagggctctctaataaagctgctggcagtgcccaggacggtgtcttcgtggcctgggcttggtggtgggagttgagggacagggagttggcagaggcccctcccagcctgccatgtgacactgtacttcctccacggtgggctcagccctgccctcatcctcacagccgcagccaagctgcagttggtaggggatccaccgacacaccaggctgcctgggctggtctctgggttgggagctgccccaggtgctgaggagggcagctccctggctggtgaggcccctcccagaaccacccttggactgagctctggggagggatggtaccaggtgggtgaggggggctgcctggggagggaggggttcctatggggcgtggcgaggctggcccagccctctccccgcccatatatgtagggcagcagcaggatgggcttctggacttgggcggcccctccgcaggcggaccgggggcaaaggaggtggcatgtcggtcaggcacagcagggtcctgtgtccgcgctgagccgcgctctccctgctccagcaaggaccatgagggcgctggaggggccaggcctgtcgctgctgtgcctggtgttggcgctgcctgccctgctgccggtgccggctgtacgcggagtggcagaaacacccacctacccctggcgggacgcagagacaggggagcggctggtgtgcgcccagtgccccccaggcacctttgtgcagcggccgtgccgccgagacagccccacgacgtgtggcccgtgtccaccgcgccactacacgcagttctggaactacctggagcgctgccgctactgcaacgtcctctgcggggagcgtgaggaggaggcacgggcttgccacgccacccacaaccgtgcctgccgctgccgcaccggcttcttcgcgcacgctggtttctgcttggagcacgcatcgtgtccacctggtgccggcgtgattgccccgggcacccccagccagaacacgcagtgccagccgtgccccccaggcaccttctcagccagcagctccagctcagagcagtgccagccccaccgcaactgcacggccctgggcctggccctcaatgtgccaggctcttcctcccatgacaccctgtgcaccagctgcactggcttccccctcagcaccagggtaccaggagctgaggagtgtgagcgtgccgtcatcgactttgtggctttccaggacatctccatcaagaggctgcagcggctgctgcaggccctcgaggccccggagggctggggtccgacaccaagggcgggccgcgcggccttgcagctgaagctgcgtcggcggctcacggagctcctgggggcgcaggacggggcgctgctggtgcggctgctgcaggcgctgcgcgtggccaggatgcccgggctggagcggagcgtccgtgagcgcttcctccctgtgcactgatcctggccccctcttatttattctacatccttggcaccccacttgcactgaaagaggcttttttttaaatagaagaaatgaggtttcttaaagcttatttttataaagctttttcat

SEQ ID NO: 331369 - DNA, 3850 bp, Homo sapiens
ggactctccttccccacatgaggccccgtctcctccagagcctctccggctactcggggtcagcgtggggcccctgcagcagatgagggtcttcacttcggtgaactgaacccttgaagcggctgtgggcagggcagcagggctatggccaccccccaggttcgcctttgccgacgcaagagcccaactgccctcctgggtgcgtccccacgtcagggtgtatgacaactttggccatgtcatccgagacgtggcccagttcttccgtgttgccgagcgaactatgccagcgccggccccccgggctacagcacccagtgtgcgtggagaagatgctgtcagcgaggccaagtcgcctggccccttcttctccaccaggaaagctaagagtctggacctgcatgtccccagcctgaagcagaggtcctcagggtcaccagctgccggggaccccgagagtagcctgtgtgtggagtatgagcaggagccagttcctgcccggcagaggcccagggggctgctggccgccctggagcacagcgaacagcgggcggggagccctggcgaggagcaggcccacagctgctccaccctgtccctcctgtctgagaagaggccggcagaagaaccgcgaggagggaggaagaagatccggctggtcagccacccggaggagcccgtggctggtgcacagacggacagggccaagctcttcatggtggccgtgaagcaggagttgagccaagccaactttgccaccttcacccaggccctgcaggactacaagggttccgatgacttcgccgccctggccgcctgtctcggccccctctttgctgaggaccccaagaagcacaacctgctccaaggcttctaccagtttgtgcggccccaccataagcagcagtttgaggaggtctgtatccagctgacaggacgaggctgtggctatcggcctgagcacagcattccccgaaggcagcgggcacagccggtcctggaccccactggaagaacggcgccggatcccaagctgaccgtgtccacggctgcagcccagcagctggacccccaagagcacctgaaccagggcaggccccacctgtcgcccaggccacccccaacaggagaccctggcagccaaccacagtgggggtctggagtgcccagagcagggaagcagggccagcacgccgtgagcgcctacctggctgatgcccgcagggccctggggtccgcgggctgtagccaactcttggcagcgctgacagcctataagcaagacgacgacctcgacaaggtgctggctgtgttggccgccctgaccactgcaaagccagaggacttccccctgctgcacaggttcagcatgtttgtgcgtccacaccacaagcagcgcttctcacagacgtgcacagacctgaccggccggccctacccgggcatggagccaccgggaccccaggaggagaggcttgccgtgcctcctgtgcttacccacagggctccccaaccaggcccctcacggtccgagaagaccgggaagacccagagcaagatctcgtccttccttagacagaggccagcagggactgtgggggcgggcggtgaggatgcaggtcccagccagtcctcaggacctccccacgggcctgcagcatctgagtggggtgagcctcatgggagagacatcgctgggcagcaggccacgggagctccgggcgggcccctctcagcaggctgtgtgtgccagggctgtggggcagaggacgtggtgcccttccagtgccctgcctgtgacttccagcgctgccaagcctgctggcaacggcaccttcaggcctctaggatgtgcccagcctgccacaccgcctccaggaagcagagcgtcatgcaggtcttctggccagagccccagtgagtgcccacggaggcccccagcacacccaacgtggcttgatcacctgcctgtccagctctggtgggccaagaacccacccaacagaataggccagcccatgccagccggcttggcccgctgcaggcctcaggcaggcggggcccatggttggtccctgcggtgggaccggatctgggcctgcctctgagaagccctgagctaccttggggtctggggtgggtttctgggaaagtgcttccccagaacttccctggctcctggcctgtgagtggtgccacaggggcaccccagctgagcccctcaccgggaaggaggagacccccgtgggcacgtgtccacttttaatcaggggacagggctctctaataaagctgctggcagtgcccaggacggtgtcttcgtggcctgggcttggtggtgggagttgagggacagggagttggcagaggcccctcccagcctgccatgtgacactgtacttcctccacggtgggctcagccctgccctcatcctcacagccgcagccaagctgcagttggtaggggatccaccgacacaccaggctgcctgggctggtctctgggttgggagctgccccaggtgctgaggagggcagctccctggctggtgaggcccctcccagaaccacccttggactgagctctggggagggatggtaccaggtgggtgaggggggctgcctggggagggaggggttcctatggggcgtggcgaggctggcccagccctctccccgcccatatatgtagggcagcagcaggatgggcttctggacttgggcggcccctccgcaggcggaccgggggcaaaggaggtggcatgtcggtcaggcacagcagggtcctgtgtccgcgctgagccgcgctctccctgctccagcaaggaccatgagggcgctggaggggccaggcctgtcgctgctgtgcctggtgttggcgctgcctgccctgctgccggtgccggctgtacgcggagtggcagaaacacccacctacccctggcgggacgcagagacaggggagcggctggtgtgcgcccagtgccccccaggcacctttgtgcagcggccgtgccgccgagacagccccacgacgtgtggcccgtgtccaccgcgccactacacgcagttctggaactacctggagcgctgccgctactgcaacgtcctctgcggggagcgtgaggaggaggcacgggcttgccacgccacccacaaccgtgcctgccgctgccgcaccggcttcttcgcgcacgctggtttctgcttggagcacgcatcgtgtccacctggtgccggcgtgattgccccgggcacccccagccagaacacgcagtgccagccgtgccccccaggcaccttctcagccagcagctccagctcagagcagtgccagccccaccgcaactgcacggccctgggcctggccctcaatgtgccaggctcttcctcccatgacaccctgtgcaccagctgcactggcttccccctcagcaccagggtaccaggagctgaggagtgtgagcgtgccgtcatcgactttgtggctttccaggacatctccatcaagaggctgcagcggctgctgcaggccctcgaggccccggagggctggggtccgacaccaagggcgggccgcgcggccttgcagctgaagctgcgtcggcggctcacggagctcctgggggcgcaggacggggcgctgctggtgcggctgctgcaggcgctgcgcgtggccaggatgcccgggctggagcggagcgtccgtgagcgcttcctccctgtgcactgatcctggccccctcttatttattctacatccttggcaccccacttgcactgaaagaggcttttttttaaatagaagaaatgaggtttcttaaagcttatttttataaagctttttcat

SEQ ID NO: 331370 - DNA, 5911 bp, Homo sapiens
ccgagtctcagataggcagcctgcagttccttcaccacaacaggcacatggggctgggtgccagtgagtgctggggcttctccgagcactatctcacacccaggagcgtgggcacgcatggcattcgcatgtgccgtcagtggacattaaacacagccatgaagaagccacgaagaagtgctgcctgccggccgtgcgcggtcacgcagcgccaactccctcctggggccttctggggccttctggggcatgggagctggggccgcctgagacaaacatccgtgacgctgggctgaccccacagaacggtgcgggcctcgctcttggagtcagccctgctgccagccagtgccgggtgctggggactcagggaggcccgccgggaccactgcgggacagtgagccgagcagaagctggaacgcaggagaggaaggagagggggcggtcagggctctcaggagccgggtcctgggcaaggcgcagccgttttcaaattttcaggaaagcggtcggctcacactcgagcagtaaaaagatgcctctggggaggaggcccgtgcagctctccgggcaatggtggtggctcggcctagagaggcggtagtggaacgcagaccctggtgggggaatgacatcaagggaggagacgggcgggaccccagatttctgcctgtgggcgatggaagtgaggttcactggccagcggagccggacacagaacgcgcaaaacgccgtgtaggcctggaggagccgaagagcaggcggaccccctccgcgggggaacagtttccgccgggagcacaaagcaacggaccggaagtggggggcggaagtgcagtgggctcagcgccgactgcgcgcctctgcccgcgaaaactctgagctggctgacagctggggacgggtggcggccctcgactggagtcggttgagttcctgagggaccccggttctggaaggttcgccgcggagacaagtgagcagtctgtgccatagggattctcgaagagaacagcgttgtgtcccagtgcacatgctcgcatcgcttaccaggagtgcccgagaccctaagatgttcggagtggttttttcgcacagacccgaatagcctgcccctcagccacgctctgtgcccttctgagaacaggctgatatgcccaagatagtcctgaatggtgtgaccgtagacttccctttccagccctacaaatgccaacaggagtacatgaccaaggtcctggaatgtctgcagcagaaggtgaatggcatcctggagagccctacgggtacagggaagacgctgtgcctgctgtgcaccacgctggcctggcgagaacacctccgagacggcatctctgcccgcaagattgccgagagggcgcaaggagagcttttcccggatcgggccttgtcatcctggggcaacgctgctgctgctgctggagaccccatagcttgctacacggacatcccaaagattatttacgcctccaggacccactcgcaactcacacaggtcatcaacgagcttcggaacacctcctaccggcctaaggtgtgtgtgctgggctcccgggagcagctgtgcatccatcctgaggtgaagaaacaagagagtaaccatctacagatccacttgtgccgtaagaaggtggcaagtcgctcctgtcatttctacaacaacgtagaagaaaaaagcctggagcaggagctggccagccccatcctggacattgaggacttggtcaagagcggaagcaagcacagggtgtgcccttactacctgtcccggaacctgaagcagcaagccgacatcatattcatgccgtacaattacttgttggatgccaagagccgcagagcacacaacattgacctgaaggggacagtcgtgatctttgacgaagctcacaacgtggagaagatgtgtgaagaatcggcatcctttgacctgactccccatgacctggcttcaggactggacgtcatagaccaggtgctggaggagcagaccaaggcagcgcagcagggtgagccccacccggagttcagcgcggactcccccagcccagggctgaacatggagctggaagacattgcaaagctgaagatgatcctgctgcgcctggagggggccatcgatgctgttgagctgcctggagacgacagcggtgtcaccaagccagggagctacatctttgagctgtttgctgaagcccagatcacgtttcagaccaagggctgcatcctggactcgctggaccagatcatccagcacctggcaggacgtgctggagtgttcaccaacacggccggactgcagaagctggcggacattatccagattgtgttcagtgtggacccctccgagggcagccctggttccccagcagggctgggggccttacagtcctataaggtgcacatccatcctgatgctggtcaccggaggacggctcagcggtctgatgcctggagcaccactgcagccagaaagcgagggaaggtgctgagctactggtgcttcagtcccggccacagcatgcacgagctggtccgccagggcgtccgctccctcatccttaccagcggcacgctggccccggtgtcctcctttgctctggagatgcagatccctttcccagtctgcctggagaacccacacatcatcgacaagcaccagatctgggtgggggtcgtccccagaggccccgatggagcccagttgagctccgcgtttgacagacggttttccgaggagtgcttatcctccctggggaaggctctgggcaacatcgcccgcgtggtgccctatgggctcctgatcttcttcccttcctatcctgtcatggagaagagcctggagttctggcgggcccgcgacttggccaggaagatggaggcgctgaagccgctgtttgtggagcccaggagcaaaggcagcttctccgagaccatcagtgcttactatgcaagggttgccgcccctgggtccaccggcgccaccttcctggcggtctgccggggcaaggccagcgaggggctggacttctcagacacgaatggccgtggtgtgattgtcacgggcctcccgtaccccccacgcatggacccccgggttgtcctcaagatgcagttcctggatgagatgaagggccagggtggggctgggggccagttcctctctgggcaggagtggtaccggcagcaggcgtccagggctgtgaaccaggccatcgggcgagtgatccggcaccgccaggactacggagctgtcttcctctgtgaccacaggttcgcctttgccgacgcaagagcccaactgccctcctgggtgcgtccccacgtcagggtgtatgacaactttggccatgtcatccgagacgtggcccagttcttccgtgttgccgagcgaactatgccagcgccggccccccgggctacagcacccagtgtgcgtggagaagatgctgtcagcgaggccaagtcgcctggccccttcttctccaccaggaaagctaagagtctggacctgcatgtccccagcctgaagcagaggtcctcagggtcaccagctgccggggaccccgagagtagcctgtgtgtggagtatgagcaggagccagttcctgcccggcagaggcccagggggctgctggccgccctggagcacagcgaacagcgggcggggagccctggcgaggagcaggcccacagctgctccaccctgtccctcctgtctgagaagaggccggcagaagaaccgcgaggagggaggaagaagatccggctggtcagccacccggaggagcccgtggctggtgcacagacggacagggccaagctcttcatggtggccgtgaagcaggagttgagccaagccaactttgccaccttcacccaggccctgcaggactacaagggttccgatgacttcgccgccctggccgcctgtctcggccccctctttgctgaggaccccaagaagcacaacctgctccaaggcttctaccagtttgtgcggccccaccataagcagcagtttgaggaggtctgtatccagctgacaggacgaggctgtggctatcggcctgagcacagcattccccgaaggcagcgggcacagccggtcctggaccccactggaagaacggcgccggatcccaagctgaccgtgtccacggctgcagcccagcagctggacccccaagagcacctgaaccagggcaggccccacctgtcgcccaggccacccccaacaggagaccctggcagccaaccacagtgggggtctggagtgcccagagcagggaagcagggccagcacgccgtgagcgcctacctggctgatgcccgcagggccctggggtccgcgggctgtagccaactcttggcagcgctgacagcctataagcaagacgacgacctcgacaaggtgctggctgtgttggccgccctgaccactgcaaagccagaggacttccccctgctgcacaggttcagcatgtttgtgcgtccacaccacaagcagcgcttctcacagacgtgcacagacctgaccggccggccctacccgggcatggagccaccgggaccccaggaggagaggcttgccgtgcctcctgtgcttacccacagggctccccaaccaggcccctcacggtccgagaagaccgggaagacccagagcaagatctcgtccttccttagacagaggccagcagggactgtgggggcgggcggtgaggatgcaggtcccagccagtcctcaggacctccccacgggcctgcagcatctgagtggggcctctaggatgtgcccagcctgccacaccgcctccaggaagcagagcgtcatgcaggtcttctggccagagccccacaaggaccatgagggcgctggaggggccaggcctgtcgctgctgtgcctggtgttggcgctgcctgccctgctgccggtgccggctgtacgcggagtggcagaaacacccacctacccctggcgggacgcagagacaggggagcggctggtgtgcgcccagtgccccccaggcacctttgtgcagcggccgtgccgccgagacagccccacgacgtgtggcccgtgtccaccgcgccactacacgcagttctggaactacctggagcgctgccgctactgcaacgtcctctgcggggagcgtgaggaggaggcacgggcttgccacgccacccacaaccgtgcctgccgctgccgcaccggcttcttcgcgcacgctggtttctgcttggagcacgcatcgtgtccacctggtgccggcgtgattgccccgggcacccccagccagaacacgcagtgccagccgtgccccccaggcaccttctcagccagcagctccagctcagagcagtgccagccccaccgcaactgcacggccctgggcctggccctcaatgtgccaggctcttcctcccatgacaccctgtgcaccagctgcactggcttccccctcagcaccagggtaccaggagctgaggagtgtgagcgtgccgtcatcgactttgtggctttccaggacatctccatcaagaggctgcagcggctgctgcaggccctcgaggccccggagggctggggtccgacaccaagggcgggccgcgcggccttgcagctgaagctgcgtcggcggctcacggagctcctgggggcgcaggacggggcgctgctggtgcggctgctgcaggcgctgcgcgtggccaggatgcccgggctggagcggagcgtccgtgagcgcttcctccctgtgcactgatcctggccccctcttatttattctacatccttggcaccccacttgcactgaaagaggcttttttttaaatagaagaaatgaggtttcttaaagcttatttttataaagctttttcat

SEQ ID NO: 331371 - DNA, 5499 bp, Homo sapiens
ccgagtctcagataggcagcctgcagttccttcaccacaacaggcacatggggctgggtgccagtgagtgctggggcttctccgagcactatctcacacccaggagcgtgggcacgcatggcattcgcatgtgccgtcagtggacattaaacacagccatgaagaagccacgaagaagtgctgcctgccggccgtgcgcggtcacgcagcgccaactccctcctggggccttctggggccttctggggcatgggagctggggccgcctgagacaaacatccgtgacgctgggctgaccccacagaacggtgcgggcctcgctcttggagtcagccctgctgccagccagtgccgggtgctggggactcagggaggcccgccgggaccactgcgggacagtgagccgagcagaagctggaacgcaggagaggaaggagagggggcggtcagggctctcaggagccgggtcctgggcaaggcgcagccgttttcaaattttcaggaaagcggtcggctcacactcgagcagtaaaaagatgcctctggggaggaggcccgtgcagctctccgggcaatggtggtggctcggcctagagaggcggtagtggaacgcagaccctggtgggggaatgacatcaagggaggagacgggcgggaccccagatttctgcctgtgggcgatggaagtgaggttcactggccagcggagccggacacagaacgcgcaaaacgccgtgtaggcctggaggagccgaagagcaggcggaccccctccgcgggggaacagtttccgccgggagcacaaagcaacggaccggaagtggggggcggaagtgcagtgggctcagcgccgactgcgcgcctctgcccgcgaaaactctgagctggctgacagctggggacgggtggcggccctcgactggagtcggttgagttcctgagggaccccggttctggaaggttcgccgcggagacaagtgagcagtctgtgccatagggattctcgaagagaacagcgttgtgtcccagtgcacatgctcgcatcgcttaccaggagtgcccgagaccctaagatgttcggagtggttttttcgcacagacccgaatagcctgcccctcagccacgctctgtgcccttctgagaacaggctgatatgcccaagatagtcctgaatggtgtgaccgtagacttccctttccagccctacaaatgccaacaggagtacatgaccaaggtcctggaatgtctgcagcagaaggtgaatggcatcctggagagccctacgggtacagggaagacgctgtgcctgctgtgcaccacgctggcctggcgagaacacctccgagacggcatctctgcccgcaagattgccgagagggcgcaaggagagcttttcccggatcgggccttgtcatcctggggcaacgctgctgctgctgctggagaccccatagcttgctacacggacatcccaaagattatttacgcctccaggacccactcgcaactcacacaggtcatcaacgagcttcggaacacctcctaccggcctaaggtgtgtgtgctgggctcccgggagcagctgtgcatccatcctgaggtgaagaaacaagagagtaaccatctacagatccacttgtgccgtaagaaggtggcaagtcgctcctgtcatttctacaacaacgtagaagaaaaaagcctggagcaggagctggccagccccatcctggacattgaggacttggtcaagagcggaagcaagcacagggtgtgcccttactacctgtcccggaacctgaagcagcaagccgacatcatattcatgccgtacaattacttgttggatgccaagagccgcagagcacacaacattgacctgaaggggacagtcgtgatctttgacgaagctcacaacgtggagaagatgtgtgaagaatcggcatcctttgacctgactccccatgacctggcttcaggactggacgtcatagaccaggtgctggaggagcagaccaaggcagcgcagcagggtgagccccacccggagttcagcgcggactcccccagcccagggctgaacatggagctggaagacattgcaaagctgaagatgatcctgctgcgcctggagggggccatcgatgctgttgagctgcctggagacgacagcggtgtcaccaagccagggagctacatctttgagctgtttgctgaagcccagatcacgtttcagaccaagggctgcatcctggactcgctggaccagatcatccagcacctggcaggacgtgctggagtgttcaccaacacggccggactgcagaagctggcggacattatccagattgtgttcagtgtggacccctccgagggcagccctggttccccagcagggctgggggccttacagtcctataaggtgcacatccatcctgatgctggtcaccggaggacggctcagcggtctgatgcctggagcaccactgcagccagaaagcgagggaaggtgctgagctactggtgcttcagtcccggccacagcatgcacgagctggtccgccagggcgtccgctccctcatccttaccagcggcacgctggccccggtgtcctcctttgctctggagatgcagatccctttcccagtctgcctggagaacccacacatcatcgacaagcaccagatctgggtgggggtcgtccccagaggccccgatggagcccagttgagctccgcgtttgacagacggttttccgaggagtgcttatcctccctggggaaggctctgggcaacatcgcccgcgtggtgccctatgggctcctgatcttcttcccttcctatcctgtcatggagaagagcctggagttctggcgggcccgcgacttggccaggaagatggaggcgctgaagccgctgtttgtggagcccaggagcaaaggcagcttctccgagaccatcagtgcttactatgcaagggttgccgcccctgggtccaccggcgccaccttcctggcggtctgccggggcaaggccagcgaggggctggacttctcagacacgaatggccgtggtgtgattgtcacgggcctcccgtaccccccacgcatggacccccgggttgtcctcaagatgcagttcctggatgagatgaagggccagggtggggctgggggccagttcctctctgggcaggagtggtaccggcagcaggcgtccagggctgtgaaccaggccatcgggcgagtgatccggcaccgccaggactacggagctgtcttcctctgtgaccacaggttcgcctttgccgacgcaagagcccaactgccctcctgggtgcgtccccacgtcagggtgtatgacaactttggccatgtcatccgagacgtggcccagttcttccgtgttgccgagcgaactatgccagcgccggccccccgggctacagcacccagtgtgcgtggagaagatgctgtcagcgaggccaagtcgcctggccccttcttctccaccaggaaagctaagagtctggacctgcatgtccccagcctgaagcagaggtcctcagggtcaccagctgccggggaccccgagagtagcctgtgtgtggagtatgagcaggagccagttcctgcccggcagaggcccagggggctgctggccgccctggagcacagcgaacagcgggcggggagccctggcgaggagcaggcccacagctgctccaccctgtccctcctgtctgagaagaggccggcagaagaaccgcgaggagggaggaagaagatccggctggtcagccacccggaggagcccgtggctggtgcacagacggacagggccaagctcttcatggtggccgtgaagcaggagttgagccaagccaactttgccaccttcacccaggccctgcaggactacaagggttccgatgacttcgccgccctggccgcctgtctcggccccctctttgctgaggaccccaagaagcacaacctgctccaaggcttctaccagtttgtgcggccccaccataagcagcagtttgaggaggtctgtatccagctgacaggacgaggctgtggctatcggcctgagcacagcattccccgaaggcagcgggcacagccggtcctggaccccactgggaactttccagatgctctcgaccagctttgtggctctacatctcttcatcaggaagaacggcgccggatcccaagctgaccgtgtccacggctgcagcccagcagctggacccccaagagcacctgaaccagggcaggccccacctgtcgcccaggccacccccaacaggagaccctggcagccaaccacagtgggggtctggagtgcccagagcagggaagcagggccagcacgccgtgagcgcctacctggctgatgcccgcagggccctggggtccgcgggctgtagccaactcttggcagcgctgacagcctataagcaagacgacgacctcgacaaggtgctggctgtgttggccgccctgaccactgcaaagccagaggacttccccctgctgcacaggttcagcatgtttgtgcgtccacaccacaagcagcgcttctcacagacgtgcacagacctgaccggccggccctacccgggcatggagccaccgggaccccaggaggagaggcttgccgtgcctcctgtgcttacccacagggctccccaaccaggcccctcacggtccgagaagaccgggaagacccagagcaagatctcgtccttccttagacagaggccagcagggactgtgggggcgggcggtgaggatgcaggtcccagccagtcctcaggacctccccacgggcctgcagcatctgagtggggtgagcctcatgggagagacatcgctgggcagcaggccacgggagctccgggcgggcccctctcagcaggctgtgtgtgccagggctgtggggcagaggacgtggtgcccttccagtgccctgcctgtgacttccagcgctgccaagcctgctggcaacggcaccttcaggcctctaggatgtgcccagcctgccacaccgcctccaggaagcagagcgtcatgcaggtcttctggccagagccccagtgagtgcccacggaggcccccagcacacccaacgtggcttgatcacctgcctgtccagctctggtgggccaagaacccacccaacagaataggccagcccatgccagccggcttggcccgctgcaggcctcaggcaggcggggcccatggttggtccctgcggtgggaccggatctgggcctgcctctgagaagccctgagctaccttggggtctggggtgggtttctgggaaagtgcttccccagaacttccctggctcctggcctgtgagtggtgccacaggggcaccccagctgagcccctcaccgggaaggaggagacccccgtgggcacgtgtccacttttaatcaggggacagggctctctaataaagctgctggcagtgcccagg

SEQ ID NO: 331372 - DNA, 3519 bp, Homo sapiens
ccgagtctcagataggcagcctgcagttccttcaccacaacaggcacatggggctgggtgccagtgagtgctggggcttctccgagcactatctcacacccaggagcgtgggcacgcatggcattcgcatgtgccgtcagtggacattaaacacagccatgaagaagccacgaagaagtgctgcctgccggccgtgcgcggtcacgcagcgccaactccctcctggggccttctggggccttctggggcatgggagctggggccgcctgagacaaacatccgtgacgctgggctgaccccacagaacggtgcgggcctcgctcttggagtcagccctgctgccagccagtgccgggtgctggggactcagggaggcccgccgggaccactgcgggacagtgagccgagcagaagctggaacgcaggagaggaaggagagggggcggtcagggctctcaggagccgggtcctgggcaaggcgcagccgttttcaaattttcaggaaagcggtcggctcacactcgagcagtaaaaagatgcctctggggaggaggcccgtgcagctctccgggcaatggtggtggctcggcctagagaggcggtagtggaacgcagaccctggtgggggaatgacatcaagggaggagacgggcgggaccccagatttctgcctgtgggcgatggaagtgaggttcactggccagcggagccggacacagaacgcgcaaaacgccgtgtaggcctggaggagccgaagagcaggcggaccccctccgcgggggaacagtttccgccgggagcacaaagcaacggaccggaagtggggggcggaagtgcagtgggctcagcgccgactgcgcgcctctgcccgcgaaaactctgagctggctgacagctggggacgggtggcggccctcgactggagtcggttgagttcctgagggaccccggttctggaaggttcgccgcggagacaagtgagcagtctgtgccatagggattctcgaagagaacagcgttgtgtcccagtgcacatgctcgcatcgcttaccaggagtgcccgagaccctaagatgttcggagtggttttttcgcacagacccgaatagcctgcccctcagccacgctctgtgcccttctgagaacaggctgatatgcccaagatagtcctgaatggtgtgaccgtagacttccctttccagccctacaaatgccaacaggagtacatgaccaaggtcctggaatgtctgcagcagaaggtgaatggcatcctggagagccctacgggtacagggaagacgctgtgcctgctgtgcaccacgctggcctggcgagaacacctccgagacggcatctctgcccgcaagattgccgagagggcgcaaggagagcttttcccggatcgggccttgtcatcctggggcaacgctgctgctgctgctggagaccccatagcttgctacacggacatcccaaagattatttacgcctccaggacccactcgcaactcacacaggtcatcaacgagcttcggaacacctcctaccggcctaaggtgtgtgtgctgggctcccgggagcagctgtgcatccatcctgaggtgaagaaacaagagagtaaccatctacagatccacttgtgccgtaagaaggtggcaagtcgctcctgtcatttctacaacaacgtagaagaaaaaagcctggagcaggagctggccagccccatcctggacattgaggacttggtcaagagcggaagcaagcacagggtgtgcccttactacctgtcccggaacctgaagcagcaagccgacatcatattcatgccgtacaattacttgttggatgccaagagccgcagagcacacaacattgacctgaaggggacagtcgtgatctttgacgaagctcacaacgtggagaagatgtgtgaagaatcggcatcctttgacctgactccccatgacctggcttcaggactggacgtcatagaccaggtgctggaggagcagaccaaggcagcgcagcagggtgagccccacccggagttcagcgcggactcccccagcccagggctgaacatggagctggaagacattgcaaagctgaagatgatcctgctgcgcctggagggggccatcgatgctgttgagctgcctggagacgacagcggtgtcaccaagccagggagctacatctttgagctgtttgctgaagcccagatcacgtttcagaccaagggctgcatcctggactcgctggaccagatcatccagcacctggcaggacgtgctggagtgttcaccaacacggccggactgcagaagctggcggacattatccagattgtgttcagtgtggacccctccgagggcagccctggttccccagcagggctgggggccttacagtcctataaggtgcacatccatcctgatgctggtcaccggaggacggctcagcggtctgatgcctggagcaccactgcagccagaaagcgagggaaggtgctgagctactggtgcttcagtcccggccacagcatgcacgagctggtccgccagggcgtccgctccctcatccttaccagcggcacgctggccccggtgtcctcctttgctctggagatgcagatgtacgggccacccctgccagggcctgagcaccggtgacacctctgacatcagcggggtggaagtggtgggggtccccatgagccgggtgctgggggtctcgggcctcgagggctaaaggggtgctggtgcacttccccactgtctgctccctctggccacgctcagccctttcccagtctgcctggagaacccacacatcatcgacaagcaccagatctgggtgggggtcgtccccagaggccccgatggagcccagttgagctccgcgtttgacagacggttttccgaggagtgcttatcctccctggggaaggctctgggcaacatcgcccgcgtggtgccctatgggctcctgatcttcttcccttcctatcctgtcatggagaagagcctggagttctggcgggcccgcgacttggccaggaagatggaggcgctgaagccgctgtttgtggagcccaggagcaaaggcagcttctccgaggtcggcacttggccggggctctgggcctgctgccccctcgtgcctcccctgcctctcacagcttccccaaggctgaccactggccctgaccatgggctccggcggctcccgctgcctcttcagggctcctgcgtttccttcctggccctgagtgttgcctcttatcttacaaagcccccagcaccgggtgggtgtggtaacagtggccctcctgtctgagtagccctagtcggccaccctggccctggggttccccgtgttttctgggaagcactgagcaggcgtggggtcagcctgggatccgtgccaggaagaagcttccagaacccgattggccttcctggctaggacgatccttcatcttggagcatgagacctgggtctccctcatgggggagg

SEQ ID NO: 331373 - DNA, 516 bp, Homo sapiens
aattttctccctgcttcctgctgggagccattcccctcttcctgcccatccctgcccttcaggcccctggagtgagctccaggtgcaggcaccaggcacctgtgtccccttcctgccagcccctcgctgtggtcggactgtcttccctggacctgctcttacaagtcaccacctgcgagcctcatgagccgctggtgtgacttggacaggaccaagttgtggcactgtcaccggggtgtgctgtgcccccctcccccgacctccatcttggctcagggctccttgggaccatcttccctgtgcgtccaggtgctttgggaccccagagtgtgtggttggggtctgtgtgtggttgtgagctgtgtcctcctcaggcccacagctgctccaccctgtccctcctgtctgagaagaggccggcagaagaaccgcgaggagggaggaagaagatccggctggtcagccacccggtgcgtgagctgtccctgcacctgtgccgaccaccatagacacgca

SEQ ID NO: 331374 - DNA, 335 bp, Homo sapiens
ccatgtcagcttactttttctgtagtgtaaggaactccctgtctggatggccagagtaggcaccttccttacactacagaaaaagtaagctgacatggtcctgagagaggaggacctaaagcaggatcctgagtagaaaatgagattagggcccaggaagaggacacaaaaaaggactgggaccttgtagacccaggttatcacccaggatattactggttgtatatgtactgggtgctggcatcatgtcaggtgctggagaggccagaaaaatcctctaagatgtagcaagcagaaagaataaaccatgagatctttgcctaccctcattctag

SEQ ID NO: 331375 - DNA, 877 bp, Homo sapiens
gtattggctatgtaattataggggctggcaaatctaaaatatgttgggcaggccaataggctagaaattcaggtaagagtgatggggcagtcttgagtccaatatcaataggtcaggtcagcagactggaaactcaagaaggatttccatgttacagtctggagagggaattccttctttttggggaaacctcagtctttgctcttaagcccttccactgattggatgggacccacccacattatgaagggcaacctgttttatctgaagtcaattgactgtaaatgttgaccacatccacaaaataccttcacaccaatatctagatgagtgtttggccaaacaactgggcaggatggcctagccaaattgacctataatatgaagcatcgtaaagtccatctgaaaaataagtgcaagaaaaaaggctaatcttacagagaaccatatgcggaagaactgaagaagagccacaagccatgaaaacatggactgggaagatgccttgatgaatgatgcagtcttcctggagaaagaatcagaagctctcccagtggaggctcgtttggtaaccaaggtgcctactctggccatccagacagggagttccttacactacagaaaaagtaagctgacatggtcctgagagaggaggacctaaagcaggatcctgagtagaaaatgagattagggcccaggaagaggacacaaaaaaggactgggaccttgtagacccaggttatcacccaggatattactggttgtatatgtactgggtgctggcatcatgtcaggtgctggagaggccagaaaaatcctctaagatgtagcaagcagaaagaataaaccatgagatctttgcctaccctcattctag

SEQ ID NO: 331376 - DNA, 643 bp, Homo sapiens
acttcagaagaaaaccacatatccgtcaagcattcatttgccattctccctaaccccagtggcccacgcagccactcatctgctgcttgcctccagatttacctattctggacatttatataaatggaatcacgttatgtcactttttgtgactggcttcttttgtttaggttttctttcttttatttatttattttttgagacaaggtgttctgttgcccaggctggagtgcagtggcccagtctcggcttactgcagcctccgcttcctgggctcaagtgatcctcctgcctcagcctcctgagtagctgggattataggtatgcaccactatgctcagctaatttttgtattttttgtagagacaaggttttgcccatgttgcccagtctggtctcgaaactcctgagctcaggccgtctgcccagcttgccctcccaaagtgctgggattacaggtgtgagccaccgcacccggcccataatgttttccaggttcatcctttttgtagcacataccagtactccattcctttttattgctgaataatatttcactgtttgatacactacacattgtttttgggtttttttgttttgttcgttttttttgtttgtttgtttgtttttcgagacagagtct

SEQ ID NO: 331377 - DNA, 389 bp, Homo sapiens
acatccacaaactcacctcactggggatcgggctcagacaccaagaggccttaccggaagcaagcagcagagcctttgcttacaagaaaacccaatttccatttcccggctgttctccccaattttgagcccctgaatgttcagagagccgcacaaaaagaaagttctctctggagcctgtaaggtcatgacagttagtgggaacgtggcctacctgccatctccttttcaaagaagggctggatgagctcgccaaacgtggtcctatctgccacagcctctttcagcagttgcccacagcagactgaaggagaggggaacagaaagacacccattaaattttaaataggaggaaggatgagaaaaaaagaacccccagtgctgcctgc

SEQ ID NO: 331378 - DNA, 313 bp, Homo sapiens
taaaatgtaacactgctactacaaaggaacatccctgctgaaggtttttgaaatcagaaggtaaaggaccaattaaaattttcatgcattcacaatctggtgactagtcgctcctaataagtggaaaacattcaagatagaagtattcagaaacataaatgcagagtgatgaatcttgtgacatctaagcagatcataagcagacaatttacactggatgttcagacatgatgattttcatattaggagaatatttgaggcaaggcacagtggatcatgcttgtaatcccagcactttaggaagccaagacaa

SEQ ID NO: 331379 - DNA, 359 bp, Homo sapiens
actgcatccaacgccgacacggattcggtatggcacattccttattcctttggcccagacagctctgttgcccaggctggagtgcagtgccctgatcatagcccacagcagccttgaattcctgcgaatcctttcagtgcagcctccgcagtagctgggactatgggaacacatcactatgcctagcttattttatttttgtttttattttttgtagagatgggggtctcactgtgttgctcaggcttgtcttgagctcctggcctcaagcagtcctcccaaagtgctgagattacagctgtgagccatggcacctggccgagagaacacttttccttgacatctctgaacaaagtgtg

SEQ ID NO: 331380 - DNA, 392 bp, Homo sapiens
tctcatcattcatttgggaagagaggaaaatagttaaggcattggctaatagattcctatatataatcatcagaccagaaagactgtaccctcagccgaaaccactaacttctgtttttctatgctgtcttaccatgtcctgtcagtctgtttggtttctctattctctctcagtatagaacatgccttcaatgtgtaaacaacacaagagtaaagaggaccttactgggagtggctggggtagagaaaccaagatttaactgtcagtcacttttactctgctccagcagagggtgctcaggaccaaacaagactctaggtcaccacatccttaccttaaaacccttcctcatcagctgcttctgggcaatctgggtctctgccattggcag

SEQ ID NO: 331381 - DNA, 229 bp, Homo sapiens
ttgtatttttagtagagacggggtttcaccgttttagccgggatggtctcgatctcctgacctcgtgatccgcccgcctcggcctcccaaagtgctgggattacaggcgtgagccaccgcgcccggccgacaatcctgatttctaattctcactctagcaattggtggttattcaactttaataaacctgcacaaccttgctcacagattaatttttccatttctacaa

SEQ ID NO: 331382 - DNA, 380 bp, Homo sapiens
cacaggtaagtaaactgggatttgaatgctagccatccagctccagggtccatgctcataatcgtaaggtgtaactgcttctcagcatggagagatgcctcagggctctgaggtcagctgtggttcaaaaacaggctcacaaagtaacaaaaggaaaaaatccatcaattgaattgcatcagaactaaatactttttttttttttttgagatggactctcactttgtcacctagactggagtgcagtagcgcgatcttggctcactgcaatctctgtctcctgggttctcctgcctcagcctcccgagcagccaggatcacaggcacttgccaccacgcctggctaactttggtatttttagtggagatggggtttcacc

SEQ ID NO: 331383 - DNA, 158 bp, Homo sapiens
ataatgagaccttgtctctaaaaaaaaaattaattaattaaaaaataaataagtaataggaatcagaccccagcatcatagttgtgcatattacctgttatttctttaagagatatcccttctccttgagttccatttttatgggaattacttgcttt

SEQ ID NO: 331384 - DNA, 555 bp, Homo sapiens
gcctgtcctagaatgttacttaaatgaactaacctgtgggatgtggcctaaaaggtaaagccaggcagttcttaatacaaacaggctgggctccagaagtctccttgtttagagttaaggagtaaactcagtgcccatgatgcccaggaaaccataagataaaacagcccttgggccaggagtgctgggattacaggtatgagccaccacgcccggcccagactgggtggtttacaaaatagaaatttatttctcacagttctggggcctagaaagtcccagacgaaggtgctggccaggtagttcattatgaggccttttctcttggcttgtaggcggccgccatcttactgtgagctcacatgacctcttagggaaagcgagctccctgaggtctctgcccatcaggacattaatcctatcagatcagggccacatccttatgacctcatttaaccttaactgcctcctaaaagcgtcacctccaaatagtcacgttgggagttagggcttcgacatgtgaatttggaggtgacacaaacattcggctcacag

SEQ ID NO: 331385 - DNA, 1916 bp, Homo sapiens
cctcgcctggctccctgccccgccccgcccgccgtcccccgcttggcttccagcgccgcttgcgctccggagcgctggctctgctggcgctgagaaatggaccaattttgacaagatatagtgctgcagcgtgcctgatgggatatattcagtcatggcgtccgaactttgtaagacgatctctgtggcaaggctagaaaagcacaagaatttgttcttaaattataggaatctgcaccattttccattggagttactgaaagatgagggactgcagtacttggagagactctatatgaaaaggaactccctgacatccttgccagaaaaccttgctcagaagcttccaaaccttgtggaactatacctgcactcaaataacatagttgtggttccggaagccattgggtctcttgtaaaactccaatgtctggatcttagtgacaatgccttagaaattgtttgcccagaaattggtcgtctgagagctttacgtcatcttcgattagctaataaccaactgcaattcctacctccagaggttggcgatttgaaggagctgcagacactagacatttctaccaatcgtttgctaactttacccgagaggcttcacatgtgcctttctctgcagtacctcactgtggaccgaaatcgtctatggtatgtgccgcgccatctctgccagctgcccagcctcaatgagctctccatggctggaaaccgtcttgcatttttgccacttgatttaggtcgatctcgagaactacagtatgtatacgtggataacaacattcacctgaaaggcttgccatcttatctgtacaataaagtcatcgggtgcagtggctgtggtgctcccattcaagtttccgaggtgaagctgctttccttttcatcagggcagcgaaccgttttcctcccagctgaggtgaaggccatagggacggagcatgatcacgtcctccctctgcaggaattggctatgagagggctgtatcatacctaccacagcttgctgaaagatttgaactttctgtctccaatctcattacccagaagtctcctagagctgctgcactgccctctggggcactgtcatcggtgtagtgagcctatgtttaccatcgtctaccccaagctctttcccttgagagagacgccaatggcagggctgcaccagtggaagacaactgttagttttgtggcttactgctgctccacccagtgtctgcagacttttgacctgctgagttgataaacactcaagaacctcaggagcgctgccagcttgacactggggaatccagccagtccagcacactcttccatcctgtcctgtccaatgcgggggcactgcagaactctctagaaatgtcatgattgagcttcagagctaaaatgccttcacccttcccccaagttggaatatatcctcccccaaattaaggacccatttgtcttctgtgtttttcctttttatgtgagtgtgtcttttacagaaaccatttagattgatgggcctccccaaatctaatttaaagcaagtttccggtccttggagaacagtgacttgatcatctagccagattcccttttgaacacacataccttcagtgatgcttcctctcctctcccctcccttgctttccccagagagttatttccctgagaccatgttctccacagtgtctccagtggaaacttgtcagtttttgaggagtttcagcaaaccccgtggcctcaatggtcttgagtagcagggtggggcgcctgagttggcagcaaagtgaggctcccatggaggctcagtgagggtcccagagcacacaccctctggaaagttccagccttgtttatacgttctacagtgtagcaacagacttttgtgagggattttaaaaacaaaaatgtag

SEQ ID NO: 331386 - DNA, 1720 bp, Homo sapiens
  misc_feature (6)..(6): n is a, c, g, or t
agcggnacggtccggaattcccgggatgcgctggctctgctggcgctgagaaatggaccaattttgacaagatatagtgctgcagcgtgcctgatgggatatattcagtcatggcgtccgaactttccagaaaaccttgctcagaagcttccaaaccttgtggaactatacctgcactcaaataacatagttgtggttccggaagccattgggtctcttgtaaaactccaatgtctggatcttagtgacaatgccttagaaattgtttgcccagaaattggtcgtctgagagctttacgtcatcttcgattagctaataaccaactgcaattcctacctccagaggttggcgatttgaaggagctgcagacactagacatttctaccaatcgtttgctaactttacccgagaggcttcacatgtgcctttctctgcagtacctcactgtggaccgaaatcgtctatggtatgtgccgcgccatctctgccagctgcccagcctcaatgagctctccatggctggaaaccgtcttgcatttttgccacttgatttaggtcgatctcgagaactacagtatgtatacgtggataacaacattcacctgaaaggcttgccatcttatctgtacaataaagtcatcgggtgcagtggctgtggtgctcccattcaagtttccgaggtgaagctgctttccttttcatcagggcagcgaaccgttttcctcccagctgaggtgaaggccatagggacggagcatgatcacgtcctccctctgcaggaattggctatgagagggctgtatcatacctaccacagcttgctgaaagatttgaactttctgtctccaatctcattacccagaagtctcctagagctgctgcactgccctctggggcactgtcatcggtgtagtgagcctatgtttaccatcgtctaccccaagctctttcccttgagagagacgccaatggcagggctgcaccagtggaagacaactgttagttttgtggcttactgctgctccacccagtgtctgcagacttttgacctgctgagttgataaacactcaagaacctcaggagcgctgccagcttgacactggggaatccagccagtccagcacactcttccatcctgtcctgtccaatgcgggggcactgcagaactctctagaaatgtcatgattgagcttcagagctaaaatgccttcacccttcccccaagttggaatatatcctcccccaaattaaggacccatttgtcttctgtgtttttcctttttatgtgagtgtgtcttttacagaaaccatttagattgatgggcctccccaaatctaatttaaagcaagtttccggtccttggagaacagtgacttgatcatctagccagattcccttttgaacacacataccttcagtgatgcttcctctcctctcccctcccttgctttccccagagagttatttccctgagaccatgttctccacagtgtctccagtggaaacttgtcagtttttgaggagtttcagcaaaccccgtggcctcaatggtcttgagtagcagggtggggcgcctgagttggcagcaaagtgaggctcccatggaggctcagtgagggtcccagagcacacaccctctggaaagttccagccttgtttatacgttctacagtgtagcaacagacttttgtgagggattttaaaaacaaaaatgtag

SEQ ID NO: 331387 - DNA, 1875 bp, Homo sapiens
cctcgcctggctccctgccccgccccgcccgccgtcccccgcttggcttccagcgccgcttgcgctccggagcgctggctctgctggcgctgagaaatggaccaattttgacaagatatagtgctgcagcgtgcctgatgggatatattcagtcatggcgtccgaactttgtaagacgatctctgtggcaaggctagaaaagcacaagaatttgttcttaaattataggaatctgcaccattttccattggagttactgaaagatgagggactgcagtacttggagagactctatatgaaaaggaactccctgacatccttgatacctgcactcaaataacatagttgtggttccggaagccattgggtctcttgtaaaactccaatgtctggatcttagtgacaatgccttagaaattgtttgcccagaaattggtcgtctgagagctttacgtcatcttcgattagctaataaccaactgcaattcctacctccagaggttggcgatttgaaggagctgcagacactagacatttctaccaatcgtttgctaactttacccgagaggcttcacatgtgcctttctctgcagtacctcactgtggaccgaaatcgtctatggtatgtgccgcgccatctctgccagctgcccagcctcaatgagctctccatggctggaaaccgtcttgcatttttgccacttgatttaggtcgatctcgagaactacagtatgtatacgtggataacaacattcacctgaaaggcttgccatcttatctgtacaataaagtcatcgggtgcagtggctgtggtgctcccattcaagtttccgaggtgaagctgctttccttttcatcagggcagcgaaccgttttcctcccagctgaggtgaaggccatagggacggagcatgatcacgtcctccctctgcaggaattggctatgagagggctgtatcatacctaccacagcttgctgaaagatttgaactttctgtctccaatctcattacccagaagtctcctagagctgctgcactgccctctggggcactgtcatcggtgtagtgagcctatgtttaccatcgtctaccccaagctctttcccttgagagagacgccaatggcagggctgcaccagtggaagacaactgttagttttgtggcttactgctgctccacccagtgtctgcagacttttgacctgctgagttgataaacactcaagaacctcaggagcgctgccagcttgacactggggaatccagccagtccagcacactcttccatcctgtcctgtccaatgcgggggcactgcagaactctctagaaatgtcatgattgagcttcagagctaaaatgccttcacccttcccccaagttggaatatatcctcccccaaattaaggacccatttgtcttctgtgtttttcctttttatgtgagtgtgtcttttacagaaaccatttagattgatgggcctccccaaatctaatttaaagcaagtttccggtccttggagaacagtgacttgatcatctagccagattcccttttgaacacacataccttcagtgatgcttcctctcctctcccctcccttgctttccccagagagttatttccctgagaccatgttctccacagtgtctccagtggaaacttgtcagtttttgaggagtttcagcaaaccccgtggcctcaatggtcttgagtagcagggtggggcgcctgagttggcagcaaagtgaggctcccatggaggctcagtgagggtcccagagcacacaccctctggaaagttccagccttgtttatacgttctacagtgtagcaacagacttttgtgagggattttaaaaacaaaaatgtag

SEQ ID NO: 331388 - DNA, 1821 bp, Homo sapiens
cctcgcctggctccctgccccgccccgcccgccgtcccccgcttggcttccagcgccgcttgcgctccggagcgctggctctgctggcgctgagaaatggaccaattttgacaagatatagtgctgcagcgtgcctgatgggatatattcagtcatggcgtccgaactttgtaagacgatctctgtggcaaggctagaaaagcacaagaatttgttcttaaattataggaatctgcaccattttccattggagttactgaaagatgagggactgcagtacttggagagactctatatgaaaaggaactccctgacatccttgccagaaaaccttgctcagaagcttccaaaccttgtggaactatacctgcactcaaataacatagttgtggttccggaagccattgggtctcttgtaaaactccaatgtctggatcttagtgacaatgccttagaaattgtttgcccagaaattggtcgtctgagagctttacgtcatcttcgattagctaataaccaactgcaattcctacctccagtacctcactgtggaccgaaatcgtctatggtatgtgccgcgccatctctgccagctgcccagcctcaatgagctctccatggctggaaaccgtcttgcatttttgccacttgatttaggtcgatctcgagaactacagtatgtatacgtggataacaacattcacctgaaaggcttgccatcttatctgtacaataaagtcatcgggtgcagtggctgtggtgctcccattcaagtttccgaggtgaagctgctttccttttcatcagggcagcgaaccgttttcctcccagctgaggtgaaggccatagggacggagcatgatcacgtcctccctctgcaggaattggctatgagagggctgtatcatacctaccacagcttgctgaaagatttgaactttctgtctccaatctcattacccagaagtctcctagagctgctgcactgccctctggggcactgtcatcggtgtagtgagcctatgtttaccatcgtctaccccaagctctttcccttgagagagacgccaatggcagggctgcaccagtggaagacaactgttagttttgtggcttactgctgctccacccagtgtctgcagacttttgacctgctgagttgataaacactcaagaacctcaggagcgctgccagcttgacactggggaatccagccagtccagcacactcttccatcctgtcctgtccaatgcgggggcactgcagaactctctagaaatgtcatgattgagcttcagagctaaaatgccttcacccttcccccaagttggaatatatcctcccccaaattaaggacccatttgtcttctgtgtttttcctttttatgtgagtgtgtcttttacagaaaccatttagattgatgggcctccccaaatctaatttaaagcaagtttccggtccttggagaacagtgacttgatcatctagccagattcccttttgaacacacataccttcagtgatgcttcctctcctctcccctcccttgctttccccagagagttatttccctgagaccatgttctccacagtgtctccagtggaaacttgtcagtttttgaggagtttcagcaaaccccgtggcctcaatggtcttgagtagcagggtggggcgcctgagttggcagcaaagtgaggctcccatggaggctcagtgagggtcccagagcacacaccctctggaaagttccagccttgtttatacgttctacagtgtagcaacagacttttgtgagggattttaaaaacaaaaatgtag

SEQ ID NO: 331389 - DNA, 1756 bp, Homo sapiens
cctcgcctggctccctgccccgccccgcccgccgtcccccgcttggcttccagcgccgcttgcgctccggagcgctggctctgctggcgctgagaaatggaccaattttgacaagatatagtgctgcagcgtgcctgatgggatatattcagtcatggcgtccgaactttgtaagacgatctctgtggcaaggctagaaaagcacaagaatttgttcttaaattataggaatctgcaccattttccattggagttactgaaagatgagggactgcagtacttggagagactctatatgaaaaggaactccctgacatccttgccagaaaaccttgctcagaagcttccaaaccttgtggaactatacctgcactcaaataacatagttgtggttccggaagccattgggtctcttgtaaaactccaatgtctggatcttagtgacaatgccttagaaattgtttgcccagaaattggtcgtctgagagctttacgtcatcttcgattagctaataaccaactgcaattcctacctccagaggttggcgatttgaaggagctgcagacactagacatttctaccaatcgtttgctaactttacccgagaggcttcacatgtgcctttctctgcagtacctcactgtggaccgaaatcgtctatggtatgtgccgcgccatctctgccagctgcccagcctcaatgagctctccatggctggaaaccgtcttgcatttttgccacttgatttaggtcgatctcgagaactacagtatgtatacgtggataacaacattcacctgaaaggcttgccatcttatctgtacaataaagtcatcgggtgcagtggctgtggtgctcccattcaagtttccgaggtgaagctgctttccttttcatcagggcagcgaaccgttttcctcccagctgaggtgaaggccatagggacggagcatgatcacgtcctccctctgcaggaattggctatgagagggctgtatcatacctaccacagcttgctgaaaggaagacaactgttagttttgtggcttactgctgctccacccagtgtctgcagacttttgacctgctgagttgataaacactcaagaacctcaggagcgctgccagcttgacactggggaatccagccagtccagcacactcttccatcctgtcctgtccaatgcgggggcactgcagaactctctagaaatgtcatgattgagcttcagagctaaaatgccttcacccttcccccaagttggaatatatcctcccccaaattaaggacccatttgtcttctgtgtttttcctttttatgtgagtgtgtcttttacagaaaccatttagattgatgggcctccccaaatctaatttaaagcaagtttccggtccttggagaacagtgacttgatcatctagccagattcccttttgaacacacataccttcagtgatgcttcctctcctctcccctcccttgctttccccagagagttatttccctgagaccatgttctccacagtgtctccagtggaaacttgtcagtttttgaggagtttcagcaaaccccgtggcctcaatggtcttgagtagcagggtggggcgcctgagttggcagcaaagtgaggctcccatggaggctcagtgagggtcccagagcacacaccctctggaaagttccagccttgtttatacgttctacagtgtagcaacagacttttgtgagggattttaaaaacaaaaatgtag

SEQ ID NO: 331390 - DNA, 1187 bp, Homo sapiens
cctcgcctggctccctgccccgccccgcccgccgtcccccgcttggcttccagcgccgcttgcgctccggagcgctggctctgctggcgctgagaaatggaccaattttgacaagatatagtgctgcagcgtgcctgatgggatatattcagtcatggcgtccgaactttgtaagacgatctctgtggcaaggctagaaaagcacaagaatttgttcttaaattataggaatctgcaccattttccattggagttactgaaagatgagggactgcagtacttggagagactctatatgaaaaggaactccctgacatccttgccagaaaaccttgctcagaagcttccaaaccttgtggaactatacctgcactcaaataacatagttgtggttccggaagccattgggtctcttgtaaaactccaatgtctggatcttagtgacaatgccttagaaattgtttgcccagaaattggtcgtctgagagctttacgtcatcttcgattagctaataaccaactgcaattcctacctccagaggttggcgatttgaaggagctgcagacactagacatttctaccaatcgtttgctaactttacccgagaggcttcacatgtgcctttctctgcagtacctcactgtggaccgaaatcgtctatggtatgtgccgcgccatctctgccagctgcccagcctcaatgagctctccatggctggaaaccgtcttgcatttttgccacttgatttaggtcgatctcgagaactacagtatgtatacgtggataacaacattcacctgaaaggcttgccatcttatctgtacaataaagtcatcgggtgcagtgggtcaaccctattcacagtaggaggtgactacatggagagtgaccactaggagcgaggaccattgggggcccacttggagactggctgtcacagcttcatggcatctatactatttgctagcctcatggaaaagaatgatctttattttttctgggtttttcttgttattacaggagtaaatgtcctcaatcttctacattgtagccagaaagagaggttcatcccatgttagaattttagagaatggtaattggcacatatacttactgaggagaacttaatggtaaaagtaatcctctacaggatgttttttccaattgtttaattatgtaagaaaa

SEQ ID NO: 331391 - DNA, 785 bp, Homo sapiens
gtaacggaagcaccagcaagtcaacgttacgggtccaacaatacacacctcagggaagacaactgttagttttgtggcttactgctgctccacccagtgtctgcagacttttgacctgctgagttgataaacactcaagaacctcaggagcgctgccagcttgacactggggaatccagccagtccagcacactcttccatcctgtcctgtccaatgcgggggcactgcagaactctctagaaatgtcatgattgagcttcagagctaaaatgccttcacccttcccccaagttggaatatatcctcccccaaattaaggacccatttgtcttctgtgtttttcctttttatgtgagtgtgtcttttacagaaaccatttagattgatgggcctccccaaatctaatttaaagcaagtttccggtccttggagaacagtgacttgatcatctagccagattcccttttgaacacacataccttcagtgatgcttcctctcctctcccctcccttgctttccccagagagttatttccctgagaccatgttctccacagtgtctccagtggaaacttgtcagtttttgaggagtttcagcaaaccccgtggcctcaatggtcttgagtagcagggtggggcgcctgagttggcagcaaagtgaggctcccatggaggctcagtgagggtcccagagcacacaccctctggaaagttccagccttgtttatacgttctacagtgtagcaacagacttttgtgagggattttaaaaacaaaaatgtag

SEQ ID NO: 331392 - DNA, 995 bp, Homo sapiens
cctcgcctggctccctgccccgccccgcccgccgtcccccgcttggcttccagcgccgcttgcgctccggagcgctggctctgctggcgctgaggtgagtagagctgtccgcctcgtcgggtgattcaagtggcgaggctctctgacccggccccccggcggggacgccccagacgtggtcctgccaaagcgtccgggtcgcggcgagtgggacagcggagccgtccgggcctcgggtggccacagctgccgggtcctcctcccactctgcggcccgcggcccctgggacccgagaaccctgataccggaaatggaccaattttgacaagatatagtgctgcagcgtgcctgatgggatatattcagtcatggcgtccgaactttgtaagacgatctctgtggcaaggctagaaaagcacaagaatttgttcttaaattataggaatctgcaccattttccattggagttactgaaagatgagggactgcagtacttggagagactctatatgaaaaggaactccctgacatccttgccagaaaaccttgctcagaagcttccaaaccttgtggaactgaagacaactgttagttttgtggcttactgctgctccacccagtgtctgcagacttttgacctgctgagttgataaacactcaagaacctcaggagcgctgccagcttgacactggggaatccagccagtccagcacactcttccatcctgtcctgtccaatgcgggggcactgcagaactctctagaaatgtcatgattgagcttcagagctaaaatgccttcacccttcccccaagttggaatatatcctccaattaggaaaaaaaaaaaaaaggggcgcctaaaaaaccccaggccacgttagctaccctttgaaaagggccaaggaggaaaaaaaagagggggtacacggcggacagtggttgagacctctggggaggaacccaaagccaaaaggagaaactgcggtgaaaaa

SEQ ID NO: 331393 - DNA, 388 bp, Homo sapiens
cctagcttcaaagccacacactgttgtttctgttatatcctgttgattacacaggtcaaccctattcacagtaggaggtgactacatggagagtgaccactaggagcgaggaccattgggggcccacttggagactggctgtcacagcttcatggcatctatactatttgctagcctcatggaaaagaatgatctttattttttctgggtttttcttgttattacaggagtaaatgtcctcaatcttctacattgtagccagaaagagaggttcatcccatgttagaattttagagaatggtaattggcacatatacttactgaggagaacttaatggtaaaagtaatcctctacaggatgttttttccaattgtttaattatgtaag

SEQ ID NO: 331394 - DNA, 2003 bp, Homo sapiens
atctcagtggctggctaactcgggcgaaacggcgtgtgttttgcctaagactctgccagtgtttgttaccacagctgagaaaatagccttttacaaatgcttttaatatgtagcttatagttctctaatctccagcgttaggaaattggaatgcgtattctactaaattgagtacggggagaaatggaccaattttgacaagatatagtgctgcagcgtgcctgatgggatatattcagtcatggcgtccgaactttgtaagacgatctctgtggcaaggctagaaaagcacaagaatttgttcttaaattataggaatctgcaccattttccattggagttactgaaagatgagggactgcagtacttggagagactctatatgaaaaggaactccctgacatccttgccagaaaaccttgctcagaagcttccaaaccttgtggaactatacctgcactcaaataacatagttgtggttccggaagccattgggtctcttgtaaaactccaatgtctggatcttagtgacaatgccttagaaattgtttgcccagaaattggtcgtctgagagctttacgtcatcttcgattagctaataaccaactgcaattcctacctccagaggttggcgatttgaaggagctgcagacactagacatttctaccaatcgtttgctaactttacccgagaggcttcacatgtgcctttctctgcagtacctcactgtggaccgaaatcgtctatggtatgtgccgcgccatctctgccagctgcccagcctcaatgagctctccatggctggaaaccgtcttgcatttttgccacttgatttaggtcgatctcgagaactacagtatgtatacgtggataacaacattcacctgaaaggcttgccatcttatctgtacaataaagtcatcgggtgcagtggctgtggtgctcccattcaagtttccgaggtgaagctgctttccttttcatcagggcagcgaaccgttttcctcccagctgaggtgaaggccatagggacggagcatgatcacgtcctccctctgcaggaattggctatgagagggctgtatcatacctaccacagcttgctgaaagatttgaactttctgtctccaatctcattacccagaagtctcctagagctgctgcactgccctctggggcactgtcatcggtgtagtgagcctatgtttaccatcgtctaccccaagctctttcccttgagagagacgccaatggcagggctgcaccagtggaagacaactgttagttttgtggcttactgctgctccacccagtgtctgcagacttttgacctgctgagttgataaacactcaagaacctcaggagcgctgccagcttgacactggggaatccagccagtccagcacactcttccatcctgtcctgtccaatgcgggggcactgcagaactctctagaaatgtcatgattgagcttcagagctaaaatgccttcacccttcccccaagttggaatatatcctcccccaaattaaggacccatttgtcttctgtgtttttcctttttatgtgagtgtgtcttttacagaaaccatttagattgatgggcctccccaaatctaatttaaagcaagtttccggtccttggagaacagtgacttgatcatctagccagattcccttttgaacacacataccttcagtgatgcttcctctcctctcccctcccttgctttccccagagagttatttccctgagaccatgttctccacagtgtctccagtggaaacttgtcagtttttgaggagtttcagcaaaccccgtggcctcaatggtcttgagtagcagggtggggcgcctgagttggcagcaaagtgaggctcccatggaggctcagtgagggtcccagagcacacaccctctggaaagttccagccttgtttatacgttctacagtgtagcaacagacttttgtgagggattttaaaaacaaaaatgtag

SEQ ID NO: 331395 - DNA, 1934 bp, Homo sapiens
cctcgcctggctccctgccccgccccgcccgccgtcccccgcttggcttccagcgccgcttgcgctccggagcgctggctctgctggcgctgagaaatggaccaattttgacaagatatagtgctgcagcgtgcctgatgggatatattcagtcatggcgtccgaactttgtaagacgatctctgtggcaaggctagaaaagcacaagaatttgttcttaaattataggaatctgcaccattttccattggagttactgaaagatgagggactgcagtacttggagagactctatatgaaaaggaactccctgacatccttgccagaaaaccttgctcagaagcttccaaaccttgtggaactgtgagtctgtttattcaaatacctgcactcaaataacatagttgtggttccggaagccattgggtctcttgtaaaactccaatgtctggatcttagtgacaatgccttagaaattgtttgcccagaaattggtcgtctgagagctttacgtcatcttcgattagctaataaccaactgcaattcctacctccagaggttggcgatttgaaggagctgcagacactagacatttctaccaatcgtttgctaactttacccgagaggcttcacatgtgcctttctctgcagtacctcactgtggaccgaaatcgtctatggtatgtgccgcgccatctctgccagctgcccagcctcaatgagctctccatggctggaaaccgtcttgcatttttgccacttgatttaggtcgatctcgagaactacagtatgtatacgtggataacaacattcacctgaaaggcttgccatcttatctgtacaataaagtcatcgggtgcagtggctgtggtgctcccattcaagtttccgaggtgaagctgctttccttttcatcagggcagcgaaccgttttcctcccagctgaggtgaaggccatagggacggagcatgatcacgtcctccctctgcaggaattggctatgagagggctgtatcatacctaccacagcttgctgaaagatttgaactttctgtctccaatctcattacccagaagtctcctagagctgctgcactgccctctggggcactgtcatcggtgtagtgagcctatgtttaccatcgtctaccccaagctctttcccttgagagagacgccaatggcagggctgcaccagtggaagacaactgttagttttgtggcttactgctgctccacccagtgtctgcagacttttgacctgctgagttgataaacactcaagaacctcaggagcgctgccagcttgacactggggaatccagccagtccagcacactcttccatcctgtcctgtccaatgcgggggcactgcagaactctctagaaatgtcatgattgagcttcagagctaaaatgccttcacccttcccccaagttggaatatatcctcccccaaattaaggacccatttgtcttctgtgtttttcctttttatgtgagtgtgtcttttacagaaaccatttagattgatgggcctccccaaatctaatttaaagcaagtttccggtccttggagaacagtgacttgatcatctagccagattcccttttgaacacacataccttcagtgatgcttcctctcctctcccctcccttgctttccccagagagttatttccctgagaccatgttctccacagtgtctccagtggaaacttgtcagtttttgaggagtttcagcaaaccccgtggcctcaatggtcttgagtagcagggtggggcgcctgagttggcagcaaagtgaggctcccatggaggctcagtgagggtcccagagcacacaccctctggaaagttccagccttgtttatacgttctacagtgtagcaacagacttttgtgagggattttaaaaacaaaaatgtag

SEQ ID NO: 331396 - DNA, 1604 bp, Homo sapiens
cctcgcctggctccctgccccgccccgcccgccgtcccccgcttggcttccagcgccgcttgcgctccggagcgctggctctgctggcgctgagaaatggaccaattttgacaagatatagtgctgcagcgtgcctgatgggatatattcagtcatggcgtccgaactttgtaagacgatctctgtggcaaggctagaaaagcacaagaatttgttcttaaattataggaatctgcaccattttccattggagttactgaaagatgagggactgcagtacttggagagactctatatgaaaaggaactccctgacatccttgtacctcactgtggaccgaaatcgtctatggtatgtgccgcgccatctctgccagctgcccagcctcaatgagctctccatggctggaaaccgtcttgcatttttgccacttgatttaggtcgatctcgagaactacagtatgtatacgtggataacaacattcacctgaaaggcttgccatcttatctgtacaataaagtcatcgggtgcagtggctgtggtgctcccattcaagtttccgaggtgaagctgctttccttttcatcagggcagcgaaccgttttcctcccagctgaggtgaaggccatagggacggagcatgatcacgtcctccctctgcaggaattggctatgagagggctgtatcatacctaccacagcttgctgaaagatttgaactttctgtctccaatctcattacccagaagtctcctagagctgctgcactgccctctggggcactgtcatcggtgtagtgagcctatgtttaccatcgtctaccccaagctctttcccttgagagagacgccaatggcagggctgcaccagtggaagacaactgttagttttgtggcttactgctgctccacccagtgtctgcagacttttgacctgctgagttgataaacactcaagaacctcaggagcgctgccagcttgacactggggaatccagccagtccagcacactcttccatcctgtcctgtccaatgcgggggcactgcagaactctctagaaatgtcatgattgagcttcagagctaaaatgccttcacccttcccccaagttggaatatatcctcccccaaattaaggacccatttgtcttctgtgtttttcctttttatgtgagtgtgtcttttacagaaaccatttagattgatgggcctccccaaatctaatttaaagcaagtttccggtccttggagaacagtgacttgatcatctagccagattcccttttgaacacacataccttcagtgatgcttcctctcctctcccctcccttgctttccccagagagttatttccctgagaccatgttctccacagtgtctccagtggaaacttgtcagtttttgaggagtttcagcaaaccccgtggcctcaatggtcttgagtagcagggtggggcgcctgagttggcagcaaagtgaggctcccatggaggctcagtgagggtcccagagcacacaccctctggaaagttccagccttgtttatacgttctacagtgtagcaacagacttttgtgagggattttaaaaacaaaaatgtag

SEQ ID NO: 331397 - DNA, 1682 bp, Homo sapiens
cctcgcctggctccctgccccgccccgcccgccgtcccccgcttggcttccagcgccgcttgcgctccggagcgctggctctgctggcgctgagaaatggaccaattttgacaagatatagtgctgcagcgtgcctgatgggatatattcagtcatggcgtccgaactttgtaagacgatctctgtggcaaggctagaaaagcacaagaatttgttcttaaattataggaatctgcaccattttccattggagttactgaaagatgagggactgcagtacttggagagactctatatgaaaaggaactccctgacatccttgccagaaaaccttgctcagaagcttccaaaccttgtggaactatacctgcactcaaataacatagttgtggttccggaagccattgggtctcttgtaaaactccaatgtctggatcttagtgacaatgccttagaaattgtttgcccagaaattggtcgtctgagagctttacgtcatcttcgattagctaataaccaactgcaattcctacctccagaggttggcgatttgaaggagctgcagacactagacatttctaccaatcgtttgctaactttacccgagaggcttcacatgtgcctttctctgcagtacctcactgtggaccgaaatcgtctatggtatgtgccgcgccatctctgccagctgcccagcctcaatgagctctccatggctggaaaccgtcttgcatttttgccacttgatttaggtcgatctcgagaactacagtatgtatacgtggataacaacattcacctgaaaggcttgccatcttatctgtacaataaagtcatcgggtgcagtggctgtggtgctcccattcaagtttccgaggtgaagctgctttccttttcatcaggaattggctatgagagggctgtatcatacctaccacagcttgctgaaaggaagacaactgttagttttgtggcttactgctgctccacccagtgtctgcagacttttgacctgctgagttgataaacactcaagaacctcaggagcgctgccagcttgacactggggaatccagccagtccagcacactcttccatcctgtcctgtccaatgcgggggcactgcagaactctctagaaatgtcatgattgagcttcagagctaaaatgccttcacccttcccccaagttggaatatatcctcccccaaattaaggacccatttgtcttctgtgtttttcctttttatgtgagtgtgtcttttacagaaaccatttagattgatgggcctccccaaatctaatttaaagcaagtttccggtccttggagaacagtgacttgatcatctagccagattcccttttgaacacacataccttcagtgatgcttcctctcctctcccctcccttgctttccccagagagttatttccctgagaccatgttctccacagtgtctccagtggaaacttgtcagtttttgaggagtttcagcaaaccccgtggcctcaatggtcttgagtagcagggtggggcgcctgagttggcagcaaagtgaggctcccatggaggctcagtgagggtcccagagcacacaccctctggaaagttccagccttgtttatacgttctacagtgtagcaacagacttttgtgagggattttaaaaacaaaaatgtag

SEQ ID NO: 331398 - DNA, 304 bp, Homo sapiens
caagtgctttgttggctggtggatgctcaggaaattataatacagaagccaaggtaacagctgaagtgtaccatgtgcctggcaaggtatcaaatgccttatgttaattattttatcttcagagtcctttaaaataagtacatttatttgtacaatgctctgaaaattgttttaatttacccgtgttgcattgttttctttatccttttgtatacatattttttgtacttcttagcatatttatatttcttactctagttttcaaatgttatttactggattttttttttttttgagacggagt

SEQ ID NO: 331399 - DNA, 168 bp, Homo sapiens
gctgcaaacttggggcattttcacactgaatatatgtttctaaaagctttacctggtggtgaagtgtgatactgcaagcctccctctttttggcattttaatcctaaacaaaaagtaaaatcaagtttctggaattcaggctcccataagctagtgccacctatgccc

SEQ ID NO: 331400 - DNA, 1888 bp, Homo sapiens
ccgggccgcgcctgggcgaacggccggagcgggctgggctgggcccgggatggcggtggccctggcgccggtcccggtggcgccccgcgcgagttcctgagctggtgccaggcaggtgacacctcctgcagcccccagcatgcgggcaggcccaggccccaccgttacattggccctggtgctggcggtggcatgggccatggagctcaagcccacagcaccacccatcttcactggccggccctttgtggtagcgtgggacgtgcccacacaggactgtggcccacgcctcaaggtgccactggacctgaatgcctttgatgtgcaggcctcacctaatgagggttttgtgaaccagaatattaccatcttctaccgcgaccgtctaggcctgtatccacgcttcgattctgccggaaggtctgtgcatggtggtgtgccacagaatgtcagcctttgggcacaccggaagatgctgcagaaacgtgtggagcactacattcggacacaggagtctgcggggctggcggtcatcgactgggaggactggcgacctgtgtgggtgcgcaactggcaggacaaagatgtgtatcgccggttatcacgccagctagtggccagtcgtcaccctgactggcctccagaccgcatagtcaaacaggcacaatatgagtttgagttcgcagcacagcagttcatgctggagacactgcgttatgtcaaggcagtgcggccccggcacctctggggcttctacctctttcctgactgctacaatcatgattatgtgcagaactgggagagctacacaggccgctgccctgatgttgaggtggcccgcaatgaccagctggcctggctgtgggctgagagcacggccctcttcccgtctgtctacctggacgagacacttgcttcctcccgccatggccgcaactttgtgagcttccgtgttcaggaggcccttcgtgtggctcgcacccaccatgccaaccatgcactcccagtctacgtcttcacacgacccacctacagccgcaggctcacggggcttagtgagatggacctcatctctaccattggcgagagtgcggccctgggcgcagctggtgtcatcctctggggtgacgcggggtacaccacaagcacggagacctgccagtacctcaaagattacctgacacggctgctggtcccctacgtggtcaatgtgtcctgggccacccaatattgcagccgggcccagtgccatggccatgggcgctgtgtgcgccgcaaccccagtgccagtaccttcctgcatctcagcaccaacagtttccgcctagtgcctggccatgcacctggtgaaccccagctgcgacctgtgggggagctcagttgggccgacattgaccacctgcagacacacttccgctgccagtgctacttgggctggagtggtgagcaatgccagtgggaccataggcaggcagctggaggtgccagcgaggcctgggctgggtcccacctcaccagtctgctggctctggcagccctggcctttacctggaccttgtaggggtctcctgcctagctgcctagcaagctggcctctaccacaagggctctcttaggcatgtaggaccctgcagggggtggacaaactggagtctggagtgggcagagcccccaggaagcccaggagggcatccataccagctcgcacccccctgttctaagggggaggggaagtccctgggaggccccttctctccctgccagaggggaaggagggtacagctgggctggggaggacctgaccctactcccttgccctagatagtttattattattattattttggggtctcttttgtaaattaaacataaaacaattgcttctctg

SEQ ID NO: 331401 - DNA, 252 bp, Homo sapiens
caagtcctcggcgagctgcccaacgggcagcagctggcgcaagtagcctagctggagaggctcaccccaggaaggagggaggccaccgacctactgggccgacggactcccacacagggctggcggcgccgcggagctgggaggactgaaccaccggcctcgggctgcaggggaaacatttcaggctgactggcgctcgtggctgagactcccatagaaagcccggctcagaggggcattagggtcctaaat

SEQ ID NO: 331402 - DNA, 1891 bp, Homo sapiens
tgggcggtgtgcctgtgcgccggatccgggtggcgcgccgcgcgagttccttgagctggtgccaggtccagggtaacacgctccgtggcgaggcccaccaggcggtgctggggcacggccgcagagccgccaactgttgagcattgaggccctggctgctcggtcggctgatacatggcgcacactgagaggcctcaacgtcaccatctagcgaaccagtccatacttcactggccgtcgttttacaagtcgtggtgtgactgtcccaatagtgagttgctgttcgcagtcctactaggtgccactggacctgaatgcctttgatgtgcaggcctcacctaatgagggttttgtgaaccagaatattaccatcttctaccgcgaccgtctaggcctgtatccacgcttcgattctgccggaaggtctgtgcatggtggtgtgccacagaatgtcagcctttgggcacaccggaagatgctgcagaaacgtgtggagcactacattcggacacaggagtctgcggggctggcggtcatcgactgggaggactggcgacctgtgtgggtgcgcaactggcaggacaaagatgtgtatcgccggttatcacgccagctagtggccagtcgtcaccctgactggcctccagaccgcatagtcaaacaggcacaatatgagtttgagttcgcagcacagcagttcatgctggagacactgcgttatgtcaaggcagtgcggccccggcacctctggggcttctacctctttcctgactgctacaatcatgattatgtgcagaactgggagagctacacaggccgctgccctgatgttgaggtggcccgcaatgaccagctggcctggctgtgggctgagagcacggccctcttcccgtctgtctacctggacgagacacttgcttcctcccgccatggccgcaactttgtgagcttccgtgttcaggaggcccttcgtgtggctcgcacccaccatgccaaccatgcactcccagtctacgtcttcacacgacccacctacagccgcaggctcacggggcttagtgagatggacctcatctctaccattggcgagagtgcggccctgggcgcagctggtgtcatcctctggggtgacgcggggtacaccacaagcacggagacctgccagtacctcaaagattacctgacacggctgctggtcccctacgtggtcaatgtgtcctgggccacccaatattgcagccgggcccagtgccatggccatgggcgctgtgtgcgccgcaaccccagtgccagtaccttcctgcatctcagcaccaacagtttccgcctagtgcctggccatgcacctggtgaaccccagctgcgacctgtgggggagctcagttgggccgacattgaccacctgcagacacacttccgctgccagtgctacttgggctggagtggtgagcaatgccagtgggaccataggcaggcagctggaggtgccagcgaggcctgggctgggtcccacctcaccagtctgctggctctggcagccctggcctttacctggaccttgtaggggtctcctgcctagctgcctagcaagctggcctctaccacaagggctctcttaggcatgtaggaccctgcagggggtggacaaactggagtctggagtgggcagagcccccaggaagcccaggagggcatccataccagctcgcacccccctgttctaagggggaggggaagtccctgggaggccccttctctccctgccagaggggaaggagggtacagctgggctggggaggacctgaccctactcccttgccctagatagtttattattattattattttggggtctcttttgtaaattaaacataaaacaattgcttctctg

SEQ ID NO: 331403 - DNA, 1639 bp, Homo sapiens
caagtcctcggcgagctgcccaacgggcagcagctggcgcaagtagcctagctggagaggctcaccccaggaaggagggaggccaccgacctactgggccgacggactcccacacagttcctgagctggtgccaggcaggtgacacctcctgcagcccccagcatgcgggcaggcccaggccccaccgttacattggccctggtgctggcggtggcatgggccatggagctcaagcccacagcaccacccatcttcactggccggccctttgtggtagcgtgggacgtgcccacacaggactgtggcccacgcctcaaggtgccactggacctgaatgcctttgatgtgcaggcctcacctaatgagggttttgtgaaccagaatattaccatcttctaccgcgaccgtctaggcctgtatccacgcttcgattctgccggaaggtctgtgcatggtggtgtgccacagaatgtcagcctttgggcacaccggaagatgctgcagaaacgtgtggagcactacattcggacacaggagtctgcggggctggcggtcatcgactgggaggactggcgacctgtgtgggtgcgcaactggcaggacaaagatgtgtatcgccggttatcacgccagctagtggccagtcgtcaccctgactggcctccagaccgcatagtcaaacaggcacaatatgagtttgagttcgcagcacagcagttcatgctggagacactgcgttatgtcaaggcagtgcggccccggcacctctggggcttctacctctttcctgactgctacaatcatgattatgtgcagaactgggagagctacacaggccgctgccctgatgttgaggtggcccgcaatgaccagctggcctggctgtgggctgagagcacggagacctgccagtacctcaaagattacctgacacggctgctggtcccctacgtggtcaatgtgtcctgggccacccaatattgcagccgggcccagtgccatggccatgggcgctgtgtgcgccgcaaccccagtgccagtaccttcctgcatctcagcaccaacagtttccgcctagtgcctggccatgcacctggtgaaccccagctgcgacctgtgggggagctcagttgggccgacattgaccacctgcagacacacttccgctgccagtgctacttgggctggagtggtgagcaatgccagtgggaccataggcaggcagctggaggtgccagcgaggcctgggctgggtcccacctcaccagtctgctggctctggcagccctggcctttacctggaccttgtaggggtctcctgcctagctgcctagcaagctggcctctaccacaagggctctcttaggcatgtaggaccctgcagggggtggacaaactggagtctggagtgggcagagcccccaggaagcccaggagggcatccataccagctcgcacccccctgttctaagggggaggggaagtccctgggaggccccttctctccctgccagaggggaaggagggtacagctgggctggggaggacctgaccctactcccttgccctagatagtttattattattattattttggggtctcttttgtaaattaaacataaaacaattgcttctctg

SEQ ID NO: 331404 - DNA, 2338 bp, Homo sapiens
  misc_feature (1924)..(1924): n is a, c, g, or t
  misc_feature (1926)..(1926): n is a, c, g, or t
  misc_feature (1936)..(1936): n is a, c, g, or t
  misc_feature (1939)..(1939): n is a, c, g, or t
  misc_feature (1941)..(1941): n is a, c, g, or t
caagtcctcggcgagctgcccaacgggcagcagctggcgcaagtagcctagctggagaggctcaccccaggaaggagggaggccaccgacctactgggccgacggactcccacacagttcctgagctggtgccaggcaggtgacacctcctgcagcccccagcatgcgggcaggcccaggccccaccgttacattggccctggtgctggcggtggcatgggccatggagctcaagcccacagcaccacccatcttcactggccggccctttgtggtagcgtgggacgtgcccacacaggactgtggcccacgcctcaaggtgccactggacctgaatgcctttgatgtgcaggcctcacctaatgagggttttgtgaaccagaatattaccatcttctaccgcgaccgtctaggcctgtatccacgcttcgattctgccggaaggtctgtgcatggtggtgtgccacagaatgtcagcctttgggcacaccggaagatgctgcagaaacgtgtggagcactacattcggacacaggagtctgcggggctggcggtcatcgactgggaggactggcgacctgtgtgggtgcgcaactggcaggacaaagatgtgtatcgccggttatcacgccagctagtggccagtcgtcaccctgactggcctccagaccgcatagtcaaacaggcacaatatgagtttgagttcgcagcacagcagttcatgctggagacactgcgttatgtcaaggcagtgcggccccggcacctctggggcttctacctctttcctgactgctacaatcatgattatgtgcagaactgggagagctacacaggccgctgccctgatgttgaggtggcccgcaatgaccagctggcctggctgtgggctgagagcacggccctcttcccgtctgtctacctggacgagacacttgcttcctcccgccatggccgcaactttgtgagcttccgtgttcaggaggcccttcgtgtggctcgcacccaccatgccaaccatgcactcccagtctacgtcttcacacgacccacctacagccgcaggctcacggggcttagtgagatggacctcatctctaccattggcgagagtgcggccctgggcgcagctggtgtcatcctctggggtgacgcggggtacaccacaagcacggagacctgccagtacctcaaagattacctgacacggctgctggtcccctacgtggtcaatgtgtcctgggccacccaatattgcagccgggcccagtgccatggccatgggcgctgtgtgcgccgcaaccccagtgccagtaccttcctgcatctcagcaccaacagtttccgcctagtgcctggccatgcacctggtgaaccccagctgcgacctgtgggggagctcagttgggccgacattgaccacctgcagacacacttccgctgccagtgctacttgggctggagtggtgagcaatgccagtgggaccataggcaggcagctggaggtgccagcgaggcctgggctgggtcccacctcaccagtctgctggctctggcagccctggcctttacctggaccttgtaggggtctcctgcctagctgcctagcaagctggcctctaccacaagggctctcttaggcatgtaggaccctgcagggggtggacaaactggagtctggagtgggcagagcccccaggaagcccaggagggcatccataccagctcgcacccccctgttctaagggggaggggaagtccctgggaggccccttctctccctgccagaggggaaggagggtacagctgggctggggaggacctgaccctactcccttgccctagatagtttattattattattattttggggtctcttttgtaaattaaacataaaacaattgcttctctgaaaaaaaaaaananaaaaaacaanaanancacaaaaacaacaaaaaaaaaaaaaaaaaaaaaaaaaaaaaaaacacaaacaaaaaaaaaaaataccacaagagaggagggggggcggctcgaaataatcactctctccgaccaggggagcgcggccctcaattttggaccccacaccacggtgtgttattacagagggggagcgcacccaatgtagtggacgcttatatcatgtaaaatatacaggagagaggaggagaggcgccgtcattacaataacacacaagagcgtacaggcgggtggcgagacataacacgtcgccacgcgtgagaggcaaccatcactagattgagcggagagaccctcctcctcttgctggcggccggggcagagagaagcacatgggggccggacaccaaatcagcg

SEQ ID NO: 331405 - DNA, 2517 bp, Homo sapiens
  misc_feature (2517)..(2517): n is a, c, g, or t
caagtcctcggcgagctgcccaacgggcagcagctggcgcaagtagcctagctggagaggctcaccccaggaaggagggaggccaccgacctactgggccgacggactcccacacagttcctgagctggtgccaggcaggtgacacctcctgcagcccccagcatgcgggcaggcccaggccccaccgttacattggccctggtgctggcggtggcatgggccatggagctcaagcccacagcaccacccatcttcactggccggccctttgtggtagcgtgggacgtgcccacacaggactgtggcccacgcctcaaggtgccactggacctgaatgcctttgatgtgcaggcctcacctaatgagggttttgtgaaccagaatattaccatcttctaccgcgaccgtctaggcctgtatccacgcttcgattctgccggaaggtctgtgcatggtggtgtgccacagaatgtcagcctttgggcacaccggaagatgctgcagaaacgtgtggagcactacattcggacacaggagtctgcggggctggcggtcatcgactgggaggactggcgacctgtgtgggtgcgcaactggcaggacaaagatgtgtatcgccggttatcacgccagctagtggccagtcgtcaccctgactggcctccagaccgcatagtcaaacaggcacaatatgagtttgagttcgcagcacagcagttcatgctggagacactgcgttatgtcaaggcagtgcggccccggcacctctggggcttctacctctttcctgactgctacaatcatgattatgtgcagaactgggagagctacacaggccgctgccctgatgttgaggtggcccgcaatgaccagctggcctggctgtgggctgagagcacggccctcttcccgtctgtctacctggacgagacacttgcttcctcccgccatggccgcaactttgtgagcttccgtgttcaggaggcccttcgtgtggctcgcacccaccatgccaaccatgcactcccagtctacgtcttcacacgacccacctacagccgcaggctcacggggcttagtgagatggacctcatctctaccattggcgagagtgcggccctgggcgcagctggtgtcatcctctggggtgacgcggggtacaccacaagcacggagacctgccagtacctcaaagattacctgacacggctgctggtcccctacgtggtcaatgtgtcctgggccacccaatattgcagccgggcccagtgccatggccatgggcgctgtgtgcgccgcaaccccagtgccagtaccttcctgcatctcagcaccaacagtttccgcctagtgcctggccatgcacctggtgaaccccagctgcgacctgtgggggagctcagttgggccgacattgaccacctgcagacacacttccgctgccagtgctacttgggctggagtggtgagcaatgccagtgggaccataggcaggcagctggaggtgccagcgaggcctgggctgggtcccacctcaccagtctgctggctctggcagccctggcctttacctggaccttgtaggggtctcctgcctagctgcctagcaagctggcctctaccacaagggctctcttaggcatgtaggaccctgcagggggtggacaaactggagtctggagtgggcagagcccccaggaagcccaggagggcatccataccagctcgcacccccctgttctaagggggaggggaagtccctgggaggccccttctctccctgccagaggggaaggagggtacagctgggctggggaggacctgaccctactcccttgccctagatagtttattattattattattttggggtctcttttgtaaattaaacataaaacaattgcttctctgaaaaaaacaccacaaaaacacaacaacacacaaaaccttttctgggcccggcctcgcgcgccccccggaaaaacaacgtttcttctcaacaaacccactatcgcggtcgccgtggcaggacgccagcgggggcgccccccccaaagtaagcggtctaacacgcatgagaaccaccagggcggccccaccatgacggcagctggttgccccccaaaaggggagagaaaacccggggggcccaaatcgccacacaacagcgagcggcaggggaggacactctcacacgcagaccaacactttatcaaacaaacacaaagatcagcggctgcggtcgcggggggtccaacccaacaccgccgcgagagcgtggtctcctgtgggaagaaaaaacaaacttccaccgaacgaagaacggggacgcaactctcccagcaggaaaaagagcacacaaatcaacaagccgggcggcagacctccaaaccacgaacagaccgaggaggggagtcgccccaccaacacgccgaacaagacctcgcgacagacattcccgcaaaaacattgatcgacgccccgccgaggagatcagtcagcggagtgggcgatcn

SEQ ID NO: 331406 - DNA, 1301 bp, Homo sapiens
caagtcctcggcgagctgcccaacgggcagcagctggcgcaagtagcctagctggagaggctcaccccaggaaggagggaggccaccgacctactgggccgacggactcccacacagttcctgagctggtgccaggcaggtgacacctcctgcagcccccagcatgcgggcaggcccaggccccaccgttacattggccctggtgctggcggtggcatgggccatggagctcaagcccacagcaccacccatcttcactggccggccctttgtggtagcgtgggacgtgcccacacaggactgtggcccacgcctcaaggtgccactggacctgaatgcctttgatgtgcaggcctcacctaatgagggttttgtgaaccagaatattaccatcttctaccgcgaccgtctaggcctgtatccacgcttcgattctgccggaaggtctgtgcatggtggtgtgccacagaatgtcagcctttgggcacaccggaagatgctgcagaaacgtgtggagcactacattcggacacaggagtctgcggggctggcggtcatcgactgggaggactggcgacctgtgtgggtgcgcaactggcaggacaaagatgtgtatcgccggttatcacgccagctagtggccagtcgtcaccctgactggcctccagaccgcatagtcaaacaggcacaatatgagtttgagttcgcagcacagcagttcatgctggagacactgcgttatgtcaaggcagtgcggccccggcacctctggggcttctacctctttcctgactgctacaatcatgattatgtgcagaactgggagagctacacaggccgctgccctgatgttgaggtggcccgcaatgaccagctggcctggctgtgggctgagagcacggccctcttcccgtctgtctacctggacgagacacttgcttcctcccgccatggcctttacctggaccttgtaggggtctcctgcctagctgcctagcaagctggcctctaccacaagggctctcttaggcatgtaggaccctgcagggggtggacaaactggagtctggagtgggcagagcccccaggaagcccaggagggcatccataccagctcgcacccccctgttctaagggggaggggaagtccctgggaggccccttctctccctgccagaggggaaggagggtacagctgggctggggaggacctgaccctactcccttgccctagatagtttattattattattattttggggtctcttttgtaaattaaacataaaacaattgcttctctg

SEQ ID NO: 331407 - DNA, 1912 bp, Homo sapiens
caagtcctcggcgagctgcccaacgggcagcagctggcgcaagtagcctagctggagaggctcaccccaggaaggagggaggccaccgacctactgggccgacggactcccacacagttcctgagctggtgccaggcaggtgacacctcctgcagcccccagcatgcgggcaggcccaggccccaccgttacattggccctggtgctggcggtggcatgggccatggagctcaagcccacagcaccacccatcttcactggccggccctttgtggtagcgtgggacgtgcccacacaggactgtggcccacgcctcaaggtgccactggacctgaatgcctttgatgtgcaggcctcacctaatgagggttttgtgaaccagaatattaccatcttctaccgcgaccgtctaggcctgtatccacgcttcgattctgccggaaggtctgtgcatggtggtgtgccacagaatgtcagcctttgggcacaccggaagatgctgcagaaacgtgtggagcactacattcggacacaggagtctgcggggctggcggtcatcgactgggaggactggcgacctgtgtgggtgcgcaactggcaggacaaagatgtgtatcgccggttatcacgccagctagtggccagtcgtcaccctgactggcctccagaccgcatagtcaaacaggcacaatatgagtttgagttcgcagcacagcagttcatgctggagacactgcgttatgtcaaggcagtgcggccccggcacctctggggcttctacctctttcctgactgctacaatcatgattatgtgcagaactgggagagctacacaggccgctgccctgatgttgaggtggcccgcaatgaccagctggcctggctgtgggctgagagcacggccctcttcccgtctgtctacctggacgagacacttgcttcctcccgccatggccgcaactttgtgagcttccgtgttcaggaggcccttcgtgtggctcgcacccaccatgccaaccatgcactcccagtctacgtcttcacacgacccacctacagccgcaggctcacggggcttagtgagatggacctcatctctaccattggcgagagtgcggccctgggcgcagctggtgtcatcctctggggtgacgcggggtacaccacaagcacggagacctgccagtacctcaaagattacctgacacggctgctggtcccctacgtggtcaatgtgtcctgggccacccaatattgcagccgggcccagtgccatggccatgggcgctgtgtgcgccgcaaccccagtgccagtaccttcctgcatctcagcaccaacagtttccgcctagtgcctggccatgcacctggtgaaccccagctgcgacctgtgggggagctcagttgggccgacattgaccacctgcagacacacttccgctgccagtgctacttgggctggagtggtgagcaatgccagtgggaccataggcaggcagctggaggtgccagcgaggcctgggctgggtcccacctcaccagtctgctggctctggcagccctggcctttacctggaccttgtaggggtctcctgcctagctgcctagcaagctggcctctaccacaagggctctcttaggcatgtaggaccctgcagggggtggacaaactggagtctggagtgggcagagcccccaggaagcccaggagggcatccataccagctcgcacccccctgttctaagggggaggggaagtccctgggaggccccttctctccctgccagaggggaaggagggtacagctgggctggggaggacctgaccctactcccttgccctagatagtttattattattattattttggggtctcttttgtaaattaaacataaaacaattgcttctctg

SEQ ID NO: 331408 - DNA, 1990 bp, Homo sapiens
caagtcctcggcgagctgcccaacgggcagcagctggcgcaagtagcctagctggagaggctcaccccaggaaggagggaggccaccgacctactgggccgacggactcccacacagttcctgagctggtgccaggcaggtgacacctcctgcagcccccagcatgcgggcaggcccaggccccaccgttacattggccctggtgctggcggtggcatgggccatggagctcaagcccacagcaccacccatcttcactggccggccctttgtggtagcgtgggacgtgcccacacaggactgtggcccacgcctcaaggtgccactggacctgaatgcctttgatgtgcaggcctcacctaatgagggttttgtgaaccagaatattaccatcttctaccgcgaccgtctaggcctgtatccacgcttcgattctgccggaaggtctgtgcatggtggtgtgccacagaatgtcagcctttgggcacaccggaagatgctgcagaaacgtgtggagcactacattcggacacaggagtctgcggggctggcggtcatcgactgggaggactggcgacctgtgtgggtgccactggacctgaatgcctttgatgtgcaggcctcacctaatgagggttttgtgaaccagaatattaccatcttctaccgcaactggcaggacaaagatgtgtatcgccggttatcacgccagctagtggccagtcgtcaccctgactggcctccagaccgcatagtcaaacaggcacaatatgagtttgagttcgcagcacagcagttcatgctggagacactgcgttatgtcaaggcagtgcggccccggcacctctggggcttctacctctttcctgactgctacaatcatgattatgtgcagaactgggagagctacacaggccgctgccctgatgttgaggtggcccgcaatgaccagctggcctggctgtgggctgagagcacggccctcttcccgtctgtctacctggacgagacacttgcttcctcccgccatggccgcaactttgtgagcttccgtgttcaggaggcccttcgtgtggctcgcacccaccatgccaaccatgcactcccagtctacgtcttcacacgacccacctacagccgcaggctcacggggcttagtgagatggacctcatctctaccattggcgagagtgcggccctgggcgcagctggtgtcatcctctggggtgacgcggggtacaccacaagcacggagacctgccagtacctcaaagattacctgacacggctgctggtcccctacgtggtcaatgtgtcctgggccacccaatattgcagccgggcccagtgccatggccatgggcgctgtgtgcgccgcaaccccagtgccagtaccttcctgcatctcagcaccaacagtttccgcctagtgcctggccatgcacctggtgaaccccagctgcgacctgtgggggagctcagttgggccgacattgaccacctgcagacacacttccgctgccagtgctacttgggctggagtggtgagcaatgccagtgggaccataggcaggcagctggaggtgccagcgaggcctgggctgggtcccacctcaccagtctgctggctctggcagccctggcctttacctggaccttgtaggggtctcctgcctagctgcctagcaagctggcctctaccacaagggctctcttaggcatgtaggaccctgcagggggtggacaaactggagtctggagtgggcagagcccccaggaagcccaggagggcatccataccagctcgcacccccctgttctaagggggaggggaagtccctgggaggccccttctctccctgccagaggggaaggagggtacagctgggctggggaggacctgaccctactcccttgccctagatagtttattattattattattttggggtctcttttgtaaattaaacataaaacaattgcttctctg

SEQ ID NO: 331409 - DNA, 1211 bp, Homo sapiens
aacttatacggcgtgtacgaggctgggtggtgatgcgttatgtcaaggcagtgcggccccggcacctctggggcttctacctctttcctgactgctacaatcatgattatgtgcagaactgggagagctacacaggccgctgccctgatgttgaggtggcccgcaatgaccagctggcctggctgtgggctgagagcacggccctcttcccgtctgtctacctggacgagacacttgcttcctcccgccatggccgcaactttgtgagcttccgtgttcaggaggcccttcgtgtggctcgcacccaccatgccaaccatgcactcccagtctacgtcttcacacgacccacctacagccgcaggctcacggggcttagtgagatggacctcatctctaccattggcgagagtgcggccctgggcgcagctggtgtcatcctctggggtgacgcggggtacaccacaagcacggagacctgccagtacctcaaagattacctgacacggctgctggtcccctacgtggtcaatgtgtcctgggccacccaatattgcagccgggcccagtgccatggccatgggcgctgtgtgcgccgcaaccccagtgccagtaccttcctgcatctcagcaccaacagtttccgcctagtgcctggccatgcacctggtgaaccccagctgcgacctgtgggggagctcagttgggccgacattgaccacctgcagacacacttccgctgccagtgctacttgggctggagtggtgagcaatgccagtgggaccataggcaggcagctggaggtgccagcgaggcctgggctgggtcccacctcaccagtctgctggctctggcagccctggcctttacctggaccttgtaggggtctcctgcctagctgcctagcaagctggcctctaccacaagggctctcttaggcatgtaggaccctgcagggggtggacaaactggagtctggagtgggcagagcccccaggaagcccaggagggcatccataccagctcgcacccccctgttctaagggggaggggaagtccctgggaggccccttctctccctgccagaggggaaggagggtacagctgggctggggaggacctgaccctactcccttgccctagatagtttattattattattattttggggtctcttttgtaaattaaacataaaacaattgcttctctg

SEQ ID NO: 331410 - DNA, 2471 bp, Homo sapiens
caagtcctcggcgagctgcccaacgggcagcagctggcgcaagtagcctagctggagaggctcaccccaggaaggagggaggccaccgacctactgggccgacggactcccacacagttcctgagctggtgccaggcaggtgacacctcctgcagcccccagcatgcgggcaggcccaggccccaccgttacattggccctggtgctggcggtggcatgggccatggagctcaagcccacagcaccacccatcttcactggccggccctttgtggtagcgtgggacgtgcccacacaggactgtggcccacgcctcaaggtgccactggacctgaatgcctttgatgtgcaggcctcacctaatgagggttttgtgaaccagaatattaccatcttctaccgcgaccgtctaggcctgtatccacgcttcgattctgccggaaggtctgtgcatggtggtgtgccacagaatgtcagcctttgggcacaccggaagatgctgcagaaacgtgtggagcactacattcggacacaggagtctgcggggctggcggtcatcgactgggaggactggcgacctgtgtgggtgcgcaactggcaggacaaagatgtgtatcgccggttatcacgccagctagtggccagtcgtcaccctgactggcctccagaccgcatagtcaaacaggcacaatatgagtttgagttcgcagcacagcagttcatgctggagacactgcgttatgtcaaggcagtgcggccccggcacctctggggcttctacctctttcctgactgctacaatcatgattatgtgcagaactgggagagctacacaggccgctgccctgatgttgaggtggcccgcaatgaccagctggcctggctgtgggctgagagcacggccctcttcccgtctgtctacctggacgagacacttgcttcctcccgccatggccgcaactttgtgagcttccgtgttcaggaggcccttcgtgtggctcgcacccaccatgccaaccatgcactcccagtctacgtcttcacacgacccacctacagccgcaggctcacggggcttagtgagatggacctcatctctaccattggcgagagtgcggccctgggcgcagctggtgtcatcctctggggtgacgcggggtacaccacaagcacggagacctgccagtacctcaaagattacctgacacggctgctggtcccctacgtggtcaatgtgtcctgggccacccaatattgcagccgggcccagtgccatggccatgggcgctgtgtgcgccgcaaccccagtgccagtaccttcctgcatctcagcaccaacagtttccgcctagtgcctggccatgcacctggtgaaccccagctgcgacctgtgggggagctcagttgggccgacattgaccacctgcagacacacttccgctgccagtgctacttgggctggagtggtgagcaatgccagtgggaccataggcaggcagctggaggtgccagcgaggcctgggctgggtcccacctcaccagtctgctggctctggcagccctggcctttacctggaccttgtaggggtctcctgcctagctgcctagcaagctggcctctaccacaagggctctcttaggcatgtaggaccctgcagggggtggacaaactggagtctggagtgggcagagcccccaggaagcccaggagggcatccataccagctcgcacccccctgttctaagggggaggggaagtccctgggaggccccttctctccctgccagaggggaaggagggtacagctgggctggggaggacctgaccctactcccttgccctagatagtttattattattattattttggggtctcttttgtaaattaaacataaaacaattgcttctctgaaagagaagaagacatagacacaaaaaacacagacaactaatcaagaaatatcagaaggaaaaggaatatcccatgaagcaacgtggaaacgagaatgaaaaaccctgcggagttggatccacagaataccttcagcgtcgagctgacatatctgaacacccatgtgctggctgaagaaggacacgatgttcgaaaagaataaaggcatgaaaagaacaagaaagaaaatacggagccctaaagaccaaggttaaacacaacataatggaaggaaaagcccaattcaaaatctaccataggaaacatatgtaaacaggaacaaaacagaccaatatcgagaacatgttggagaaagaacacaagacagagaagaaacaaaagccagaaaaaagcacagtaaataaacaggcacacgacagaaagtaaaagaaacatacacaagagaacaatgcaagcgaacagaaacccaagacaaaaactacagaattacaacggcaccaactgaagaaagaaagacatgagaaaaagtaaacacagttacacaataacaaagaacta

SEQ ID NO: 331411 - DNA, 387 bp, Homo sapiens
gctgtctcaaaccttgatcttttccagttgcaagccactgggcactcaccatttgtctctcttggaattacccacaccatgctgccaacttgtatctgactcctccttcaaagccatgctcgacatgtacagttgtgttaagtaggtcgtcagcctgcccaaatacatatcagcattcacctaccttccttttctatgacggctttgctgcttttctcttttcccatgtgtttacctccttctcctctgatatgttttagatttctgtccccatgcaagtcttatgttgaattgtaatccccagtgttggaggtaaggcctggtgggaggtgattaggtcatgggggcagatttcccccttgctgttcttgtgatagtgagttctca

SEQ ID NO: 331412 - DNA, 271 bp, Homo sapiens
ctgtaacagttggctgtcccattgcataatttatttttattgccaagtaggagtgggtgaactgttccagatcacatcaaaacaccactgtaatcttaaactatttttcattatgtataggtttttcagagagcttactcatttgagtttgaaaatatctgaccagaactcccaatgagctattctcctgaactctgaggcaaaccacttagatgaaactggcagtccttccaccacaggaaaaggaagacagctgataaggtacgaatag

SEQ ID NO: 331413 - DNA, 3482 bp, Homo sapiens
aagaccttaccccatgaccccagcttcagatgtggtctttggaaacagaggtcgaaggaaagtaaggagctgagagctcacattcataggtgccgccagccttcgtgcatcttcttgcatcatctctaaggagctcctctaattacaccatgcccgtcaccccatgagggatcagagaagggatgagtcttctaaactctatattcgctgtgagtccaggttgtaagggggagcactgtggatgcatcctattgcactccagctgatgacaccaaagcttaggtgtttgctgaaagttcttgatgttgtgacttaccacccctgcctcacaactgcagacataaggggactatggattgcttagcaggaaaggcactggttctcaagggcggctgcccttgggaatcttctggtcccaaccagaaagactgtggcttgattttctcaggtgcagcccagccgtagggccttttcagagcaccccctggttattgcaacattcatcaaagtttctagaacctctggcctaaaggaagggcctggtgggatctacttggcactcgctggggggccaccccccagtgccactctcactaggcctctgattgcacttgtgtaggatgaagctggtgggtgatgggaactcagcacctcccctcaggcagaaaagaatcatctgtggagcttcaaaagaaggggcctggagtctctgcagaccaattcaacccaaatctcgggggctctttcatgattctaatgggcaaccagggttgaaacccttatttctagggtcttcagttgtacaagactgtgggtctgtaccagagcccccgtcagagtagaataaaaggctgggtagggtagagattcccatgtgcagtggagagaacaatctgcagtcactgataagcctgagacttggctcatttcaaaagcgttcaattcatcctcaccagcagttcagctggaaaggggcaaatacccccacctgagctttgaaaacgccctgggaccctctgcattctctaagtaagttatagaaaccagtctcttccctcctttgtgagtgagctgctattccacgtaggcaacacctgttgaaattgccctcaatgtctactctgcatttctttcttgtgataagcacacacttttattgcaacataatgatctgctcacatttccttgcctgggggctgtaaaaccttacagaacagaaatccttgcctctttcaccagccacacctgccataccaggggtacagctttgtactattgaagacacagacaggatttttaaatgtaaatctatttttgtaactttgttgcgggatatagttctctttatgtagcactgaactttgtacaatatatttttagaaactcatttttctactaaaacaaacacagtttactttagagagactgcaatagaatcaaaatttgaaactgaaatctttgtttaaaagggttaagttgaggcaagaggaaagccctttctctctcttataaaaaggcacaacctcattggggagctaagctaggtcattgtcatggtgaagaagagaagcatcgtttttatatttaggaaattttaaaagatgatggaaagcacatttagcttggtctgaggcaggttctgttggggcagtgttaatggaaagggctcactgttgttactactagaaaaatccagttgcatgccatactctcatcatctgccagtgtaaccctgtacatgtaagaaaagcaataacatagcactttgttggtttatatatataatgtgacttcaatgcaaattttatttttatatttacaattgatatgcatttaccagtataaactagacatgtctggagagcctaataatgttcagcacactttggttagttcaccaacagtcttaccaagcctgggcccagccaccctagagaagttattcagccctggctgcagtgacatcacctgaggagcttttaaaagcttgaagcccagctacacctcagaccgattaaacgcaaatctctggggctgaaacccaagcattcgtagtttttaaagctcctgaggtcattccaatgtgcggccaaagttgagaactactggcctagggattagccacaaggacatggacttggaggcaaattctgcaggtgtatgtgattctcaggcctagagagctaagacacaaagacctccacatctgtcgctgagagtcaagaacctgaacagagtttccatgaaggttctccaagcactagaagggagagtgtctaaacaatggttgaaaagcaaaggaaatataaaacagacacctctttccatttcctaaggtttctctctttattaagggtggactagtaataaaatataatattcttgctgcttatgcagctgacattgttgccctccctaaagcaaccaagtagcctttatttcccacagtgaaagaaaacgctggcctatcagttacattacaaaaggcagatttcaagaggattgagtaagtagttggatggctttcataaaaacaagaattcaagaagaggattcatgctttaagaaacatttgttatacattcctcacaaattatacctgggataaaaactatgtagcaggcagtgtgttttccttccatgtctctctgcactacctgcagtgtgtcctctgaggctgcaagtctgtcctatctgaattcccagcagaagcactaagaagctccaccctatcacctagcagataaaactatggggaaaacttaaatctgtgcatacatttctggatgcatttacttatctttaaaaaaaaaggaatcctatgacctgatttggccacaaaaataatcttgctgtacaatacaatctcttggaaattaagagatcctatggatttgatgactggtattagaggtgacaatgtaaccgattaacaacagacagcaataacttcgttttagaaacattcaagcaatagctttatagcttcaacatatggtacgttttaaccttgaaagttttgcaatgatgaaagcagtatttgtacaaatgaaaagcagaattctcttttatatggtttatactgttgatcagaaatgttgattgtgcattgagtattaaaaaattagatgtatattattcattgttctttactcatgagtaccttataataataataatgtattctttgttaacaaaaaaaaaaaaaaaaaaaaaaaaaaaattgggggggggctcagggccccagaagaagagtttaaagaacaacagaggtggggccgacggggagccagagagcgagaaaggaaacagtgggaaaagcgggtacaaaagaaaacccggggccaggaaccaaggggagaggacactccaccaaataaacaaaaggcccggggggacaaccgagagttctagaaaaaaattcaaaagggaaccacaggagcaacaggggactacaaaagggagccaaggaggccgaaata

SEQ ID NO: 331414 - DNA, 3089 bp, Homo sapiens
cctggctctgatcttaggcggctctgaacttaggcctggctctgaacttaggcaggtgcagcccagccgtagggccttttcagagcaccccctggttattgcaacattcatcaaagtttctagaacctctggcctaaaggaagggcctggtgggatctacttggcactcgctggggggccaccccccagtgccactctcactaggcctctgattgcacttgtgtaggatgaagctggtgggtgatgggaactcagcacctcccctcaggcagaaaagaatcatctgtggagcttcaaaagaaggggcctggagtctctgcagaccaattcaacccaaatctcgggggctctttcatgattctaatgggcaaccagggttgaaacccttatttctagggtcttcagttgtacaagactgtgggtctgtaccagagcccccgtcagagtagaataaaaggctgggtagggtagagattcccatgtgcagtggagagaacaatctgcagtcactgataagcctgagacttggctcatttcaaaagcgttcaattcatcctcaccagcagttcagctggaaaggggcaaatacccccacctgagctttgaaaacgccctgggaccctctgcattctctaagtaagttatagaaaccagtctcttccctcctttgtgagtgagctgctattccacgtaggcaacacctgttgaaattgccctcaatgtctactctgcatttctttcttgtgataagcacacacttttattgcaacataatgatctgctcacatttccttgcctgggggctgtaaaaccttacagaacagaaatccttgcctctttcaccagccacacctgccataccaggggtacagctttgtactattgaagacacagacaggatttttaaatgtaaatctatttttgtaactttgttgcgggatatagttctctttatgtagcactgaactttgtacaatatatttttagaaactcatttttctactaaaacaaacacagtttactttagagagactgcaatagaatcaaaatttgaaactgaaatctttgtttaaaagggttaagttgaggcaagaggaaagccctttctctctcttataaaaaggcacaacctcattggggagctaagctaggtcattgtcatggtgaagaagagaagcatcgtttttatatttaggaaattttaaaagatgatggaaagcacatttagcttggtctgaggcaggttctgttggggcagtgttaatggaaagggctcactgttgttactactagaaaaatccagttgcatgccatactctcatcatctgccagtgtaaccctgtacatgtaagaaaagcaataacatagcactttgttggtttatatatataatgtgacttcaatgcaaattttatttttatatttacaattgatatgcatttaccagtataaactagacatgtctggagagcctaataatgttcagcacactttggttagttcaccaacagtcttaccaagcctgggcccagccaccctagagaagttattcagccctggctgcagtgacatcacctgaggagcttttaaaagcttgaagcccagctacacctcagaccgattaaacgcaaatctctggggctgaaacccaagcattcgtagtttttaaagctcctgaggtcattccaatgtgcggccaaagttgagaactactggcctagggattagccacaaggacatggacttggaggcaaattctgcaggtgtatgtgattctcaggcctagagagctaagacacaaagacctccacatctgtcgctgagagtcaagaacctgaacagagtttccatgaaggttctccaagcactagaagggagagtgtctaaacaatggttgaaaagcaaaggaaatataaaacagacacctctttccatttcctaaggtttctctctttattaagggtggactagtaataaaatataatattcttgctgcttatgcagctgacattgttgccctccctaaagcaaccaagtagcctttatttcccacagtgaaagaaaacgctggcctatcagttacattacaaaaggcagatttcaagaggattgagtaagtagttggatggctttcataaaaacaagaattcaagaagaggattcatgctttaagaaacatttgttatacattcctcacaaattatacctgggataaaaactatgtagcaggcagtgtgttttccttccatgtctctctgcactacctgcagtgtgtcctctgaggctgcaagtctgtcctatctgaattcccagcagaagcactaagaagctccaccctatcacctagcagataaaactatggggaaaacttaaatctgtgcatacatttctggatgcatttacttatctttaaaaaaaaaggaatcctatgacctgatttggccacaaaaataatcttgctgtacaatacaatctcttggaaattaagagatcctatggatttgatgactggtattagaggtgacaatgtaaccgattaacaacagacagcaataacttcgttttagaaacattcaagcaatagctttatagcttcaacatatggtacgttttaaccttgaaagttttgcaatgatgaaagcagtatttgtacaaatgaaaagcagaattctcttttatatggtttatactgttgatcagaaatgttgattgtgcattgagtattaaaaaattagatgtatattattcattgttctttactcatgagtaccttataataataataatgtattctttgttaacaaaaaaaaaaaaaaaaaaaaaaaaaaaattgggggggggctcagggccccagaagaagagtttaaagaacaacagaggtggggccgacggggagccagagagcgagaaaggaaacagtgggaaaagcgggtacaaaagaaaacccggggccaggaaccaaggggagaggacactccaccaaataaacaaaaggcccggggggacaaccgagagttctagaaaaaaattcaaaagggaaccacaggagcaacaggggactacaaaagggagccaaggaggccgaaata

SEQ ID NO: 331415 - DNA, 2283 bp, Homo sapiens
ctattgaagacacagacaggatttttaaatgtacaaagctgtacccctggtatggcaggggtacagctttgtactattgaagacacagacaggatttttaaatgtaaatctatttttgtaactttgttgcgggatatagttctctttatgtagcactgaactttgtacaatatatttttagaaactcatttttctactaaaacaaacacagtttactttagagagactgcaatagaatcaaaatttgaaactgaaatctttgtttaaaagggttaagttgaggcaagaggaaagccctttctctctcttataaaaaggcacaacctcattggggagctaagctaggtcattgtcatggtgaagaagagaagcatcgtttttatatttaggaaattttaaaagatgatggaaagcacatttagcttggtctgaggcaggttctgttggggcagtgttaatggaaagggctcactgttgttactactagaaaaatccagttgcatgccatactctcatcatctgccagtgtaaccctgtacatgtaagaaaagcaataacatagcactttgttggtttatatatataatgtgacttcaatgcaaattttatttttatatttacaattgatatgcatttaccagtataaactagacatgtctggagagcctaataatgttcagcacactttggttagttcaccaacagtcttaccaagcctgggcccagccaccctagagaagttattcagccctggctgcagtgacatcacctgaggagcttttaaaagcttgaagcccagctacacctcagaccgattaaacgcaaatctctggggctgaaacccaagcattcgtagtttttaaagctcctgaggtcattccaatgtgcggccaaagttgagaactactggcctagggattagccacaaggacatggacttggaggcaaattctgcaggtgtatgtgattctcaggcctagagagctaagacacaaagacctccacatctgtcgctgagagtcaagaacctgaacagagtttccatgaaggttctccaagcactagaagggagagtgtctaaacaatggttgaaaagcaaaggaaatataaaacagacacctctttccatttcctaaggtttctctctttattaagggtggactagtaataaaatataatattcttgctgcttatgcagctgacattgttgccctccctaaagcaaccaagtagcctttatttcccacagtgaaagaaaacgctggcctatcagttacattacaaaaggcagatttcaagaggattgagtaagtagttggatggctttcataaaaacaagaattcaagaagaggattcatgctttaagaaacatttgttatacattcctcacaaattatacctgggataaaaactatgtagcaggcagtgtgttttccttccatgtctctctgcactacctgcagtgtgtcctctgaggctgcaagtctgtcctatctgaattcccagcagaagcactaagaagctccaccctatcacctagcagataaaactatggggaaaacttaaatctgtgcatacatttctggatgcatttacttatctttaaaaaaaaaggaatcctatgacctgatttggccacaaaaataatcttgctgtacaatacaatctcttggaaattaagagatcctatggatttgatgactggtattagaggtgacaatgtaaccgattaacaacagacagcaataacttcgttttagaaacattcaagcaatagctttatagcttcaacatatggtacgttttaaccttgaaagttttgcaatgatgaaagcagtatttgtacaaatgaaaagcagaattctcttttatatggtttatactgttgatcagaaatgttgattgtgcattgagtattaaaaaattagatgtatattattcattgttctttactcatgagtaccttataataataataatgtattctttgttaacaaaaaaaaaaaaaaaaaaaaaaaaaaaattgggggggggctcagggccccagaagaagagtttaaagaacaacagaggtggggccgacggggagccagagagcgagaaaggaaacagtgggaaaagcgggtacaaaagaaaacccggggccaggaaccaaggggagaggacactccaccaaataaacaaaaggcccggggggacaaccgagagttctagaaaaaaattcaaaagggaaccacaggagcaacaggggactacaaaagggagccaaggaggccgaaata

SEQ ID NO: 331416 - DNA, 3379 bp, Homo sapiens
aagaccttaccccatgaccccagcttcagatgtggtctttggaaacagaggtcgaaggaaagtaaggagctgagagctcacattcataggtgccgccagccttcgtgcatcttcttgcatcatctctaaggagctcctctaattacaccatgcccgtcaccccatgagggatcagagaagggatgagtcttctaaactctatattcgctgtgagtccaggttgtaagggggagcactgtggatgcatcctattgcactccagctgatgacaccaaagcttaggtgtttgctgaaagttcttgatgttgtgacttaccacccctgcctcacaactgcagacataaggggactatggattgcttagcaggaaaggcactggttctcaagggcggctgcccttgggaatcttctggtcccaaccagaaagactgtggcttgattttctcaggtgcagcccagccgtagggccttttcagagcaccccctggttattgcaacattcatcaaagtttctagaacctctggcctaaaggaagggcctggtgggatctacttggcactcgctggggggccaccccccagtgccactctcactaggcctctgattgcacttgtgtaggatgaagctggtgggtgatgggaactcagcacctcccctcaggcagaaaagaatcatctgtggagcttcaaaagaaggggcctggagtctctgcagaccaattcaacccaaatctcgggggctctttcatgattctaatgggcaaccagggttgaaacccttatttctagggtcttcagttgtacaagactgtgggtctgtaccagagcccccgtcagagtagaataaaaggctgggtagggtagagattcccatgtgcagtggagagaacaatctgcagtcactgataagcctgagacttggctcatttcaaaagcgttcaattcatcctcaccagcagttcagctggaaaggggcaaatacccccacctgagctttgaaaacgccctgggaccctctgcattctctaagtaagttatagaaaccagtctcttccctcctttgtgagtgagctgctattccacgtaggcaacacctgttgaaattgccctcaatgtctactctgcatttctttcttgtgataagcacacacttttattgcaacataatgatctgctcacatttccttgcctgggggctgtaaaaccttacagaacagaaatccttgcctctttcaccagccacacctgccataccaggggtacagctttgtactattgaagacacagacaggatttttaaatgtaaatctatttttgtaactttgttgcgggatatagttctctttatgtagcactgaactttgtacaatatatttttagaaactcatttttctactaaaacaaacacagtttactttagagagactgcaatagaatcaaaatttgaaactgaaatctttgtttaaaagggttaagttgaggcaagaggaaagccctttctctctcttataaaaaggcacaacctcattggggagctaagctaggtcattgtcatggtgaagaagagaagcatcgtttttatatttaggaaattttaaaagatgatggaaagcacatttagcttggtctgaggcaggttctgttggggcagtgttaatggaaagggctcactgttgttactactagaaaaatccagttgcatgccatactctcatcatctgccagtgtaaccctgtacatgtaagaaaagcaataacatagcactttgttggtttatatatataatgtgacttcaatgcaaattttatttttatatttacaattgatatgcatttaccagtataaactagacatgtctggagagcctaataatgttcagcacactttggttagttcaccaacagtcttaccaagcctgggcccagccaccctagagaaccaagcattcgtagtttttaaagctcctgaggtcattccaatgtgcggccaaagttgagaactactggcctagggattagccacaaggacatggacttggaggcaaattctgcaggtgtatgtgattctcaggcctagagagctaagacacaaagacctccacatctgtcgctgagagtcaagaacctgaacagagtttccatgaaggttctccaagcactagaagggagagtgtctaaacaatggttgaaaagcaaaggaaatataaaacagacacctctttccatttcctaaggtttctctctttattaagggtggactagtaataaaatataatattcttgctgcttatgcagctgacattgttgccctccctaaagcaaccaagtagcctttatttcccacagtgaaagaaaacgctggcctatcagttacattacaaaaggcagatttcaagaggattgagtaagtagttggatggctttcataaaaacaagaattcaagaagaggattcatgctttaagaaacatttgttatacattcctcacaaattatacctgggataaaaactatgtagcaggcagtgtgttttccttccatgtctctctgcactacctgcagtgtgtcctctgaggctgcaagtctgtcctatctgaattcccagcagaagcactaagaagctccaccctatcacctagcagataaaactatggggaaaacttaaatctgtgcatacatttctggatgcatttacttatctttaaaaaaaaaggaatcctatgacctgatttggccacaaaaataatcttgctgtacaatacaatctcttggaaattaagagatcctatggatttgatgactggtattagaggtgacaatgtaaccgattaacaacagacagcaataacttcgttttagaaacattcaagcaatagctttatagcttcaacatatggtacgttttaaccttgaaagttttgcaatgatgaaagcagtatttgtacaaatgaaaagcagaattctcttttatatggtttatactgttgatcagaaatgttgattgtgcattgagtattaaaaaattagatgtatattattcattgttctttactcatgagtaccttataataataataatgtattctttgttaacaaaaaaaaaaaaaaaaaaaaaaaaaaaattgggggggggctcagggccccagaagaagagtttaaagaacaacagaggtggggccgacggggagccagagagcgagaaaggaaacagtgggaaaagcgggtacaaaagaaaacccggggccaggaaccaaggggagaggacactccaccaaataaacaaaaggcccggggggacaaccgagagttctagaaaaaaattcaaaagggaaccacaggagcaacaggggactacaaaagggagccaaggaggccgaaata

SEQ ID NO: 331417 - DNA, 3137 bp, Homo sapiens
aagaccttaccccatgaccccagcttcagatgtggtctttggaaacagaggtcgaaggaaagtaaggagctgagagctcacattcataggtgccgccagccttcgtgcatcttcttgcatcatctctaaggagctcctctaattacaccatgcccgtcaccccatgagggatcagagaagggatgagtcttctaaactctatattcgctgtgagtccaggttgtaagggggagcactgtggatgcatcctattgcactccagctgatgacaccaaagcttaggtgtttgctgaaagttcttgatgttgtgacttaccacccctgcctcacaactgcagacataaggggactatggattgcttagcaggaaaggcactggttctcaagggcggctgcccttgggaatcttctggtcccaaccagaaagactgtggcttgattttctcaggtgcagcccagccgtagggccttttcagagcaccccctggttattgcaacattcatcaaagtttctagaacctctggcctaaaggaagggcctggtgggatctacttggcactcgctggggggccaccccccagtgccactctcactaggcctctgattgcacttgtgtaggatgaagctggtgggtgatgggaactcagcacctcccctcaggcagaaaagaatcatctgtggagcttcaaaagaaggggcctggagtctctgcagaccaattcaacccaaatctcgggggctctttcatgattctaatgggcaaccagggttgaaacccttatttctagggtcttcagttgtacaagactgtgggtctgtaccagagcccccgtcagagtagaataaaaggctgggtagggtagagattcccatgtgcagtggagagaacaatctgcagtcactgataagcctgagacttggctcatttcaaaagcgttcaattcatcctcaccagcagttcagctggaaaggggcaaatacccccacctgagctttgaaaacgccctgggaccctctgcattctctaagtaagttatagaaaccagtctcttccctcctttgtgagtgagctgctattccacgtaggcaacacctgttgaaattgccctcaatgtctactctgcatttctttcttgtgataagcacacacttttattgcaacataatgatctgctcacatttccttgcctgggggctgtaaaaccttacagaacagaaatccttgcctctttcaccagccacacctgccataccaggggtacagctttgtactattgaagacacagacaggatttttaaatgtaaatctatttttgtaactttgttgcgggatatagttctctttatgtagcactgaactttgtacaatatatttttagaaactcatttttctactaaaacaaacacagtttactttagagagactgcaatagaatcaaaatttgaaactgaaatctttgtttaaaagggttaagttgaggcaagaggaaagccctttctctctcttataaaaaggcacaacctcattggggagctaagctaggtcattgtcatggtgaagaagagaagcatcgtttttatatttaggaaattttaaaagatgatggaaagcacatttagcttggtctgaggcaggttctgttggggcagtgttaatggaaagggctcactgttgttactactagaaaaatccagttgcatgccatactctcatcatctgccagtgtaaccctgtacatgtaagaaaagcaataacatagcactttgttggtttatatatataatgtgacttcaatgcaaattttatttttatatttacaattgatatgcatttaccagtataaactagacatgtctggagagcctaataatgttcagcacactttggttagttcaccaacagtcttaccaagcctgggcccagccaccctagagaagttattcagccctggctgcagtgacatcacctgaggagcttttaaaagcttgaagcccagctacacctcagaccgattaaacgcaaatctctggggctgaaacccaagcattcgtagtttttaaagctcctgaggtcattccaatgtgcggccaaagttgagaactactggcctagggattagccacaaggacatggacttggaggcaaattctgcaggtgtatgtgattctcaggcctagagagctaagacacaaagacctccacatctgtcgctgagagtcaagaacctgaacagagtttccatgaaggttctccaagcactagaagggagagtgtctaaacaatggttgaaaagcaaaggaaatataaaacagacacctctttccatttcctaaggtttctctctttattaagggtggactagtaataaaatataatattcttgctgcttatgcagctgacattgttgccctccctaaagcaaccaagtagcctttatttcccacagtgaaagaaaacgctggcctatcagttacattacaaaaggcagatttcaagaggattgagtaagtagttggatggctttcataaaaacaagaattcaagaagaggattcatgctttaagaaacatttgttatacattcctcacaaattatacctgggataaaaactatgtagcaggcagtgtgttttccttccatgtctctctgcactacctgcagtgtgtcctctgaggctgcaagtctgtcctatctgaattcccagcagaagcactaagaagctccaccctatcacctagcagataaaactatggggaaaacttaaatctgtgcatacatttctggatgcatttacttatctttaaaaaaaaaggaatcctatgacctgatttggccacaaaaataatcttgctgtacaatacaatctcttggaaattaagagatcctatggatttgatgactggtattagaggtgacaatgtaaccgattaacaacagacagcaataacttcgttttagaaacattcaagcaatagctttatagcttcaacatatggtacgttttaaccttgaaagttttgcaatgatgaccgccctctccgtacccctgccccgctcccccctctttctccctgcttcccccttccccccccccccccctgcttgtgcattgagtattaaaaaattagatgtata

SEQ ID NO: 331418 - DNA, 2984 bp, Homo sapiens
aagaccttaccccatgaccccagcttcagatgtggtctttggaaacagaggtcgaaggaaagtaaggagctgagagctcacattcataggtgccgccagccttcgtgcatcttcttgcatcatctctaaggagctcctctaattacaccatgcccgtcaccccatgagggatcagagaagggatgagtcttctaaactctatattcgctgtgagtccaggttgtaagggggagcactgtggatgcatcctattgcactccagctgatgacaccaaagcttaggtgtttgctgaaagttcttgatgttgtgacttaccacccctgcctcacaactgcagacataaggggactatggattgcttagcaggaaaggcactggttctcaagggcggctgcccttgggaatcttctggtcccaaccagaaagactgtggcttgattttctcaggtgcagcccagccgtagggccttttcagagcaccccctggttattgcaacattcatcaaagtttctagaacctctggcctaaaggaagggcctggtgggatctacttggcactcgctggggggccaccccccagtgccactctcactaggcctctgattgcacttgtgtaggatgaagctggtgggtgatgggaactcagcacctcccctcaggcagaaaagaatcatctgtggagcttcaaaagaaggggcctggagtctctgcagaccaattcaacccaaatctcgggggctctttcatgattctaatgggcaaccagggttgaaacccttatttctagggtcttcagttgtacaagactgtgggtctgtaccagagcccccgtcagagtagaataaaaggctgggtagggtagagattcccatgtgcagtggagagaacaatctgcagtcactgataagcctgagacttggctcatttcaaaagcgttcaattcatcctcaccagcagttcagctggaaaggggcaaatacccccacctgagctttgaaaacgccctgggaccctctgcattctctaagtaagttatagaaaccagtctcttccctcctttgtgagtgagctgctattccacgtaggcaacacctgttgaaattgccctcaatgtctactctgcatttctttcttgtgataagcacacacttttattgcaacataatgatctgctcacatttccttgcctgggggctgtaaaaccttacagaacagaaatccttgcctctttcaccagccacacctgccataccaggggtacagctttgtactattgaagacacagacaggatttttaaatgtaaatctatttttgtaactttgttgcgggatatagttctctttatgtagcactgaactttgtacaatatatttttagaaactcatttttctactaaaacaaacacagtttactttagagagactgcaatagaatcaaaatttgaaactgaaatctttgtttaaaagggttaagttgaggcaagaggaaagccctttctctctcttataaaaaggcacaacctcattggggagctaagctaggtcattgtcatggtgaagaagagaagcatcgtttttatatttaggaaattttaaaagatgatggaaagcacatttagcttggtctgaggcaggttctgttggggcagtgttaatggaaagggctcactgttgttactactagaaaaatccagttgcatgccatactctcatcatctgccagtgtaaccctgtacatgtaagaaaagcaataacatagcactttgttggtttatatatataatgtgacttcaatgcaaattttatttttatatttacaattgatatgcatttaccagtataaactagacatgtctggagagcctaataatgttcagcacactttggttagttcaccaacagtcttaccaagcctgggcccagccaccctagagaagttattcagccctggctgcagtgacatcacctgaggagcttttaaaagcttgaagcccagctacacctcagaccgattaaacgcaaatctctggggctgaaacccaagcattcgtagtttttaaagctcctgaggtcattccaatgtgcggccaaagttgagaactactggcctagggattagccacaaggacatggacttggaggcaaattctgcaggtgtatgtgattctcaggcctagagagctaagacacaaagacctccacatctgtcgctgagagtcaagaacctgaacagagtttccatgaaggttctccaagcactagaagggagagtgtctaaacaatggttgaaaagcaaaggaaatataaaacagacacctctttccatttcctaaggtttctctctttattaagggtggactagtaataaaatataatattcttgctgcttatgcagctgacattgttgccctccctaaagcaaccaagtagcctttatttcccacagtgaaagaaaacgctggcctatcagttacattacaaaaggcagatttcaagaggattgagtaagtagttggatggctttcataaaaacaagaattcaagaagaggattcatgctttaagaaacatttgttatacattcctcacaaattatacctgggataaaaactatgtagcaggcagtgtgttttccttccatgtctctctgcactacctgcagtgtgtcctctgaggctgcaagtctgtcctatctgaattcccagcagaagcactaagaagctccaccctatcacctagcagataaaactatggggaaaacttaaatctgtgcatacatttctggatgcatttacttatctttaaaaaaaaaggaatcctatgacctgatatgccattcttgctgaagaatggcatagaagagaagcagagtaaacaaacacactgtgtgtatcattcacactgagaaaagtacagtgaaatgatcatagctctttggctgaaagtacaagatacagttgcttcatacatttaacataagata

SEQ ID NO: 331419 - DNA, 866 bp, Homo sapiens
gcgtagactattggtggatcaggaaaagaaagatgtggcccaaagcctagagaactatacgtccaagtgtcctgggaccatggagcccatcgccctccctggcggcctccaccctatcacctagcagataaaactatggggaaaacttaaatctgtgcatacatttctggatgcatttacttatctttaaaaaaaaaggaatcctatgacctgatttggccacaaaaataatcttgctgtacaatacaatctcttggaaattaagagatcctatggatttgatgactggtattagaggtgacaatgtaaccgattaacaacagacagcaataacttcgttttagaaacattcaagcaatagctttatagcttcaacatatggtacgttttaaccttgaaagttttgcaatgatgaaagcagtatttgtacaaatgaaaagcagaattctcttttatatggtttatactgttgatcagaaatgttgattgtgcattgagtattaaaaaattagatgtatattattcattgttctttactcatgagtaccttataataataataatgtattctttgttaacaaaaaaaaaaaaaaaaaaaaaaaaaaaattgggggggggctcagggccccagaagaagagtttaaagaacaacagaggtggggccgacggggagccagagagcgagaaaggaaacagtgggaaaagcgggtacaaaagaaaacccggggccaggaaccaaggggagaggacactccaccaaataaacaaaaggcccggggggacaaccgagagttctagaaaaaaattcaaaagggaaccacaggagcaacaggggactacaaaagggagccaaggaggccgaaata

SEQ ID NO: 331420 - DNA, 435 bp, Homo sapiens
ttaaaaaaaaaggaatcctatgacctgatttggccacaaaaataatcttgctgtacaatacaatctcttggaaattaagagatcctatggatttgatgactggtattagaggtgacaatgtaaccgattaacaacagacagcaataacttcgttttagaaacattcaagcaatagctttatagcttcaacatatggtacgttttaaccttgaaagttttgcaatgatgaaagcagtatttgtacaaatgaaaagcagaattctcttttatatggtttatactgttgatcagaaatgttgattgtgcattgagtattaaaaaattagatgtatattattcattgttctttactcatgagtaccttataataataataatgtattctttgttaacaatgccatgttggtactagttattaatcatatctaaccaact

SEQ ID NO: 331421 - DNA, 185 bp, Homo sapiens
aaatagtatgctgttgccacgtctgaggctggagcttgaagtctacatggcaggtagtcagaaaaggaaaattaagagcagtctggaatcccatgagggcagaatgaaacctgtttccattcttgttgcctctgaccttggtgttaaacgaggatctttgttatccttttttttttttttttttt

SEQ ID NO: 331422 - DNA, 431 bp, Homo sapiens
cataaacataagtcagatagaacctgatgcttcttaaacatgccatgcctttccaagtctctgtttatttccccacccactgtgctcacacagcacagagcccatatttacaattaacacacatagaggtgcataatctttggcttacatgcctatcccttctctaagctgtgaattcgtactcctctttttatccccaacgcctaatgtgggccagtcacaaaaattggatactcagtaaaggtttgtggaatggctgaatggaataacatattgcaggaatctaaaacgtggctgataaattcatcttgcccttcctcatgatgtccaggtcatgagcttgaatcacctacacaccattcattttgcttactgtcatggtgagatcaacattaagaaccctatctttttatctaaaacatatgtaagct

SEQ ID NO: 331423 - DNA, 191 bp, Homo sapiens
agctccttgttggctgattcagcagttcctcaatggaccttggttctgcccatgtgcagctttcatcctcaggttggatgtgtgatggacataggagttacaggggttacattcaaaatgacaacatccagaggaagaagagaagttgtctctttcttgtgtcccttttttagaatggaagaaacttttct

SEQ ID NO: 331424 - DNA, 568 bp, Homo sapiens
tgggaagagtgcgaccgggaactctatcctggggagcctcgtcttcacctctcggctccgggcccagccagtcaccaagaccagccagagtggcaggaggacatgggacggacaggaggtggtggttgtggacactccttccttcaaccagatgctggatgtcgaaaaggacccatcccggttagaagaggaggtcaagcgctgtttgtcctgctgtgaaaaaggggacacattttttgtcctggtgttccagctgggacgattcactgaagaggacaaaacagctgtggcgaaactggaggccatctttggagcagactttacgaaatacgcgattatgctgttcacccggaaggaagacctaggggcggggaatttggaagacttcatgaagaactcagataacaaagcccttcggcgcatttttaaaaagtgtgggcggcgagtttgtgcttttaacaacaaagaaacaggccaggcccaggaaacccaggtgaaagctcttttaacaaaggtcaatgatctgagaaaagaaagtgggtggtccgggtatccccatacacaggag

SEQ ID NO: 331425 - DNA, 295 bp, Homo sapiens
aggtttaattggctcacagttctgcgggctgtacaggaagctgagcagcttccacttctgcgaatgcctcaggaaacttaaattcacagtggaaggtgaaggagaagtagccatgtcttacatggcccagcccaagcaagagagaaagggggaaggtgctacacacttttaaaacaaccaggtcttgtgataactcactcactatcacgagaacagcaccaaggggaatggtgttaaaccgtttatgagaaaccgtccccatgatccagttgccttccactaggccccaccttca

SEQ ID NO: 331426 - DNA, 290 bp, Homo sapiens
  misc_feature (25)..(25): n is a, c, g, or t
ggcacgagtctgcactcagtttatnccctactcaaatcatataattaaattaaacggtatccctgaaaataaaaagaacattttcagggataccgtttaatttaattatatgatttgtctgcactcagtttattccctactcaaatctcagccccatgttgttctttgttattgtcagaacctggtgagttgttttgaacagaactgttttttccccttcctgtaagacgatgtgactgcacaagagcactgcagtgtttttcataataaacttgtgaactaagaactga

SEQ ID NO: 331427 - DNA, 297 bp, Homo sapiens
  misc_feature (33)..(33): n is a, c, g, or t
  misc_feature (144)..(144): n is a, c, g, or t
agttcacaagtttattatgaaaaacactgcagngctcttgggcagtcacatcgtcttacaggaaggggaaaaaacagttctgttcaaaacaactcaccaggttctgacaataacaaagaacaacatggagctgagatttgatgnagggaataaactgagcccatgttgttctttgttattgtcagaacctggtgagttgttttgaacagaactgttttttccccttcctgtaagacgatgtgactgcacaagagcactgcagtgtttttcataataaacttgtgaactaagaactga

SEQ ID NO: 331428 - DNA, 2070 bp, Homo sapiens
tccatccttcccttcccccaccaccccgccctccgggagccacgcccaaaaagtcaaggcgcttcagttaccagccggctacgtcgcgcctgcgctttgacccccagtttgcgccccaactccggtcgtgcggccgcccggggagggctctgcagttgcgcagcttgctccccggcccttttcccctccgctccccgccgcctcctgacgccgggcgtgacgtcaccacgcccggcggccgccattacagagagccgagctctggagcctcagcgagcggaggaggaggcgcagcggccgacggccgagtactgcggtgagagccagcgggccagcgccagcctcaacagccgccagaagtacacgaggaaccggcggcggcgtgtgcgtgtaggcccgtgtgcgggcggcggcgcgggaggagcgcggagcggcagccggctggggcgggtggcatcatggacgagaaggtgttcaccaaggagctggaccagtggatcgagcagctgaacgagtgcaagcagctgtccgagtcccaggtcaagagcctctgcgagaaggctaaagaaatcctgacaaaagaatccaacgtgcaagaggttcgatgtccagttactgtctgtggagatgtgcatgggcaatttcatgatctcatggaactgtttagaattggtggcaaatcaccagatacaaattacttgtttatgggagattatgttgacagaggatattattcagttgaaacagttacactgcttgtagctcttaaggttcgttaccgtgaacgcatcaccattcttcgagggaatcatgagagcagacagatcacacaagtttatggtttctatgatgaatgtttaagaaaatatggaaatgcaaatgtttggaaatattttacagatctttttgactatcttcctctcactgccttggtggatgggcagatcttctgtctacatggtggtctctcgccatctatagatacactggatcatatcagagcacttgatcgcctacaagaagttccccatgagggtccaatgtgtgacttgctgtggtcagatccagatgaccgtggtggttggggtatatctcctcgaggagctggttacacctttgggcaagatatttctgagacatttaatcatgccaatggcctcacgttggtgtctagagctcaccagctagtgatggagggatataactggtgccatgaccggaatgtagtaacgattttcagtgctccaaactattgttatcgttgtggtaaccaagctgcaatcatggaacttgacgatactctaaaatactctttcttgcagtttgacccagcacctcgtagaggcgagccacatgttactcgtcgtaccccagactacttcctgtaatgaaattttaaacttgtacagtattgccatgaaccatatatcgacctaatggaaatgggaagagcaacagtaactccaaagtgtcagaaaatagttaacattcaaaaaacttgttttcacatggaccaaaagatgtgccatataaaaatacaaagcctcttgtcatcaacagccgtgaccactttagaatgaaccagttcattgcatgctgaagcgacattgttggtcaagaaaccagtttctggcatagcgctatttgtagttacttttgctttctctgagagactgcagataataagatgtaaacattaacacctcgtgaatacaatttaacttccatttagctatagctttactcagcatgactgtagataaggatagcagcaaacaatcattggagcttaatgaacatttttaaaaataattaccaaggcctcccttctacttgtgagttttgaaattgttctttttattttcagggataccgtttaatttaattatatgatttgtctgcactcagtttattccctactcaaatctcagccccatgttgttctttgttattgtcagaacctggtgagttgttttgaacagaactgttttttccccttcctgtaagacgatgtgactgcacaagagcactgcagtgtttttcataataaacttgtgaactaagaactga

SEQ ID NO: 331429 - DNA, 2433 bp, Homo sapiens
tccatccttcccttcccccaccaccccgccctccgggagccacgcccaaaaagtcaaggcgcttcagttaccagccggctacgtcgcgcctgcgctttgacccccagtttgcgccccaactccggtcgtgcggccgcccggggagggctctgcagttgcgcagcttgctccccggcccttttcccctccgctccccgccgcctcctgacgccgggcgtgacgtcaccacgcccggcggccgccattacagagagccgagctctggagcctcagcgagcggaggaggaggcgcagcggccgacggccgagtactgcggtgagagccagcgggccagcgccagcctcaacagccgccagaagtacacgaggaaccggcggcggcgtgtgcgtgtaggcccgtgtgcgggcggcggcgcgggaggagcgcggagcggcagccggctggggcgggtggcatcatggacgagaaggtgttcaccaaggagctggaccagtggatcgagcagctgaacgagtgcaagcagctgtccgagtcccaggtcaagagcctctgcgagaaggctaaagaaatcctgacaaaagaatccaacgtgcaagaggttcgatgtccagttactgtctgtggagatgtgcatgggcaatttcatgatctcatggaactgtttagaattggtggcaaatcaccagatacaaattacttgtttatgggagattatgttgacagaggatattattcagttgaaacagttacactgcttgtagctcttaaggttcgttaccgtgaacgcatcaccattcttcgagggaatcatgagagcagacagatcacacaagtttatggtttctatgatgaatgtttaagaaaatatggaaatgcaaatgtttggaaatattttacagatctttttgactatcttcctctcactgccttggtggatgggcagatcttctgtctacatggtggtctctcgccatctatagatacactggatcatatcagagcacttgatcgcctacaagaagttccccatgagggtccaatgtgtgacttgctgtggtcagatccagatgaccgtggtggttggggtatatctcctcgaggagctggttacacctttgggcaagatatttctgagacatttaatcatgccaatggcctcacgttggtgtctagagctcaccagctagtgatggagggatataactggtgccatgaccggaatgtagtaacgattttcagtgctccaaactattgttatcgttgtggtaaccaagctgcaatcatggaacttgacgatactctaaaatactctttcttgcagtttgacccagcacctcgtagaggcgagccacatgttactcgtcgtaccccagactacttcctgtaatgaaattttaaacttgtacagtattgccatgaaccatatatcgacctaatggaaatgggaagagcaacagtaactccaaagtgtcagaaaatagttaacattcaaaaaacttgttttcacatggaccaaaagatgtgccatataaaaatacaaagcctcttgtcatcaacagccgtgaccactttagaatgaaccagttcattgcatgctgaagcgacattgttggtcaagaaaccagtttctggcatagcgctatttgtagttacttttgctttctctgagagactgcagataataagatgtaaacattaacacctcgtgaatacaatttaacttccatttagctatagctttactcagcatgactgtagataaggatagcagcaaacaatcattggagcttaatgaacatttttaaaaataattaccaaggcctcccttctacttgtgagttttgaaattgttctttttattttcagggataccgtttaatttaattatatgatttgtctgcactcagtttattccctactcaaatctcagccccatgttgttctttgttattgtcagaacctggtgagttgttttgaacagaactgttttttccccttcctgtaagacgatgtgactgcacaagagcactgcagtgtttttcataataaacttgtgaactaagaactgagaaggtcaaattttaattgtatcaatgggcaagactggtgctgtttattaaaaaagttaaatcaattgagtaaattttagaatttgtagacttgtaggtaaaataaaaatcaagggcactacataacctctctggtaactccttgacattcttcagattaacttcaggatttatttgtatttcacatattacaatttgtcacattgttggtgtgcactttgtgggttcttcctgcatattaacttgtttgtaagaaaggaaatctgtgctgcttcagtaagacttaattgtaaaaccatataacttgagatttaagtctttgggttttgttttaataaaacagcatgttttcaggtagagctt

SEQ ID NO: 331430 - DNA, 332 bp, Homo sapiens
cggacgcgtgggtcttttcagggataccgtttaatttaattatatgatttgtctgcaaataaaaagaacaatttcaaaactcacaagtagaagggaggcgagttttgaaattgttctttttattttcagggataccgtttaatttaattatatgatttgtctgcactcagtttattccctactcaaatctcagccccatgttgttctttgttattgtcagaacctggtgagttgttttgaacagaactgttttttccccttcctgtaagacgatgtgactgcacaagagcactgcagtgtttttcataataaacttgtgaactaagaactga

SEQ ID NO: 331431 - DNA, 540 bp, Homo sapiens
taaccgggaggcggagttggcctaattagattaatactagcacaactctgcggatatcaataaaatctgactttgctaaaggtaaagaaatttgtgaacaatactaaacaataacttcccttttaaaccactcttttcagatcttctgtctacatggtggtctctcgccatctatagatacactggatcatatcagagcacttgatcgcctacaagaagttccccatgaggtatgacttttatttgataaaattctttcagaaaacttattagggagtggagaagtttaattgtaagttcattagatgtattctctcatataattctcaaaaacaacttgaggtgtgagcactcttgtctgccctgttgttcaaaagaagctgacattaagaaacctgccaagatcacaacagctgtgaagctgggcttattaggacctgggttgtctgtcttagactctgaaatttgcataatataggcagattaattagggcatgttgctgctgggtcccatggatgtcagctgtgtctcataaagtc

SEQ ID NO: 331432 - DNA, 3170 bp, Homo sapiens
tccatccttcccttcccccaccaccccgccctccgggagccacgcccaaaaagtcaaggcgcttcagttaccagccggctacgtcgcgcctgcgctttgacccccagtttgcgccccaactccggtcgtgcggccgcccggggagggctctgcagttgcgcagcttgctccccggcccttttcccctccgctccccgccgcctcctgacgccgggcgtgacgtcaccacgcccggcggccgccattacagagagccgagctctggagcctcagcgagcggaggaggaggcgcagcggccgacggccgagtactgcggtgagagccagcgggccagcgccagcctcaacagccgccagaagtacacgaggaaccggcggcggcgtgtgcgtgtaggcccgtgtgcgggcggcggcgcgggaggagcgcggagcggcagccggctggggcgggtggcatcatggacgagaaggtgttcaccaaggagctggaccagtggatcgagcagctgaacgagtgcaagcagctgtccgagtcccaggtcaagagcctctgcgagaaggctaaagaaatcctgacaaaagaatccaacgtgcaagaggttcgatgtccagttactgtctgtggagatgtgcatgggcaatttcatgatctcatggaactgtttagaattggtggcaaatcaccagatacaaattacttgtttatgggagattatgttgacagaggatattattcagttgaaacagttacactgcttgtagctcttaaggttcgttaccgtgaacgcatcaccattcttcgagggaatcatgagagcagacagatcacacaagtttatggtttctatgatgaatgtttaagaaaatatggaaatgcaaatgtttggaaatattttacagatctttttgactatcttcctctcactgccttggtggatgggcagatcttctgtctacatggtggtctctcgccatctatagatacactggatcatatcagagcacttgatcgcctacaagaagttccccatgagggtccaatgtgtgacttgctgtggtcagatccagatgaccgtggtggttggggtatatctcctcgaggagctggttacacctttgggcaagatatttctgagacatttaatcatgccaatggcctcacgttggtgtctagagctcaccagctagtgatggagggatataactggtgccatgaccggaatgtagtaacgattttcagtgctccaaactattgttatcgttgtggtaaccaagctgcaatcatggaacttgacgatactctaaaatactctttcttgcagtttgacccagcacctcgtagaggcgagccacatgttactcgtcgtaccccagactacttcctgtaatgaaattttaaacttgtacagtattgccatgaaccatatatcgacctaatggaaatgggaagagcaacagtaactccaaagtgtcagaaaatagttaacattcaaaaaacttgttttcacatggaccaaaagatgtgccatataaaaatacaaagcctcttgtcatcaacagccgtgaccactttagaatgaaccagttcattgcatgctgaagcgacattgttggtcaagaaaccagtttctggcatagcgctatttgtagttacttttgctttctctgagagactgcagataataagatgtaaacattaacacctcgtgaatacaatttaacttccatttagctatagctttactcagcatgactgtagataaggatagcagcaaacaatcattggagcttaatgaacatttttaaaaataattaccaaggcctcccttctacttgtgagttttgaaattgttctttttattttcagggataccgtttaatttaattatatgatttgtctgcactcagtttattccctactcaaatctcagccccatgttgttctttgttattgtcagaacctggtgagttgttttgaacagaactgttttttccccttcctgtaagacgatgtgactgcacaagagcactgcagtgtttttcataataaacttgtgaactaagaactgagaaggtcaaattttaattgtatcaatgggcaagactggtgctgtttattaaaaaagttaaatcaattgagtaaattttagaatttgtagacttgtaggtaaaataaaaatcaagggcactacataacctctctggtaactccttgacattcttcagattaacttcaggatttatttgtatttcacatattacaatttgtcacattgttggtgtgcactttgtgggttcttcctgcatattaacttgtttgtaagaaaggaaatctgtgctgcttcagtaagacttaattgtaaaaccatataacttgagatttaagtctttgggttttgttttaataaaacagcatgttttcaggtagagcttaaactaaatgatgtgtttacttagtgcagtttctggttatgaatattatattgctatgtgtatattatatggactctttaaaatgattgacagattggcaaattcttaaatctttgtacattgttgagtcatatgttcttagagttaaatttgtctcagataagaaagtgttaaagcattagcctgtgtcaagttctttgagtgatactagtgaaaccaaatagaaaactattgttggatcatgatttagtcttatgtacattcacccgaagacaaaaatggtacttaaagtggcagtgttcaacatttaatgagtttttccccttttatccttcgaataggattagatgtttaaaaaaaagttcttctgtgggaactaatatttgatattttaacctaccagagtaaacaggaacacttaatcataaaaaaaaagagtagaaacgcacacacaccacactagacaaaagttacacacaaacaacacgatagatcgcgccagcgccaacgaagaaagaaagcaagaaaacaaccaagcaggagaagccgcaccacaaaaattattgtggaccgcgccccccgcagcaaagacaaaacacacacggcgagggggggaccgcaaaataataagagcgcgtgcagccaaagtaaacacaccacgagggggcgtcgaccaaagaaacaccgcagggacgagaggaaaaaaagccggcgagtagtctctacacggggcgcta

SEQ ID NO: 331433 - DNA, 3062 bp, Homo sapiens
tccatccttcccttcccccaccaccccgccctccgggagccacgcccaaaaagtcaaggcgcttcagttaccagccggctacgtcgcgcctgcgctttgacccccagtttgcgccccaactccggtcgtgcggccgcccggggagggctctgcagttgcgcagcttgctccccggcccttttcccctccgctccccgccgcctcctgacgccgggcgtgacgtcaccacgcccggcggccgccattacagagagccgagctctggagcctcagcgagcggaggaggaggcgcagcggccgacggccgagtactgcggtgagagccagcgggccagcgccagcctcaacagccgccagaagtacacgaggaaccggcggcggcgtgtgcgtgtaggcccgtgtgcgggcggcggcgcgggaggagcgcggagcggcagccggctggggcgggtggcatcatggacgagaaggtgttcaccaaggagctggaccagtggatcgagcagctgaacgagtgcaagcagctgtccgagtcccaggtcaagagcctctgcgagaaggctaaagaaatcctgacaaaagaatccaacgtgcaagaggttcgatgtccagttactgtctgtggagatgtgcatgggcaatttcatgatctcatggaactgtttagaattggtggcaaatcaccagatacaaattacttgtttatgggagattatgttgacagaggatattattcagttgaaacagttacactgcttgtagctcttaaggttcgttaccgtgaacgcatcaccattcttcgagggaatcatgagagcagacagatcacacaagtttatggtttctatgatgaatgtttaagaaaatatggaaatgcaaatgtttggaaatattttacagatctttttgactatcttcctctcactgccttggtggatgggcagatcttctgtctacatggtggtctctcgccatctatagatacactggatcatatcagagcacttgatcgcctacaagaagttccccatgagggtccaatgtgtgacttgctgtggtcagatccagatgaccgtggtggttggggtatatctcctcgaggagctggttacacctttgggcaagatatttctgagacatttaatcatgccaatggcctcacgttggtgtctagagctcaccagctagtgatggagggatataactggtgccatgaccggaatgtagtaacgattttcagtgctccaaactattgttatcgttgtggtaaccaagctgcaatcatggaacttgacgatactctaaaatactctttcttgcagtttgacccagcacctcgtagaggcgagccacatgttactcgtcgtaccccagactacttcctgtaatgaaattttaaacttgtacagtattgccatgaaccatatatcgacctaatggaaatgggaagagcaacagtaactccaaagtgtcagaaaatagttaacattcaaaaaacttgttttcacatggaccaaaagatgtgccatataaaaatacaaagcctcttgtcatcaacagccgtgaccactttagaatgaaccagttcattgcatgctgaagcgacattgttggtcaagaaaccagtttctggcatagcgctatttgtagttacttttgctttctctgagagactgcagataataagatgtaaacattaacacctcgtgaatacaatttaacttccatttagctatagctttactcagcatgactgtagataaggatagcagcaaacaatcattggagcttaatgaacatttttaaaaataattaccaaggcctcccttctacttgtgagttttgaaattgttctttttattttcagggataccgtttaatttaattatatgatttgtctgcactcagtttattccctactcaaatctcagccccatgttgttctttgttattgtcagaacctggtgagttgttttgaacagaactgttttttccccttcctgtaagacgatgtgactgcacaagagcactgcagtgtttttcataataaacttgtgaactaagaactgagaaggtcaaattttaattgtatcaatgggcaagactggtgctgtttattaaaaaagttaaatcaattgagtaaattttagaatttgtagacttgtaggtaaaattaacttcaggatttatttgtatttcacatattacaatttgtcacattgttggtgtgcactttgtgggttcttcctgcatattaacttgtttgtaagaaaggaaatctgtgctgcttcagtaagacttaattgtaaaaccatataacttgagatttaagtctttgggttttgttttaataaaacagcatgttttcaggtagagcttaaactaaatgatgtgtttacttagtgcagtttctggttatgaatattatattgctatgtgtatattatatggactctttaaaatgattgacagattggcaaattcttaaatctttgtacattgttgagtcatatgttcttagagttaaatttgtctcagataagaaagtgttaaagcattagcctgtgtcaagttctttgagtgatactagtgaaaccaaatagaaaactattgttggatcatgatttagtcttatgtacattcacccgaagacaaaaatggtacttaaagtggcagtgttcaacatttaatgagtttttccccttttatccttcgaataggattagatgtttaaaaaaaagttcttctgtgggaactaatatttgatattttaacctaccagagtaaacaggaacacttaatcatacttgtgagtgtagtaaataaaagttttcttgctttgtgctgtgttgaatctggaaccaacagggaagttatagcatatcccctttctaaaatgcttgaggaacacatacataccgaatgtcttttctgatctaattgatagtatttttagtggcttgtggagttaattttccaaagcaaaaggccattagggtttctacatttcatttcatttcattcttttctttcacaagaaatacattctctgtgtgtctttt

SEQ ID NO: 331434 - DNA, 2047 bp, Homo sapiens
tccatccttcccttcccccaccaccccgccctccgggagccacgcccaaaaagtcaaggcgcttcagttaccagccggctacgtcgcgcctgcgctttgacccccagtttgcgccccaactccggtcgtgcggccgcccggggagggctctgcagttgcgcagcttgctccccggcccttttcccctccgctccccgccgcctcctgacgccgggcgtgacgtcaccacgcccggcggccgccattacagagagccgagctctggagcctcagcgagcggaggaggaggcgcagcggccgacggccgagtactgcggtgagagccagcgggccagcgccagcctcaacagccgccagaagtacacgaggaaccggcggcggcgtgtgcgtgtaggcccgtgtgcgggcggcggcgcgggaggagcgcggagcggcagccggctggggcgggtggcatcatggacgagaaggtgttcaccaaggagctggaccagtggatcgctgtccgagtcccaggtcaagagcctctgcgagaaggctaaagaaatcctgacaaaagaatccaacgtgcaagaggttcgatgtccagttactgtctgtggagatgtgcatgggcaatttcatgatctcatggaactgtttagaattggtggcaaatcaccagatacaaattacttgtttatgggagattatgttgacagaggatattattcagttgaaacagttacactgcttgtagctcttaaggttcgttaccgtgaacgcatcaccattcttcgagggaatcatgagagcagacagatcacacaagtttatggtttctatgatgaatgtttaagaaaatatggaaatgcaaatgtttggaaatattttacagatctttttgactatcttcctctcactgccttggtggatgggcagatcttctgtctacatggtggtctctcgccatctatagatacactggatcatatcagagcacttgatcgcctacaagaagttccccatgagggtccaatgtgtgacttgctgtggtcagatccagatgaccgtggtggttggggtatatctcctcgaggagctggttacacctttgggcaagatatttctgagacatttaatcatgccaatggcctcacgttggtgtctagagctcaccagctagtgatggagggatataactggtgccatgaccggaatgtagtaacgattttcagtgctccaaactattgttatcgttgtggtaaccaagctgcaatcatggaacttgacgatactctaaaatactctttcttgcagtttgacccagcacctcgtagaggcgagccacatgttactcgtcgtaccccagactacttcctgtaatgaaattttaaacttgtacagtattgccatgaaccatatatcgacctaatggaaatgggaagagcaacagtaactccaaagtgtcagaaaatagttaacattcaaaaaacttgttttcacatggaccaaaagatgtgccatataaaaatacaaagcctcttgtcatcaacagccgtgaccactttagaatgaaccagttcattgcatgctgaagcgacattgttggtcaagaaaccagtttctggcatagcgctatttgtagttacttttgctttctctgagagactgcagataataagatgtaaacattaacacctcgtgaatacaatttaacttccatttagctatagctttactcagcatgactgtagataaggatagcagcaaacaatcattggagcttaatgaacatttttaaaaataattaccaaggcctcccttctacttgtgagttttgaaattgttctttttattttcagggataccgtttaatttaattatatgatttgtctgcactcagtttattccctactcaaatctcagccccatgttgttctttgttattgtcagaacctggtgagttgttttgaacagaactgttttttccccttcctgtaagacgatgtgactgcacaagagcactgcagtgtttttcataataaacttgtgaactaagaactga

SEQ ID NO: 331435 - DNA, 1561 bp, Homo sapiens
gagatccccgaggcgtgggctgggtcccaggtcaagagcctctgcgagaaggctaaagaaatcctgacaaaagaatccaacgtgcaagaggttcgatgtccagttactgtctgtggagatgtgcatgggcaatttcatgatctcatggaactgtttagaattggtggcaaatcaccagatacaaattacttgtttatgggagattatgttgacagaggatattattcagttgaaacagttacactgcttgtagctcttaaggttcgttaccgtgaacgcatcaccattcttcgagggaatcatgagagcagacagatcacacaagtttatggtttctatgatgaatgtttaagaaaatatggaaatgcaaatgtttggaaatattttacagatctttttgactatcttcctctcactgccttggtggatgggcagatcttctgtctacatggtggtctctcgccatctatagatacactggatcatatcagagcacttgatcgcctacaagaagttccccatgagggtccaatgtgtgacttgctgtggtcagatccagatgaccgtggtggttggggtatatctcctcgaggagctggttacacctttgggcaagatatttctgagacatttaatcatgccaatggcctcacgttggtgtctagagctcaccagctagtgatggagggatataactggtgccatgaccggaatgtagtaacgattttcagtgctccaaactattgttatcgttgtggtaaccaagctgcaatcatggaacttgacgatactctaaaatactctttcttgcagtttgacccagcacctcgtagaggcgagccacatgttactcgtcgtaccccagactacttcctgtaatgaaattttaaacttgtacagtattgccatgaaccatatatcgacctaatggaaatgggaagagcaacagtaactccaaagtgtcagaaaatagttaacattcaaaaaacttgttttcacatggaccaaaagatgtgccatataaaaatacaaagcctcttgtcatcaacagccgtgaccactttagaatgaaccagttcattgcatgctgaagcgacattgttggtcaagaaaccagtttctggcatagcgctatttgtagttacttttgctttctctgagagactgcagataataagatgtaaacattaacacctcgtgaatacaatttaacttccatttagctatagctttactcagcatgactgtagataaggatagcagcaaacaatcattggagcttaatgaacatttttaaaaataattaccaaggcctcccttctacttgtgagttttgaaattgttctttttattttcagggataccgtttaatttaattatatgatttgtctgcactcagtttattccctactcaaatctcagccccatgttgttctttgttattgtcagaacctggtgagttgttttgaacagaactgttttttccccttcctgtaagacgatgtgactgcacaagagcactgcagtgtttttcataataaacttgtgaactaagaactga

SEQ ID NO: 331436 - DNA, 2003 bp, Homo sapiens
tccatccttcccttcccccaccaccccgccctccgggagccacgcccaaaaagtcaaggcgcttcagttaccagccggctacgtcgcgcctgcgctttgacccccagtttgcgccccaactccggtcgtgcggccgcccggggagggctctgcagttgcgcagcttgctccccggcccttttcccctccgctccccgccgcctcctgacgccgggcgtgacgtcaccacgcccggcggccgccattacagagagccgagctctggagcctcagcgagcggaggaggaggcgcagcggccgacggccgagtactgcggtgagagccagcgggccagcgccagcctcaacagccgccagaagtacacgaggaaccggcggcggcgtgtgcgtgtaggcccgtgtgcgggcggcggcgcgggaggagcgcggagcggcagccggctggggcgggtggcatcatggacgagaaggtgttcaccaaggagctggaccagtggatcgagcagctgaacgagtgcaagcagctgtccgagtcccaggtcaagagcctctgcgagaagatgtgcatgggcaatttcatgatctcatggaactgtttagaattggtggcaaatcaccagatacaaattacttgtttatgggagattatgttgacagaggatattattcagttgaaacagttacactgcttgtagctcttaaggttcgttaccgtgaacgcatcaccattcttcgagggaatcatgagagcagacagatcacacaagtttatggtttctatgatgaatgtttaagaaaatatggaaatgcaaatgtttggaaatattttacagatctttttgactatcttcctctcactgccttggtggatgggcagatcttctgtctacatggtggtctctcgccatctatagatacactggatcatatcagagcacttgatcgcctacaagaagttccccatgagggtccaatgtgtgacttgctgtggtcagatccagatgaccgtggtggttggggtatatctcctcgaggagctggttacacctttgggcaagatatttctgagacatttaatcatgccaatggcctcacgttggtgtctagagctcaccagctagtgatggagggatataactggtgccatgaccggaatgtagtaacgattttcagtgctccaaactattgttatcgttgtggtaaccaagctgcaatcatggaacttgacgatactctaaaatactctttcttgcagtttgacccagcacctcgtagaggcgagccacatgttactcgtcgtaccccagactacttcctgtaatgaaattttaaacttgtacagtattgccatgaaccatatatcgacctaatggaaatgggaagagcaacagtaactccaaagtgtcagaaaatagttaacattcaaaaaacttgttttcacatggaccaaaagatgtgccatataaaaatacaaagcctcttgtcatcaacagccgtgaccactttagaatgaaccagttcattgcatgctgaagcgacattgttggtcaagaaaccagtttctggcatagcgctatttgtagttacttttgctttctctgagagactgcagataataagatgtaaacattaacacctcgtgaatacaatttaacttccatttagctatagctttactcagcatgactgtagataaggatagcagcaaacaatcattggagcttaatgaacatttttaaaaataattaccaaggcctcccttctacttgtgagttttgaaattgttctttttattttcagggataccgtttaatttaattatatgatttgtctgcactcagtttattccctactcaaatctcagccccatgttgttctttgttattgtcagaacctggtgagttgttttgaacagaactgttttttccccttcctgtaagacgatgtgactgcacaagagcactgcagtgtttttcataataaacttgtgaactaagaactga

SEQ ID NO: 331437 - DNA, 2037 bp, Homo sapiens
tccatccttcccttcccccaccaccccgccctccgggagccacgcccaaaaagtcaaggcgcttcagttaccagccggctacgtcgcgcctgcgctttgacccccagtttgcgccccaactccggtcgtgcggccgcccggggagggctctgcagttgcgcagcttgctccccggcccttttcccctccgctccccgccgcctcctgacgccgggcgtgacgtcaccacgcccggcggccgccattacagagagccgagctctggagcctcagcgagcggaggaggaggcgcagcggccgacggccgagtactgcggtgagagccagcgggccagcgccagcctcaacagccgccagaagtacacgaggaaccggcggcggcgtgtgcgtgtaggcccgtgtgcgggcggcggcgcgggaggagcgcggagcggcagccggctggggcgggtggcatcatggacgagaaggtgttcaccaaggagctggaccagtggatcgagcagctgaacgagtgcaagcagctgtccgagtcccaggtcaagagcctctgcgagaaggctaaagaaatcctgacaaaagaatccaacgtgcaagaggttcgatgtccagttactgtctgtggagatgtgcatgggcaatttcatgatctcatggaactgtttagaattggtggcaaatcaccagatacaaattacttgtttatgggagattatgttgacagaggatattattcagttgaaacagttacactgcttgtagctcttaaggttcgttaccgtgaacgcatcaccattcttcgagggaatcatgagagcagacagatcacacaagtttatggtttctatgatgaatgtttaagaaaatatggaaatgcaaatgtttggaaatattttacagatctttttgactatcttcctctcactgccttggtggatgggcagatcttctgtctacatggtggtctctcgccatctatagatacactggatcatatcagagcacttgatcgcctacaagaagttccccatgagggtccaatgtgtgacttgctgtggtcagatccagatgaccgtggtggttggggtatatctcctcgaggagctggttacacctttgggcaagatatttctgagacatttaatcatgccaatggcctcacgttggtgtctagagctcaccagctagtgatggagggatataactggtgccatgaccggaatgtagtaacgattttcagtgctccaaactattgttatcgttgtggtaaccaagctgcaatcatggaacttgacgatactctaaaatactctttcttgcagtttgacccagcacctcgtagaggcgagccacatgttactcgtcgtaccccagactacttcctgtaatgaaattttaaacttgtacagtattgccatgaaccatatatcgacctaatggaaatgggaagagcaacagtaactccaaagtgtcagaaaatagttaacattcaaaaaacttgttttcacatggaccaaaagatgtgccatataaaaatacaaagcctcttgtcatcaacagccgtgaccactttagaatgaaccagttcattgcatgctgaagcgacattgttggtcaagaaaccagtttctggcatagcgctatttgtagttacttttgctttctctgagagactgcagataataagatgtaaacattaacacctcgtgaatacaatttaacttccatttagctatagctttactcagcatgactgtagataaggatagcagcaaacaatcattggagcttaatgaacatttttaaaaataattaccaaggcctcccttctacttgtgagttttgaaattgttctttttattttcagggataccgtttaatttaattatatgatttgtctgcactcagtttattccctactcaaatctcagccccatgttgttctttgttattgtcagaacctggtgagttgttttgaacagggaataaactgagtgcagacaaatcatataattaaattaaacggtatccctgaaa

SEQ ID NO: 331438 - DNA, 2016 bp, Homo sapiens
tccatccttcccttcccccaccaccccgccctccgggagccacgcccaaaaagtcaaggcgcttcagttaccagccggctacgtcgcgcctgcgctttgacccccagtttgcgccccaactccggtcgtgcggccgcccggggagggctctgcagttgcgcagcttgctccccggcccttttcccctccgctccccgccgcctcctgacgccgggcgtgacgtcaccacgcccggcggccgccattacagagagccgagctctggagcctcagcgagcggaggaggaggcgcagcggccgacggccgagtactgcggtgagagccagcgggccagcgccagcctcaacagccgccagaagtacacgaggaaccggcggcggcgtgtgcgtgtaggcccgtgtgcgggcggcggcgcgggaggagcgcggagcggcagccggctggggcgggtggcatcatggacgagaaggtgttcaccaaggagctggaccagtggatcgagcagctgaacgagtgcaagcagctgtccgagtcccaggtcaagagcctctgcgagaaggctaaagaaatcctgacaaaagaatccaacgtgcaagaggttcgatgtccagttactgtctgtggagatgtgcatgggcaatttcatgatctcatggaactgtttagaattggtggcaaatcaccagatacaaattacttgtttatgggagattatgttgacagaggatattattcagttgaaacagttacactgcttgtagctcttaaggttcgttaccgtgaacgcatcaccattcttcgagggaatcatgagagcagacagatcacacaagtttatggtttctatgatgaatgtttaagaaaatatggaaatgcaaatgtttggaaatattttacagatctttttgactatcttcctctcactgccttggtggatgggcagatcttctgtctacatggtggtctctcgccatctatagatacactggatcatatcagagcacttgatcgcctacaagaagttccccatgagggtccaatgtgtgacttgctgtggtcagatccagatgaccgtggtggttggggtatatctcctcgaggagctggttacacctttgggcaagatatttctgagacatttaatcatgccaatggcctcacgttggtgtctagagctcaccagctagtgatggagggatataactggtgccatgaccggaatgtagtaacgattttcagtgctccaaactattgttatcgttgtggtaaccaagctgcaatcatggaacttgacgatactctaaaatactctttcttgcagtttgacccagcacctcgtagaggcgagccacatgttactcgtcgtaccccagactacttcctgtaatgaaattttaaacttgtacagtattgccatgaaccatatatcgacctaatggaaatgggaagagcaacagtaactccaaagtgtcagaaaatagttaacattcacttgtcatcaacagccgtgaccactttagaatgaaccagttcattgcatgctgaagcgacattgttggtcaagaaaccagtttctggcatagcgctatttgtagttacttttgctttctctgagagactgcagataataagatgtaaacattaacacctcgtgaatacaatttaacttccatttagctatagctttactcagcatgactgtagataaggatagcagcaaacaatcattggagcttaatgaacatttttaaaaataattaccaaggcctcccttctacttgtgagttttgaaattgttctttttattttcagggataccgtttaatttaattatatgatttgtctgcactcagtttattccctactcaaatctcagccccatgttgttctttgttattgtcagaacctggtgagttgttttgaacagaactgttttttccccttcctgtaagacgatgtgactgcacaagagcactgcagtgtttttcataataaacttgtgaactaagaactga

SEQ ID NO: 331439 - DNA, 1033 bp, Homo sapiens
  misc_feature (33)..(33): n is a, c, g, or t
  misc_feature (144)..(144): n is a, c, g, or t
agttcacaagtttattatgaaaaacactgcagngctcttgggcagtcacatcgtcttacaggaaggggaaaaaacagttctgttcaaaacaactcaccaggttctgacaataacaaagaacaacatggagctgagatttgatgnagggaataaactgagggatataactggtgccatgaccggaatgtagtaacgattttcagtgctccaaactattgttatcgttgtggtaaccaagctgcaatcatggaacttgacgatactctaaaatactctttcttgcagtttgacccagcacctcgtagaggcgagccacatgttactcgtcgtaccccagactacttcctgtaatgaaattttaaacttgtacagtattgccatgaaccatatatcgacctaatggaaatgggaagagcaacagtaactccaaagtgtcagaaaatagttaacattcaaaaaacttgttttcacatggaccaaaagatgtgccatataaaaatacaaagcctcttgtcatcaacagccgtgaccactttagaatgaaccagttcattgcatgctgaagcgacattgttggtcaagaaaccagtttctggcatagcgctatttgtagttacttttgctttctctgagagactgcagataataagatgtaaacattaacacctcgtgaatacaatttaacttccatttagctatagctttactcagcatgactgtagataaggatagcagcaaacaatcattggagcttaatgaacatttttaaaaataattaccaaggcctcccttctacttgtgagttttgaaattgttctttttattttcagggataccgtttaatttaattatatgatttgtctgcactcagtttattccctactcaaatctcagccccatgttgttctttgttattgtcagaacctggtgagttgttttgaacagaactgttttttccccttcctgtaagacgatgtgactgcacaagagcactgcagtgtttttcataataaacttgtgaactaagaactga

SEQ ID NO: 331440 - DNA, 1110 bp, Homo sapiens
taaagtactaaaaaaaaaacaagttttgtaattagggggaaaataaatacatgtgtaccttacaggttgtataaagtacaggagattattaagtcatccagaaaaaaagcattaacatttcttaagcccctttggcaggggtgggaatgagtagagatttttttctctcttgagtgaagtaacatttagttgaattgagggagtaaagtaagatttttgtctccttttccttgcagggatataactggtgccatgaccggaatgtagtaacgattttcagtgctccaaactattgttatcgttgtggtaaccaagctgcaatcatggaacttgacgatactctaaaatactctttcttgcagtttgacccagcacctcgtagaggcgagccacatgttactcgtcgtaccccagactacttcctgtaatgaaattttaaacttgtacagtattgccatgaaccatatatcgacctaatggaaatgggaagagcaacagtaactccaaagtgtcagaaaatagttaacattcaaaaaacttgttttcacatggaccaaaagatgtgccatataaaaatacaaagcctcttgtcatcaacagccgtgaccactttagaatgaaccagttcattgcatgctgaagcgacattgttggtcaagaaaccagtttctggcatagcgctatttgtagttacttttgctttctctgagagactgcagataataagatgtaaacattaacacctcgtgaatacaatttaacttccatttagctatagctttactcagcatgactgtagataaggatagcagcaaacaatcattggagcttaatgaacatttttaaaaataattaccaaggcctcccttctacttgtgagttttgaaattgttctttttattttcagggataccgtttaatttaattatatgatttgtctgcactcagtttattccctactcaaatctcagccccatgttgttctttgttattgtcagaacctggtgagttgttttgaacagaactgttttttccccttcctgtaagacgatgtgactgcacaagagcactgcagtgtttttcataataaacttgtgaactaagaactga

SEQ ID NO: 331441 - DNA, 688 bp, Homo sapiens
cgtgtctagaggatcccggagagcatccttacacatgaaccatatatcgacctaatggaaatgggaagagcaacagtaactccaaagtgtcagaaaatagttaacattcaaaaaacttgttttcacatggaccaaaagatgtgccatataaaaatacaaagcctcttgtcatcaacagccgtgaccactttagaatgaaccagttcattgcatgctgaagcgacattgttggtcaagaaaccagtttctggcatagcgctatttgtagttacttttgctttctctgagagactgcagataataagatgtaaacattaacacctcgtgaatacaatttaacttccatttagctatagctttactcagcatgactgtagataaggatagcagcaaacaatcattggagcttaatgaacatttttaaaaataattaccaaggcctcccttctacttgtgagttttgaaattgttctttttattttcagggataccgtttaatttaattatatgatttgtctgcactcagtttattccctactcaaatctcagccccatgttgttctttgttattgtcagaacctggtgagttgttttgaacagaactgttttttccccttcctgtaagacgatgtgactgcacaagagcactgcagtgtttttcataataaacttgtgaactaagaactga

SEQ ID NO: 331442 - DNA, 1491 bp, Homo sapiens
tccatccttcccttcccccaccaccccgccctccgggagccacgcccaaaaagtcaaggcgcttcagttaccagccggctacgtcgcgcctgcgctttgacccccagtttgcgccccaactccggtcgtgcggccgcccggggagggctctgcagttgcgcagcttgctccccggcccttttcccctccgctccccgccgcctcctgacgccgggcgtgacgtcaccacgcccggcggccgccattacagagagccgagctctggagcctcagcgagcggaggaggaggcgcagcggccgacggccgagtactgcggtgagagccagcgggccagcgccagcctcaacagccgccagaagtacacgaggaaccggcggcggcgtgtgcgtgtaggcccgtgtgcgggcggcggcgcgggaggagcgcggagcggcagccggctggggcgggtggcatcatggacgagaaggtgttcaccaaggagctggaccagtggatcgagcagctgaacgagtgcaagcagctgtccgagtcccaggtcaagagcctctgcgagaaggctaaagaaatcctgacaaaagaatccaacgtgcaagaggttcgatgtccagttactgtctgtggagatgtgcatgggcaatttcatgatctcatggaactgtttagaattggtggcaaatcaccagatacaaattacttgtttatgggagattatgttgacagaggatattattcagttgaaacagttacactgcttgtagctcttaaggttcgttaccgtgaacgcatcaccattcttcgagggaatcatgagagcagacagatcacacaagtttatggtttctatgatgaatgtttaagaaaatatggaaatgcaaatgtttggaaatattttacagatctttttgactatcttcctctcactgccttggtggatgggcagatcttctgtctacatggtggtctctcgccatctatagatacactggatcatatcagagcacttgatcgcctacaagaagttccccatgagggtccaatgtgtgacttgctgtggtcagatccagatgaccgtggtggttggggtatatctcctcgaggagctggttacacctttgggcaagatatttctgagacatttaatcatgccaatggcctcacgttggtgtctagagctcaccagctagtgatggagggatataactggtgccatgaccggaatgtagtaacgattttcagtgctccaaactattgttatcgttgtggtaaccaagctgcaaattcaaattgggggaaaacttttggaacgatactctaaaatactctttcttgcagtttgtgaaccccccaagggccaaccccttccgttaagaaggggcggagccacatgttactcgtcgtaccccaagaacttaaacttttcccctgggttacactggaacattcttaaaaacctttgtgttaaaccaaggtaaatttggccccacttg

SEQ ID NO: 331443 - DNA, 404 bp, Homo sapiens
tcttaagcccctttggcaggggtgggaatgagtagagatttttttctctcttgagtgaagtaacatttagttgaattgagggagtaaagtaagatttttgtctccttttccttgcagggatataactggtgccatgaccggaatgtagtaacgattttcagtgctccaaactattgttatcgttgtggtaaccaagctgcaatcatggaacttgacgatactctaaaatactctttgtaagtaattctacctgaacattttcttgcattactgaatatgtagggttttggtttatttattttgagagagagggtgtcactatattgcccagtcttgtctcgaactcctaggctgaagtgatcctttcaccttggcctcctagagtgttggggttacaagtataa

SEQ ID NO: 331444 - DNA, 3116 bp, Homo sapiens
tccatccttcccttcccccaccaccccgccctccgggagccacgcccaaaaagtcaaggcgcttcagttaccagccggctacgtcgcgcctgcgctttgacccccagtttgcgccccaactccggtcgtgcggccgcccggggagggctctgcagttgcgcagcttgctccccggcccttttcccctccgctccccgccgcctcctgacgccgggcgtgacgtcaccacgcccggcggccgccattacagagagccgagctctggagcctcagcgagcggaggaggaggcgcagcggccgacggccgagtactgcggtgagagccagcgggccagcgccagcctcaacagccgccagaagtacacgaggaaccggcggcggcgtgtgcgtgtaggcccgtgtgcgggcggcggcgcgggaggagcgcggagcggcagccggctggggcgggtggcatcatggacgagaaggtgttcaccaaggagctggaccagtggatcgagcagctgaacgagtgcaagcagctgtccgagtcccaggtcaagagcctctgcgagaaggctaaagaaatcctgacaaaagaatccaacgtgcaagaggttcgatgtccagttactgtctgtggagatgtgcatgggcaatttcatgatctcatggaactgtttagaattggtggcaaatcaccagatacaaattacttgtttatgggagattatgttgacagaggatattattcagttgaaacagttacactgcttgtagctcttaaggttcgttaccgtgaacgcatcaccattcttcgagggaatcatgagagcagacagatcacacaagtttatggtttctatgatgaatgtttaagaaaatatggaaatgcaaatgtttggaaatattttacagatctttttgactatcttcctctcactgccttggtggatgggcagatcttctgtctacatggtggtctctcgccatctatagatacactggatcatatcagagcacttgatcgcctacaagaagttccccatgagggtccaatgtgtgacttgctgtggtcagatccagatgaccgtggtggttggggtatatctcctcgaggagctggttacacctttgggcaagatatttctgagacatttaatcatgccaatggcctcacgttggtgtctagagctcaccagctagtgatggagggatataactggtgccatgaccggaatgtagtaacgattttcagtgctccaaactattgttatcgttgtggtaaccaagctgcaatcatggaacttgacgatactctaaaatactctttcttgcagtttgacccagcacctcgtagaggcgagccacatgttactcgtcgtaccccagactacttcctgtaatgaaattttaaacttgtacagtattgccatgaaccatatatcgacctaatggaaatgggaagagcaacagtaactccaaagtgtcagaaaatagttaacattcaaaaaacttgttttcacatggaccaaaagatgtgccatataaaaatacaaagcctcttgtcatcaacagccgtgaccactttagaatgaaccagttcattgcatgctgaagcgacattgttggtcaagaaaccagtttctggcatagcgctatttgtagttacttttgctttctctgagagactgcagataataagatgtaaacattaacacctcgtgaatacaatttaacttccatttagctatagctttactcagcatgactgtagataaggatagcagcaaacaatcattggagcttaatgaacatttttaaaaataattaccaaggcctcccttctacttgtgagttttgaaattgttctttttattttcagggataccgtttaatttaattatatgatttgtctgcactcagtttattccctactcaaatctcagccccatgttgttctttgttattgtcagaacctggtgagttgttttgaacagaactgttttttccccttcctgtaagacgatgtgactgcacaagagcactgcagtgtttttcataataaacttgtgaactaagaactgagaaggtcaaattttaattgtatcaatgggcaagactggtgctgtttattaaaaaagttaaatcaattgagtaaattttagaatttgtagacttgtaggtaaaataaaaatcaagggcactacataacctctctggtaactccttgacattcttcagattaacttcaggatttatttgtatttcacatattacaatttgtcacattgttggtgtgcactttgtgggttcttcctgcatattaacttgtttgtaagaaaggaaatctgtgctgcttcagtaagacttaattgtaaaaccatataacttgagatttaagtctttgggttttgttttaataaaacagcatgttttcaggtagagcttaaactaaatgatgtgtttacttagtgcagtttctggttatgaatattatattgctatgtgtatattatatggactctttaaaatgattgacagattggcaaattcttaaatctttgtacattgttgagtcatatgttcttagagttaaatttgtctcagataagaaagtgttaaagcattagcctgtgtcaagttctttgagtgatactagtgaaaccaaatagaaaactattgttggatcatgatttagtcttatgtacattcacccgaagacaaaaatggtacttaaagtggcagtgttcaacatttaatgagtttttccccttttatccttcgaataggattagatgtttaaaaaaaagttcttctgtgggaactaatatttgatattttaacctaccagagtaaacaggaacacttaatcatacttgtgagtgtagtaaataaaagttttcttgctttgtgctgtgttgaatctggaaccaacagggaagttatagcatatcccctttctaaaatgcttgaggaacacatacataccgaatgtcttttctgatctaattgatagtatttttagtggcttgtggagttaattttccaaagcaaaaggccattagggtttctacatttcatttcatttcattcttttctttcacaagaaatacattctctgtgtgtctttt

SEQ ID NO: 331445 - DNA, 2609 bp, Homo sapiens
  misc_feature (2608)..(2608): n is a, c, g, or t
tccatccttcccttcccccaccaccccgccctccgggagccacgcccaaaaagtcaaggcgcttcagttaccagccggctacgtcgcgcctgcgctttgacccccagtttgcgccccaactccggtcgtgcggccgcccggggagggctctgcagttgcgcagcttgctccccggcccttttcccctccgctccccgccgcctcctgacgccgggcgtgacgtcaccacgcccggcggccgccattacagagagccgagctctggagcctcagcgagcggaggaggaggcgcagcggccgacggccgagtactgcggtgagagccagcgggccagcgccagcctcaacagccgccagaagtacacgaggaaccggcggcggcgtgtgcgtgtaggcccgtgtgcgggcggcggcgcgggaggagcgcggagcggcagccggctggggcgggtggcatcatggacgagaaggtgttcaccaaggagctggaccagtggatcgagcagctgaacgagtgcaagcagctgtccgagtcccaggtcaagagcctctgcgagaaggctaaagaaatcctgacaaaagaatccaacgtgcaagaggttcgatgtccagttactgtctgtggagatgtgcatgggcaatttcatgatctcatggaactgtttagaattggtggcaaatcaccagatacaaattacttgtttatgggagattatgttgacagaggatattattcagttgaaacagttacactgcttgtagctcttaaggttcgttaccgtgaacgcatcaccattcttcgagggaatcatgagagcagacagatcacacaagtttatggtttctatgatgaatgtttaagaaaatatggaaatgcaaatgtttggaaatattttacagatctttttgactatcttcctctcactgccttggtggatgggcagatcttctgtctacatggtggtctctcgccatctatagatacactggatcatatcagagcacttgatcgcctacaagaagttccccatgagggtccaatgtgtgacttgctgtggtcagatccagatgaccgtggtggttggggtatatctcctcgaggagctggttacacctttgggcaagatatttctgagacatttaatcatgccaatggcctcacgttggtgtctagagctcaccagctagtgatggagggatataactggtgccatgaccggaatgtagtaacgattttcagtgctccaaactattgttatcgttgtggtaaccaagctgcaatcatggaacttgacgatactctaaaatactctttcttgcagtttgacccagcacctcgtagaggcgagccacatgttactcgtcgtaccccagactacttcctgtaatgaaattttaaacttgtacagtattgccatgaaccatatatcgacctaatggaaatgggaagagcaacagtaactccaaagtgtcagaaaatagttaacattcaaaaaacttgttttcacatggaccaaaagatgtgccatataaaaatacaaagcctcttgtcatcaacagccgtgaccactttagaatgaaccagttcattgcatgctgaagcgacattgttggtcaagaaaccagtttctggcatagcgctatttgtagttacttttgctttctctgagagactgcagataataagatgtaaacattaacacctcgtgaatacaatttaacttccatttagctatagctttactcagcatgactgtagataaggatagcagcaaacaatcattggagcttaatgaacatttttaaaaataattaccaaggcctcccttctacttgtgagttttgaaattgttctttttattttcagggataccgtttaatttaattatatgatttgtctgcactcagtttattccctactcaaatctcagccccatgttgttctttgttattgtcagaacctggtgagttgttttgaacagaactgttttttccccttcctgtaagacgatgtgactgcacaagagcactgcagtgtttttcataataaacttgtgaactaagaactgaaaaaaaaaacaaaaaaaaaaaaaaaaaaaaaaaaaaaaacaaaacaaaaaaaaaaaaacacaaaacaaacaatacaaaaacaaaaaaaaaacaaaccaaaggacggggacggagagcaataaaacaaaagcgagaggaaaaaaaagataagaaacgatataaagagaggacagccacgaccaaaggcacagaaaaaaagagagaacagagagcaaaaaacaagagagagagagacaaaaagaggaagcgaaagagagagaaaaccaggggggaaacaaggagacaccacacaatatacgacgaggagaaaaaaaacggcggggagagtaacaaacaagctggggagaaaacacggagaataaaattataacggggagcgaagacagagaacaggagcagggaggagaggaggagggcgaggacgggaggggggtgaggcggacagtggagcgagagtgaatgaagagggggagagagagaggaaaagagaggcagaagcgaccaacgacgagaggggtgctgctgccatgcctcggtnc

SEQ ID NO: 331446 - DNA, 2106 bp, Homo sapiens
  misc_feature (518)..(518): n is a, c, g, or t
tccatccttcccttcccccaccaccccgccctccgggagccacgcccaaaaagtcaaggcgcttcagttaccagccggctacgtcgcgcctgcgctttgacccccagtttgcgccccaactccggtcgtgcggccgcccggggagggctctgcagttgcgcagcttgctccccggcccttttcccctccgctccccgccgcctcctgacgccgggcgtgacgtcaccacgcccggcggccgccattacagagagccgagctctggagcctcagcgagcggaggaggaggcgcagcggccgacggccgagtactgcggtgagagccagcgggccagcgccagcctcaacagccgccagaagtacacgaggaaccggcggcggcgtgtgcgtgtaggcccgtgtgcgggcggcggcgcgggaggagcgcggagcggcagccggctggggcgggtggcatcatggacgagaaggtgttcaccaaggagctggaccagtggatcgcattcggagccaggccnttgggaaaaacccgggaaaggccttgggccaaaagggcaggcttgtccgagtcccaggtcaagagcctctgcgagaaggctaaagaaatcctgacaaaagaatccaacgtgcaagaggttcgatgtccagttactgtctgtggagatgtgcatgggcaatttcatgatctcatggaactgtttagaattggtggcaaatcaccagatacaaattacttgtttatgggagattatgttgacagaggatattattcagttgaaacagttacactgcttgtagctcttaaggttcgttaccgtgaacgcatcaccattcttcgagggaatcatgagagcagacagatcacacaagtttatggtttctatgatgaatgtttaagaaaatatggaaatgcaaatgtttggaaatattttacagatctttttgactatcttcctctcactgccttggtggatgggcagatcttctgtctacatggtggtctctcgccatctatagatacactggatcatatcagagcacttgatcgcctacaagaagttccccatgagggtccaatgtgtgacttgctgtggtcagatccagatgaccgtggtggttggggtatatctcctcgaggagctggttacacctttgggcaagatatttctgagacatttaatcatgccaatggcctcacgttggtgtctagagctcaccagctagtgatggagggatataactggtgccatgaccggaatgtagtaacgattttcagtgctccaaactattgttatcgttgtggtaaccaagctgcaatcatggaacttgacgatactctaaaatactctttcttgcagtttgacccagcacctcgtagaggcgagccacatgttactcgtcgtaccccagactacttcctgtaatgaaattttaaacttgtacagtattgccatgaaccatatatcgacctaatggaaatgggaagagcaacagtaactccaaagtgtcagaaaatagttaacattcaaaaaacttgttttcacatggaccaaaagatgtgccatataaaaatacaaagcctcttgtcatcaacagccgtgaccactttagaatgaaccagttcattgcatgctgaagcgacattgttggtcaagaaaccagtttctggcatagcgctatttgtagttacttttgctttctctgagagactgcagataataagatgtaaacattaacacctcgtgaatacaatttaacttccatttagctatagctttactcagcatgactgtagataaggatagcagcaaacaatcattggagcttaatgaacatttttaaaaataattaccaaggcctcccttctacttgtgagttttgaaattgttctttttattttcagggataccgtttaatttaattatatgatttgtctgcactcagtttattccctactcaaatctcagccccatgttgttctttgttattgtcagaacctggtgagttgttttgaacagaactgttttttccccttcctgtaagacgatgtgactgcacaagagcactgcagtgtttttcataataaacttgtgaactaagaactga

SEQ ID NO: 331447 - DNA, 2063 bp, Homo sapiens
tccatccttcccttcccccaccaccccgccctccgggagccacgcccaaaaagtcaaggcgcttcagttaccagccggctacgtcgcgcctgcgctttgacccccagtttgcgccccaactccggtcgtgcggccgcccggggagggctctgcagttgcgcagcttgctccccggcccttttcccctccgctccccgccgcctcctgacgccgggcgtgacgtcaccacgcccggcggccgccattacagagagccgagctctggagcctcagcgagcggaggaggaggcgcagcggccgacggccgagtactgcggtgagagccagcgggccagcgccagcctcaacagccgccagaagtacacgaggaaccggcggcggcgtgtgcgtgtaggcccgtgtgcgggcggcggcgcgggaggagcgcggagcggcagccggctggggcgggtggcatcatggacgagaaggtgttcaccaaggagctggaccagtggatcgagcagctgaacgagtgcaagcagctgtccgagtcccaggtcaagagcctctgcgagaaggctaaagaaatcctgacaaaagaatccaacgtgcaagaggttcgatgtccagttactgtctgtggagatgtgcatgggcaatttcatgatctcatggaactgtttagaattggtggcaaatcaccagatacaaattacttgtttatgggagattatgttgacagaggatattattcagttgaaacagttacactgcttgtagctcttaaggttcgttaccgtgaacgcatcaccattcttcgagggaatcatgagagcagacagatcacacaagtttatggtttctatgatgaatgtttaagaaaatatggaaatgcaaatgtttggaaatattttacagatctttttgactatcttcctctcactgccttggtggatgggcagatcttctgtctacatggtggtctctcgccatctatagatacactggatcatatcagagcacttgatcgcctacaagaagttccccatgagggtccaatgtgtgacttgctgtggtcagatccagatgaccgtggtggttggggtatatctcctcgaggagctggttacacctttgggcaagatatttctgagacatttaatcatgccaatggcctcacgttggtgtctagagctcaccagctagtgatggagggatataactggtgccatgaccggaatgtagtaacgattttcagtgctccaaactattgttatcgttgtggtaaccaagctgcaatcatggaacttgacgatactctaaaatactctttcttgcagtttgacccagcacctcgtagaggcgagccacatgttactcgtcgtaccccagactacttcctgtaatgaaattttaaacttgtacagtattgccatgaaccatatatcgacctaatggaaatgggaagagcaacagtaactccaaagtgtcagaaaatagttaacattcaaaaaacttgttttcacatggaccaaaagatgtgccatataaaaatacaaagcctcttgtcatcaacagccgtgaccactttagaatgaaccagttcattgcatgctgaagcgacattgttggtcaagaaaccagtttctggcatagcgctatttgtagttacttttgctttctctgagagactgcagataataagatgtaaacattaacacctcgtgaatacaatttaacttccatttagctatagctttactcagcatgactgtagataaggatagcagcaaacaatcattggagcttaatgaacatttttaaaaataattaccaaggcctcccttctacttgtgagttttgaaattgttctttttattttcagggataccgtttaatttaattatatgatttgtctgcactcagtttattccctactcaaatctcagccccatgttgttctttgttattgtcagaacctggtgagttgttttgaacagaactgttttttccccttcctgtaacacctgtggggtaagcccacaagcagtaatgttttttttttaatattcttgtaaaat

SEQ ID NO: 331448 - DNA, 3062 bp, Homo sapiens
tccatccttcccttcccccaccaccccgccctccgggagccacgcccaaaaagtcaaggcgcttcagttaccagccggctacgtcgcgcctgcgctttgacccccagtttgcgccccaactccggtcgtgcggccgcccggggagggctctgcagttgcgcagcttgctccccggcccttttcccctccgctccccgccgcctcctgacgccgggcgtgacgtcaccacgcccggcggccgccattacagagagccgagctctggagcctcagcgagcggaggaggaggcgcagcggccgacggccgagtactgcggtgagagccagcgggccagcgccagcctcaacagccgccagaagtacacgaggaaccggcggcggcgtgtgcgtgtaggcccgtgtgcgggcggcggcgcgggaggagcgcggagcggcagccggctggggcgggtggcatcatggacgagaaggtgttcaccaaggagctggaccagtggatcgagcagctgaacgagtgcaagcagctgtccgagtcccaggtcaagagcctctgcgagaaggctaaagaaatcctgacaaaagaatccaacgtgcaagaggttcgatgtccagttactgtctgtggagatgtgcatgggcaatttcatgatctcatggaactgtttagaattggtggcaaatcaccagatacaaattacttgtttatgggagattatgttgacagaggatattattcagttgaaacagttacactgcttgtagctcttaaggttcgttaccgtgaacgcatcaccattcttcgagggaatcatgagagcagacagatcacacaagtttatggtttctatgatgaatgtttaagaaaatatggaaatgcaaatgtttggaaatattttacagatctttttgactatcttcctctcactgccttggtggatgggcagatcttctgtctacatggtggtctctcgccatctatagatacactggatcatatcagagcacttgatcgcctacaagaagttccccatgagggtccaatgtgtgacttgctgtggtcagatccagatgaccgtggtggttggggtatatctcctcgaggagctggttacacctttgggcaagatatttctgagacatttaatcatgccaatggcctcacgttggtgtctagagctcaccagctagtgatggagggatataactggtgccatgaccggaatgtagtaacgattttcagtgctccaaactattgttatcgttgtggtaaccaagctgcaatcatggaacttgacgatactctaaaatactctttcttgcagtttgacccagcacctcgtagaggcgagccacatgttactcgtcgtaccccagactacttcctgtaatgaaattttaaacttgtacagtattgccatgaaccatatatcgacctaatggaaatgggaagagcaacagtaactccaaagtgtcagaaaatagttaacattcaaaaaacttgttttcacatggaccaaaagatgtgccatataaaaatacaaagcctcttgtcatcaacagccgtgaccactttagaatgaaccagttcattgcatgctgaagcgacattgttggtcaagaaaccagtttctggcatagcgctatttgtagttacttttgctttctctgagagactgcagataataagatgtaaacattaacacctcgtgaatacaatttaacttccatttagctatagctttactcagcatgactgtagataaggatagcagcaaacaatcattggagcttaatgaacatttttaattttcagggataccgtttaatttaattatatgatttgtctgcactcagtttattccctactcaaatctcagccccatgttgttctttgttattgtcagaacctggtgagttgttttgaacagaactgttttttccccttcctgtaagacgatgtgactgcacaagagcactgcagtgtttttcataataaacttgtgaactaagaactgagaaggtcaaattttaattgtatcaatgggcaagactggtgctgtttattaaaaaagttaaatcaattgagtaaattttagaatttgtagacttgtaggtaaaataaaaatcaagggcactacataacctctctggtaactccttgacattcttcagattaacttcaggatttatttgtatttcacatattacaatttgtcacattgttggtgtgcactttgtgggttcttcctgcatattaacttgtttgtaagaaaggaaatctgtgctgcttcagtaagacttaattgtaaaaccatataacttgagatttaagtctttgggttttgttttaataaaacagcatgttttcaggtagagcttaaactaaatgatgtgtttacttagtgcagtttctggttatgaatattatattgctatgtgtatattatatggactctttaaaatgattgacagattggcaaattcttaaatctttgtacattgttgagtcatatgttcttagagttaaatttgtctcagataagaaagtgttaaagcattagcctgtgtcaagttctttgagtgatactagtgaaaccaaatagaaaactattgttggatcatgatttagtcttatgtacattcacccgaagacaaaaatggtacttaaagtggcagtgttcaacatttaatgagtttttccccttttatccttcgaataggattagatgtttaaaaaaaagttcttctgtgggaactaatatttgatattttaacctaccagagtaaacaggaacacttaatcatacttgtgagtgtagtaaataaaagttttcttgctttgtgctgtgttgaatctggaaccaacagggaagttatagcatatcccctttctaaaatgcttgaggaacacatacataccgaatgtcttttctgatctaattgatagtatttttagtggcttgtggagttaattttccaaagcaaaaggccattagggtttctacatttcatttcatttcattcttttctttcacaagaaatacattctctgtgtgtctttt

SEQ ID NO: 331449 - DNA, 1345 bp, Homo sapiens
tcttcttcctcgcagccgcagagctgacccagctgctccacgatccattcctccagcaccagccgcttccgaagctccttacgatcgtatttcactgtcacttttccctactctgtatgggggatctccgagatcccccatacagagtatattgttgaagaggatagctattagaaggattatggatgcggttgcttgcgtgaggaaatacttgatggcatcttctgtctacatggtggtctctcgccatctatagatacactggatcatatcagagcacttgatcgcctacaagaagttccccatgagggtccaatgtgtgacttgctgtggtcagatccagatgaccgtggtggttggggtatatctcctcgaggagctggttacacctttgggcaagatatttctgagacatttaatcatgccaatggcctcacgttggtgtctagagctcaccagctagtgatggagggatataactggtgccatgaccggaatgtagtaacgattttcagtgctccaaactattgttatcgttgtggtaaccaagctgcaatcatggaacttgacgatactctaaaatactctttcttgcagtttgacccagcacctcgtagaggcgagccacatgttactcgtcgtaccccagactacttcctgtaatgaaattttaaacttgtacagtattgccatgaaccatatatcgacctaatggaaatgggaagagcaacagtaactccaaagtgtcagaaaatagttaacattcaaaaaacttgttttcacatggaccaaaagatgtgccatataaaaatacaaagcctcttgtcatcaacagccgtgaccactttagaatgaaccagttcattgcatgctgaagcgacattgttggtcaagaaaccagtttctggcatagcgctatttgtagttacttttgctttctctgagagactgcagataataagatgtaaacattaacacctcgtgaatacaatttaacttccatttagctatagctttactcagcatgactgtagataaggatagcagcaaacaatcattggagcttaatgaacatttttaaaaataattaccaaggcctcccttctacttgtgagttttgaaattgttctttttattttcagggataccgtttaatttaattatatgatttgtctgcactcagtttattccctactcaaatctcagccccatgttgttctttgttattgtcagaacctggtgagttgttttgaacagaactgttttttccccttcctgtaagacgatgtgactgcacaagagcactgcagtgtttttcataataaacttgtgaactaagaactga

SEQ ID NO: 331450 - DNA, 1103 bp, Homo sapiens
ggctgtacgtctcgaaagacgggagatagcggaccacggcgtcgcgacgtgtaagcctaccctggcgggtccaatgtgtgacttgctgtggtcagatccagatgaccgtggtggttggggtatatctcctcgaggagctggttacacctttgggcaagatatttctgagacatttaatcatgccaatggcctcacgttggtgtctagagctcaccagctagtgatggagggatataactggtgccatgaccggaatgtagtaacgattttcagtgctccaaactattgttatcgttgtggtaaccaagctgcaatcatggaacttgacgatactctaaaatactctttcttgcagtttgacccagcacctcgtagaggcgagccacatgttactcgtcgtaccccagactacttcctgtaatgaaattttaaacttgtacagtattgccatgaaccatatatcgacctaatggaaatgggaagagcaacagtaactccaaagtgtcagaaaatagttaacattcaaaaaacttgttttcacatggaccaaaagatgtgccatataaaaatacaaagcctcttgtcatcaacagccgtgaccactttagaatgaaccagttcattgcatgctgaagcgacattgttggtcaagaaaccagtttctggcatagcgctatttgtagttacttttgctttctctgagagactgcagataataagatgtaaacattaacacctcgtgaatacaatttaacttccatttagctatagctttactcagcatgactgtagataaggatagcagcaaacaatcattggagcttaatgaacatttttaaaaataattaccaaggcctcccttctacttgtgagttttgaaattgttctttttattttcagggataccgtttaatttaattatatgatttgtctgcactcagtttattccctactcaaatctcagccccatgttgttctttgttattgtcagaacctggtgagttgttttgaacagaactgttttttccccttcctgtaagacgatgtgactgcacaagagcactgcagtgtttttcataataaacttgtgaactaagaactga

SEQ ID NO: 331451 - DNA, 1690 bp, Homo sapiens
tccatccttcccttcccccaccaccccgccctccgggagccacgcccaaaaagtcaaggcgcttcagttaccagccggctacgtcgcgcctgcgctttgacccccagtttgcgccccaactccggtcgtgcggccgcccggggagggctctgcagttgcgcagcttgctccccggcccttttcccctccgctccccgccgcctcctgacgccgggcgtgacgtcaccacgcccggcggccgccattacagagagccgagctctggagcctcagcgagcggaggaggaggcgcagcggccgacggccgagtactgcggtgagagccagcgggccagcgccagcctcaacagccgccagaagtacacgaggaaccggcggcggcgtgtgcgtgtaggcccgtgtgcgggcggcggcgcgggaggagcgcggagcggcagccggctggggcgggtggcatcatggacgagaaggtgttcaccaaggagctggaccagtggatcgagcagctgaacgagtgcaagcagctgtccgagtcccaggtcaagagcctctgcgagaaggctaaagaaatcctgacaaaagaatccaacgtgcaagaggttcgatgtccagttactgtctgtggagatgtgcatgggcaatttcatgatctcatggaactgtttagaattggtggcaaatcaccagatacaaattacttgtttatgggagattatgttgacagaggatattattcagttgaaacagttacactgcttgtagctcttaaggttcgttaccgtgaacgcatcaccattcttcgagggaatcatgagagcagacagatcacacaagtttatggtttctatgatgaatgtttaagaaaatatggaaatgcaaatgtttggaaatattttacagatctttttgactatcttcctctcactgccttggtggatgggcagatcttctgtctacatggtggtctctcgccatctatagatacactggatcatatcagagcacttgatcgcctacaagaagttccccatgagggtccaatgtgtgacttgctgtggtcagatccagatgaccgtggtggttggggtatatctcctcgaggagctggttacacctttgggcaagatatttctgagacatttaatcatgccaatggcctcacgttggtgtctagagctcaccagctagtgatggaggtatgctgtgttctctgaaatatgacttgtttttttagtaaacttaaggaaagaagatattagggagttttaaattaatgacatttgtgagaaattccatctattccttctgatgagtttatcattatagcctgagccttttcagtagatgcacactactagaattaaaagctcaagcttttgattacaatgaatccattaacatgttttcagagaaatctgaatgactaggaagtacttgagatttaagagtgggaaagtaagatatagggagttggtgtgcatgtatgatattttatgatcccaatgttatttcgtatatttaatgtatgtatgtaggagagactggaaagaaatacacgaaaatgttttaagtggtcctttggatgctaggattacaggtgatttgaaagaagggaaagaggcaaaggttcttgacatggcacactgattagaatatttttaaaataaggtcctaattagattaatactag

SEQ ID NO: 331452 - DNA, 369 bp, Homo sapiens
gaaattaggaaggagggaaggaaaaaaggaaggaagaaggaaggaagggaagtaggaaaggaagaaggaaagcaaaaaggaagaaggaagggagggaggcaaggagggagagagggaaggaagaaggaaggaaagagggagggaagaaggaagaaaggaaagaaggaaggaaggagggaaagaaggaaggaagggggaaggagggaaggtaggaagggaaagaagaaaggaaggagggaaggaagaaaggaaggtaggaaagaaggaaggaggaagtaaggaaggaaagaaggaagaggaaaggaaggaagaaaggaaggaaagaggaaggaaggaagaaggagggaaggaaggagggaaggaagaaag

SEQ ID NO: 331453 - DNA, 430 bp, Homo sapiens
taaatagaaattgcgatcaaatcaaggaaaatcacataaagcaaattcagaaaaatctgcttcctcagtgtagctctcttgtattttacaatgtagctctcttgtattttattttcatggaaaatcaccgggggctgggaggggtggcaggaggaagctctccctcttcccagttgttcttctttccatctaatcccacactttcccttctgacacctgcttcccgattccactcccttactgccaccttctcacatccttaccaacatctactgacacctcccccatcaacccagcctcctccactgctcaggtgaacaaagctgtcatggccagaatggagcatgaaggcccggtcaccgagtcatatcaaaggccagaaaacaagggagacggaggggagcgggctcaagggccagaggaaagctcc

SEQ ID NO: 331454 - DNA, 3286 bp, Homo sapiens
gcgaccgaacgcggcggtcggcagcgttcgcgcgggggcctgcgaagcgctgctcggggccggcactgcccgcggggaggacgcgccgccgccgccacccagcgccgccgccgccgccgcctccagccgggccgccgcgcgtcccgggggccggccccgcgagcgcaggagtaaacaccgccggagtcttggagccgctgcagaagggaataaagagagatgcagggatttgtgaggttacggcgccccagctgcaagatgcactagccggctgaacccgggatcggctgacttgttggaaccggagtgctctgcacggagagtggtggatgagttgaagttgccttcccggggctcattttccacgctgccgagaggaatccgagaggcaaggcaatcacttcgtcttgccattgattgggtatcgggagctttttttttctcccctctctctttcttttcctccgtcttgttgcatgcaagaaaattacagtccgctgctcgcccgccctgggtgcgagatattcagccccgctctctcccgtgcattgtgcaacccaaagatgaaagaccgaaggggagaaagttaaagaaatcgcccacatgcgctggatcagtccacggcttggggaaaggcatccagagaaggtgggagcggagagtttgaagtctttacaggcgggaagatggcggactggagctgaaagtgttgattgggaaacttgggtgattcttgtgtttatttacaatcctcttgacccaggcaggacacatgcaggccaaaaaacgctatttcatcctgctctcagctggctcttgtctcgcccttttgttttatttcggaggcttgcagtttagggcatcgaggagccacagccggagagaagaacacagcggtaggaatggcttgcaccaccccagtccggatcatttctggccccgcttcccggacgctctgcgccccttcgttccttgggatcaattggaaaacgaggattccagcgtgcacatttccccccggcagaagcgagatgccaactccagcatctacaaaggcaagaagtgccgcatggagtcctgcttcgatttcaccctttgcaagaaaaacggcttcaaagtctacgtatacccacagcaaaaaggggagaaaatcgccgaaagttaccaaaacattctagcggccatcgagggctccaggttctacacctcggaccccagccaggcgtgcctctttgtcctgagtctggatactttagacagagaccagttgtcacctcagtatgtgcacaatttgagatccaaagtgcagagtctccacttgtggaacaatggtaggaatcatttaatttttaatttatattccggcacttggcctgactacaccgaggacgtggggtttgacatcggccaggcgatgctggccaaagccagcatcagtactgaaaacttccgacccaactttgatgtttctattcccctcttttctaaggatcatcccaggacaggaggggagagggggtttttgaagttcaacaccatccctcctctcaggaagtacatgctggtattcaaggggaagaggtacctgacagggataggatcagacaccaggaatgccttatatcacgtccataacggggaggacgttgtgctcctcaccacctgcaagcatggcaaagactggcaaaagcacaaggattctcgctgtgacagagacaacaccgagtatgagaagtatgattatcgggaaatgctgcacaatgccactttctgtctggttcctcgtggtcgcaggcttgggtccttcagattcctggaggctttgcaggctgcctgcgtccctgtgatgctcagcaatggatgggagttgccattctctgaagtgattaattggaaccaagctgccgtcataggcgatgagagattgttattacagattccttctacaatcaggtctattcatcaggataaaatcctagcacttagacagcagacacaattcttgtgggaggcttatttttcttcagttgagaagattgtattaactacactagagattattcaggacagaatattcaagcacatatcacgtaacagtttaatatggaacaaacatcctggaggattgttcgtactaccacagtattcatcttatctgggagattttccttactactatgctaatttaggtttaaagcccccctccaaattcactgcagtcatccatgcggtgacccccctggtctctcagtcccagccagtgttgaagcttctcgtggctgcagccaagtcccagtactgtgcccagatcatagttctatggaattgtgacaagcccctaccagccaaacaccgctggcctgccactgctgtgcctgtcgtcgtcattgaaggagagagcaaggttatgagcagccgttttctgccctacgacaacatcatcacagacgccgtgctcagccttgacgaggacacggtgctttcaacaacagaggtggatttcgccttcacagtgtggcagagcttccctgagaggattgtggggtaccccgcgcgcagccacttctgggataactctaaggagcggtggggatacacatcaaagtggacgaacgactactccatggtgttgacaggagctgctatttaccacaaatattatcactacctatactcccattacctgccagccagcctgaagaacatggtggaccaattggccaattgtgaggacattctcatgaacttcctggtgtctgctgtgacaaaattgcctccaatcaaagtgacccagaagaagcagtataaggagacaatgatgggacagacttctcgggcttcccgttgggctgaccctgaccactttgcccagcgacagagctgcatgaatacgtttgccagctggtttggctacatgccgctgatccactctcagatgaggctcgaccccgtcctctttaaagaccaggtctctattttgaggaagaaataccgagacattgagcgactttgaggaatccggctgagtgggggaggggaagcaagaagggatgggggtcaagctgctctctcttcccagtgcagatccactcatcagcagagccagattgtgccaactatccaaaaacttagatgagcagaatgacaaaaaaaaaaaaggccaatgagaactcaactcctggctcctgggactgcaccagactgctccaaactcacctcactggcttctgtgtcccaagactaggttggtacagtttaattatggaacattaaataattatttttg

SEQ ID NO: 331455 - DNA, 1023 bp, Homo sapiens
  misc_feature (1011)..(1011): n is a, c, g, or t
gcgaccgaacgcggcggtcggcagcgttcgcgcgggggcctgcgaagcgctgctcggggccggcactgcccgcggggaggacgcgccgccgccgccacccagcgccgccgccgccgccgcctccagccgggccgccgcgcgtcccgggggccggccccgcgagcgcaggagtaaacaccgccggagtcttggagccgctgcagaagggaataaagagagatgcagggatttgtgaggttacggcgccccagctgcaagatgcactagccggctgaacccgggatcggctgacttgttggaaccggagtgctctgcacggagagtggtggatgagttgaagttgccttcccggggctcattttccacgctgccgagaggaatccgagaggcaaggcaatcacttcgtcttgccattgattgggtatcgggagctttttttttctcccctctctctttcttttcctccgtcttgttgcatgcaagaaaattacagtccgctgctcgcccgccctgggtgcgagatattcagccccgctctctcccgtgcattgtgcaacccaaagatgaaagaccgaaggggagaaagttaaagaaatcgcccacatgcgctggatcagtccacggcttggggaaaggcatccagagaaggtgggagcggagagtttgaagtctttacaggcgggaagatggcggactggagctgaaagtgttgattgggaaacttgggtgattcttgtgtttatttacaatcctcttgacccaggcaggacacatgcaggccaaaaaacgctatttcatcctgctctcagctggctcttgtctcgcccttttgttttatttcggaggcttgcagtttagggcatcgaggagccacagccggagagaagaacacagcggtaggaatggcttgcaccaccccagtccggatcatttctggccccgcttcccggacgctctgcgccccttcgttccttgggatcaattggaaaaccaagggaccttggcttcttnaccaccttgcaa

SEQ ID NO: 331456 - DNA, 1741 bp, Homo sapiens
gcgaccgaacgcggcggtcggcagcgttcgcgcgggggcctgcgaagcgctgctcggggccggcactgcccgcggggaggacgcgccgccgccgccacccagcgccgccgccgccgccgcctccagccgggccgccgcgcgtcccgggggccggccccgcgagcgcaggagtaaacaccgccggagtcttggagccgctgcagaagggaataaagagagatgcagggatttgtgaggttacggcgccccagctgcaagatgcactagccggctgaacccgggatcggctgacttgttggaaccggagtgctctgcacggagagtggtggatgagttgaagttgccttcccggggctcattttccacgctgccgagaggaatccgagaggcaaggcaatcacttcgtcttgccattgattgggtatcgggagctttttttttctcccctctctctttcttttcctccgtcttgttgcatgcaagaaaattacagtccgctgctcgcccgccctgggtgcgagatattcagccccgctctctcccgtgcattgtgcaacccaaagatgaaagaccgaaggggagaaagttaaagaaatcgcccacatgcgctggatcagtccacggcttggggaaaggcatccagagaaggtgggagcggagagtttgaagtctttacaggcgggaagatggcggactggagctgaaagtgttgattgggaaacttgggtgattcttgtgtttatttacaatcctcttgacccaggcaggacacatgcaggccaaaaaacgctatttcatcctgctctcagctggctcttgtctcgcccttttgttttatttcggaggcttgcagtttagggcatcgaggagccacagccggagagaagaacacagcggtaggaatggcttgcaccaccccagtccggatcatttctggccccgcttcccggacgctctgcgccccttcgttccttgggatcaattggaaaacgaggattccagcgtgcacatttccccccggcagaagcgagatgccaactccagcatctacaaaggcaagaagtgccgcatggagtcctgcttcgatttcaccctttgcaagaaaaacggcttcaaagtctacgtatacccacagcaaaaaggggagaaaatcgccgaaagttaccaaaacattctagcggccatcgagggctccaggttctacacctcggaccccagccaggcgtgcctctttgtcctgagtctggatactttagacagagaccagttgtcacctcagtatgtgcacaatttgagatccaaagtgcagagtctccacttgtggaacaatggtaggaatcatttaatttttaatttatattccggcacttggcctgactacaccgaggacgtggggtttgacatcggccaggcgatgctggccaaagccagcatcagtactgaaaacttccgacccaactttgatgtttctattcccctcttttctaaggatcatcccaggacaggaggggagagggggtttttgaagttcaacaccatccctcctctcaggaagtacatgctggtattcaaggggaagaggtacctgacagggataggatcagacaccaggaatgccttatatcacgtccataacggggaggacgttgtgctcctcaccacctgcaagcatggcaaagactggcaaaagcacaaggattctcgctgtgggtgcagaataaggctcctctagagtcagctc

SEQ ID NO: 331457 - DNA, 3358 bp, Homo sapiens
gcgaccgaacgcggcggtcggcagcgttcgcgcgggggcctgcgaagcgctgctcggggccggcactgcccgcggggaggacgcgccgccgccgccacccagcgccgccgccgccgccgcctccagccgggccgccgcgcgtcccgggggccggccccgcgagcgcaggagtaaacaccgccggagtcttggagccgctgcagaagggaataaagagagatgcagggatttgtgaggttacggcgccccagctgcaagatgcactagccggctgaacccgggatcggctgacttgttggaaccggagtgctctgcacggagagtggtggatgagttgaagttgccttcccggggctcattttccacgctgccgagaggaatccgagaggcaaggcaatcacttcgtcttgccattgattgggtatcgggagctttttttttctcccctctctctttcttttcctccgtcttgttgcatgcaagaaaattacagtccgctgctcgcccgccctgggtgcgagatattcagccccgctctctcccgtgcattgtgcaacccaaagatgaaagaccgaaggggagaaagttaaagaaatcgcccacatgcgctggatcagtccacggcttggggaaaggcatccagagaaggtgggagcggagagtttgaagtctttacaggcgggaagatggcggactggagctgaaagtgttgattgggaaacttgggtgattcttgtgtttatttacaatcctcttgacccaggcaggacacatgcaggccaaaaaacgctatttcatcctgctctcagctggctcttgtctcgcccttttgttttatttcggaggcttgcagtttagggcatcgaggagccacagccggagagaagaacacagcggtaggaatggcttgcaccaccccagtccggatcatttctggccccgcttcccggacgctctgcgccccttcgttccttgggatcaattggaaaacgaggattccagcgtgcacatttccccccggcagaagcgagatgccaactccagcatctacaaaggcaagaagtgccgcatggagtcctgcttcgatttcaccctttgcaagaaaaacggcttcaaagtctacgtatacccacagcaaaaaggggagaaaatcgccgaaagttaccaaaacattctagcggccatcgagggctccaggttctacacctcggaccccagccaggcgtgcctctttgtcctgagtctggatactttagacagagaccagttgtcacctcagtatgtgcacaatttgagatccaaagtgcagagtctccacttgtggaacaatggtaggaatcatttaatttttaatttatattccggcacttggcctgactacaccgaggacgtggggtttgacatcggccaggcgatgctggccaaagccagcatcagtactgaaaacttccgacccaactttgatgtttctattcccctcttttctaaggatcatcccaggacaggaggggagagggggtttttgaagttcaacaccatccctcctctcaggaagtacatgctggtattcaaggggaagaggtacctgacagggataggatcagacaccaggaatgccttatatcacgtccataacggggaggacgttgtgctcctcaccacctgcaagcatggcaaagactggcaaaagcacaaggattctcgctgtgacagagacaacaccgagtatgagaagtatgattatcgggaaatgctgcacaatgccactttctgtctggttcctcgtggtcgcaggcttgggtccttcagattcctggaggctttgcaggctgcctgcgtccctgtgatgctcagcaatggatgggagttgccattctctgaagtgattaattggaaccaagctgccgtcataggcgatgagagattgttattacagattccttctacaatcaggtctattcatcaggataaaatcctagcacttagacagcagacacaattcttgtgggaggcttatttttcttcagttgagaagattgtattaactacactagagattattcaggacagaatattcaagcacatatcacgtaacagtttaatatggaacaaacatcctggaggattgttcgtactaccacagtattcatcttatctgggagattttccttactactatgctaatttaggtttaaagcccccctccaaattcactgcagtcatccatgcggtgacccccctggtctctcagtcccagccagtgttgaagcttctcgtggctgcagccaagtcccagtactgtgcccagatcatagttctatggaattgtgacaagcccctaccagccaaacaccgctggcctgccactgctgtgcctgtcgtcgtcattgaaggagagagcaaggttatgagcagccgttttctgccctacgacaacatcatcacagacgccgtgctcagccttgacgaggacacggtgctttcaacaacagaggtggatttcgccttcacagtgtggcagagcttccctgagaggattgtggggtaccccgcgcgcagccacttctgggataactctaaggagcggtggggatacacatcaaagtggacgaacgactactccatggtgttgacaggagctgctatttaccacaaatattatcactacctatactcccattacctgccagccagcctgaagaacatggtggaccaattggccaattgtgaggacattctcatgaacttcctggtgtctgctgtgacaaaattgcctccaatcaaagtgacccagaagaagcagtataaggagacaatgatgggacagacttctcgggcttcccgttgggctgaccctgaccactttgcccagcgacagagctgcatgaatacgtttgccagctggtttggctacatgccgctgatccactctcagatgaggctcgaccccgtcctctttaaagaccaggtctctattttgaggaagaaataccgagacattgagcgactttgaggaatccggctgagtgggggaggggaagcaagaagggatgggggtcaagctgctctctcttcccagtgcagatccactcatcagcagagccagattgtgccaactatccaaaaacttagatgagcagaatgacaaaaaaaaaaaaggccaatgagaactcaactcctggctcctgggactgcaccagactgctccaaactcacctcactggcttctgtgtcccaagactaggttggtacagtttaattatggaacattaaataattatttttgaaatgattgctatgcaggtttaaacttttttaatgatcaaaactattaaaaaccagagttctttgtttaatc

SEQ ID NO: 331458 - DNA, 807 bp, Homo sapiens
cagtgggtggacagttgcagaaattatgccatgtggaatattatacaggagttacaaagggtaaggccattctaaatacagtgcctcagaagaaggttcatgataagatgttatgttaaaaaagcaagcaaaaacaacagtattagatgattttgctttgctttgttttaatttggagctactttttttttaatttccatttttattttggattcatgcagtacatgtgcaggtttgtcacaagggtatattgtgtggtgctgaggtttgagattctaatgatcctatcaccccaatagtgaatatagtaaccaataaaaagttttacagtccttccccctcttcatccctccatttttagtccttgcctccctccctccttcaatgtctactgttcccagctgtatgtctgtgtgccccccagatttagcttcaacttataaatgaaaatatgcactatttgttttctttttctgtgttagttcacttaggataatggactccagttgcatccatgttgctacaagggacataattttattttttatggctgcatagtattccacggtgtcggtgtatgtaccacattttatttacccaatccaccgttgatgggcacctaggttgattccatgtcttagctactgtgaatagtgctatgatgaacacatggcaatacagtgcatgtatctttttggtagaacgatttcttttcctttaggtatatacccaataatgggattgctgggtcaaatggcaattgtatttttagttctttcagaactctccaaactgctttccacaggg

SEQ ID NO: 331459 - DNA, 2344 bp, Homo sapiens
attttagtggtggagtcaatttatttctgagacgatctcatttacctgaatgaggagctcatatttattttcaggatttatgaggaatccaagatgaatttggagcaggagaggccgtctgtctgcagtgccccaggctgctcccagcgcttcccaacagaggaccatctgatgattcataggcacaaacatgaaatgactttgaagtttccttcaataaagacagacaatatgttatcagatcaaactccgaccccaacgagattcctgaagaactgcgaggaggtgggcctcttcagcgagctggactgctccctggagcacgagttcaggaaggctcaggaagaggagagcagcaagcggaatatctcgatgcataatgcagttggtggggccatgacggggcccggaactcaccagcttagcagcgctcggctgcccaaccatgacaccaacgttgtgattcagcaagccatgccgtcgcctcagtccagctctgtcatcactcaggcaccttccaccaaccgccagatcgggcctgtcccaggctctctatcttctctgctacatctccacaacagacagagacagcccatgccagcctccatgcctgggaccctgcccaaccctacaatgccaggatcttccgccgtcttgatgccaatggagcgacaaatgtcagtgaactccagcatcatggggatgcaaggtccaaatctcagcaacccctgtgcttctccccaggtccagccaatgcattcagaagccaaaatgaggttgaaggctgcattgactcaccaccctgctgccatgtcaaatgggaacatgaacaccatgggacacatgatggagatgatgggctcccggcaggaccagacgccacaccatcacatgcactcgcacccgcatcagcaccagacactgccaccccatcacccttacccacaccagcaccagcacccagcacaccatcctcaccctcaaccccatcaccagcagaaccatccacatcaccactcccattcccaccttcatgcacacccagcacatcaccagacctcgccacatccgcccctgcacaccggcaaccaagcacaggtttcaccagcaacacaacagatgcagccaacccagacaatacagccaccccagcccacaggggggcgccggcgaagggtggtagacgaggatccggacgagaggcggcggaaatttctggaacggaaccgggcagctgccacccgctgcagacagaagaggaaggtctgggtgatgtcattggaaaagaaagcagaagaactcacccagacaaacatgcagcttcagaatgaagtgtctatgttgaaaaatgaggtggcccagctgaaacagttgttgttaacacataaagactgcccaataacagccatgcagaaagaatcacaaggatatctaagtccagagagtagccctcctgctagtcctgtcccagcttgctcccagcaacaagtcatccagcataataccatcactacttcctcatcggtcagcgaggtggtaggaagctccaccctcagccagctcaccactcacagaacagacctgaatccgattctttaaaatgcaccatcagacctggcctccaagaagagctgtagcgtaccatgcgtcctttcttttaagggcatttttagaattaactcagacctggaagactcctcagttcttcaaagactggctttcatttttatagttattatggaaatgttgtcttttatacttagttatataagaaaaaagggagttatgcaattaatatctatcagcttgggaaacgctttggtgcttttctccagttttctggtaccagttacttgtttataaactgaaccttttctgtatatagccatggtttcattcttatcagtccaaccctttgcctgaaacattgaatcttgttaaaccacagcttttagctaaaatgaggtatacctagatgtcaagtaagacagatccaaggtaactgggtaggaaatcttttgacatcttaactcatgttgagtttgtgctgtggtgtcaccagaattccagataaacacacagcctttcccatacctttttttttcttactataaaatattataagatccattgatgtccaaataataccaccgagcatctcttcacctctcctcctcttggtccacttgctaatgcccagttttcttctccatttccactttttcttaggctccctatttactattcattttgacttccttctgttttatttttttccctttagcattgcatgtgaataagaaaataatgtttaaagaaaaaaaaaaaaaagcaaacctccaaa

SEQ ID NO: 331460 - DNA, 2025 bp, Homo sapiens
agagagcaagtgagcgagagcccagccggagggagagccagagctaggcgcaaaagaagggccagcacattacatcatcgcttggcctggaatcaaatgggaaggatatgactcactcaagctagttaagctttggctcaaattctacacacactcattccagagctctcatgttctgcacctcaggagggaattcagcctcagtgatgtccatgaggcctgtcccaggctctctatcttctctgctacatctccacaacagacagagacagcccatgccagcctccatgcctgggaccctgcccaaccctacaatgccaggatcttccgccgtcttgatgccaatggagcgacaaatgtcagtgaactccagcatcatggggatgcaaggtccaaatctcagcaacccctgtgcttctccccaggtccagccaatgcattcagaagccaaaatgaggttgaaggctgcattgactcaccaccctgctgccatgtcaaatgggaacatgaacaccatgggacacatgatggagatgatgggctcccggcaggaccagacgccacaccatcacatgcactcgcacccgcatcagcaccagacactgccaccccatcacccttacccacaccagcaccagcacccagcacaccatcctcaccctcaaccccatcaccagcagaaccatccacatcaccactcccattcccaccttcatgcacacccagcacatcaccagacctcgccacatccgcccctgcacaccggcaaccaagcacaggtttcaccagcaacacaacagatgcagccaacccagacaatacagccaccccagcccacaggggggcgccggcgaagggtggtagacgaggatccggacgagaggcggcggaaatttctggaacggaaccgggcagctgccacccgctgcagacagaagaggaaggtctgggtgatgtcattggaaaagaaagcagaagaactcacccagacaaacatgcagcttcagaatgaagtgtctatgttgaaaaatgaggtggcccagctgaaacagttgttgttaacacataaagactgcccaataacagccatgcagaaagaatcacaaggatatctaagtccagagagtagccctcctgctagtcctgtcccagcttgctcccagcaacaagtcatccagcataataccatcactacttcctcatcggtcagcgaggtggtaggaagctccaccctcagccagctcaccactcacagaacagacctgaatccgattctttaaaatgcaccatcagacctggcctccaagaagagctgtagcgtaccatgcgtcctttcttttaagggcatttttagaattaactcagacctggaagactcctcagttcttcaaagactggctttcatttttatagttattatggaaatgttgtcttttatacttagttatataagaaaaaagggagttatgcaattaatatctatcagcttgggaaacgctttggtgcttttctccagttttctggtaccagttacttgtttataaactgaaccttttctgtatatagccatggtttcattcttatcagtccaaccctttgcctgaaacattgaatcttgttaaaccacagcttttagctaaaatgaggtatacctagatgtcaagtaagacagatccaaggtaactgggtaggaaatcttttgacatcttaactcatgttgagtttgtgctgtggtgtcaccagaattccagataaacacacagcctttcccatacctttttttttcttactataaaatattataagatccattgatgtccaaataataccaccgagcatctcttcacctctcctcctcttggtccacttgctaatgcccagttttcttctccatttccactttttcttaggctccctatttactattcattttgacttccttctgttttatttttttccctttagcattgcatgtgaataagaaaataatgtttaaagaaaaaaaaaaaaaagcaaacctccaaa

SEQ ID NO: 331461 - DNA, 2318 bp, Homo sapiens
  misc_feature (15)..(15): n is a, c, g, or t
gatctgatgaatccnaggagtggagcaagaggcagattttggacacggttatgagaatgacagaaactgcctaaagcatttatgctctggcattcgtccctgtttctggaggtccagtaagcgcttcccaacagaggaccatctgatgattcataggcacaaacatgaaatgactttgaagtttccttcaataaagacagacaatatgttatcagatcaaactccgaccccaacgagattcctgaagaactgcgaggaggtgggcctcttcagcgagctggactgctccctggagcacgagttcaggaaggctcaggaagaggagagcagcaagcggaatatctcgatgcataatgcagttggtggggccatgacggggcccggaactcaccagcttagcagcgctcggctgcccaaccatgacaccaacgttgtgattcagcaagccatgccgtcgcctcagtccagctctgtcatcactcaggcaccttccaccaaccgccagatcgggcctgtcccaggctctctatcttctctgctacatctccacaacagacagagacagcccatgccagcctccatgcctgggaccctgcccaaccctacaatgccaggatcttccgccgtcttgatgccaatggagcgacaaatgtcagtgaactccagcatcatggggatgcaaggtccaaatctcagcaacccctgtgcttctccccaggtccagccaatgcattcagaagccaaaatgaggttgaaggctgcattgactcaccaccctgctgccatgtcaaatgggaacatgaacaccatgggacacatgatggagatgatgggctcccggcaggaccagacgccacaccatcacatgcactcgcacccgcatcagcaccagacactgccaccccatcacccttacccacaccagcaccagcacccagcacaccatcctcaccctcaaccccatcaccagcagaaccatccacatcaccactcccattcccaccttcatgcacacccagcacatcaccagacctcgccacatccgcccctgcacaccggcaaccaagcacaggtttcaccagcaacacaacagatgcagccaacccagacaatacagccaccccagcccacaggggggcgccggcgaagggtggtagacgaggatccggacgagaggcggcggaaatttctggaacggaaccgggcagctgccacccgctgcagacagaagaggaaggtctgggtgatgtcattggaaaagaaagcagaagaactcacccagacaaacatgcagcttcagaatgaagtgtctatgttgaaaaatgaggtggcccagctgaaacagttgttgttaacacataaagactgcccaataacagccatgcagaaagaatcacaaggatatctaagtccagagagtagccctcctgctagtcctgtcccagcttgctcccagcaacaagtcatccagcataataccatcactacttcctcatcggtcagcgaggtggtaggaagctccaccctcagccagctcaccactcacagaacagacctgaatccgattctttaaaatgcaccatcagacctggcctccaagaagagctgtagcgtaccatgcgtcctttcttttaagggcatttttagaattaactcagacctggaagactcctcagttcttcaaagactggctttcatttttatagttattatggaaatgttgtcttttatacttagttatataagaaaaaagggagttatgcaattaatatctatcagcttgggaaacgctttggtgcttttctccagttttctggtaccagttacttgtttataaactgaaccttttctgtatatagccatggtttcattcttatcagtccaaccctttgcctgaaacattgaatcttgttaaaccacagcttttagctaaaatgaggtatacctagatgtcaagtaagacagatccaaggtaactgggtaggaaatcttttgacatcttaactcatgttgagtttgtgctgtggtgtcaccagaattccagataaacacacagcctttcccatacctttttttttcttactataaaatattataagatccattgatgtccaaataataccaccgagcatctcttcacctctcctcctcttggtccacttgctaatgcccagttttcttctccatttccactttttcttaggctccctatttactattcattttgacttccttctgttttatttttttccctttagcattgcatgtgaataagaaaataatgtttaaagaaaaaaaaaaaaaagcaaacctccaaa

SEQ ID NO: 331462 - DNA, 494 bp, Homo sapiens
agagagcaagtgagcgagagcccagccggagggagagccagagctaggcgcaaaagaagggccagcacattacatcatcgcttggcctggaatcaaatgggaaggatatgactcactcaagctagttaagctttggctcaaattctacacacactcattccagagctctcatgttctgcacctcaggagggaattcagcctcagtgatgtccatgaggtttgtttttaattttattttcttttctcctgattttatagattttttttgcccctactgccttctgtttttgagccttcgtcctcctcctcctcctcttcattttctcccccttctccctttctgcccgtctttgtttctcctcttcttccttctcctctttccccagcccctccgctcctcttcttgcccgaagaggcatttcttttcacttcgatcagagtttttgttctagcacagagacctgaatgagttgaacagaggccgggttggagga

SEQ ID NO: 331463 - DNA, 2159 bp, Homo sapiens
acacttcagagggctgagatttctgagtaaacaaaggatttcaccaccaagttcctttcctaagatgcgagcgtttaggagacttattggcttgtttctattgaacatcagttagataacagaggtcaggaaatgaagtggaatttgatatattaactaggaagcagcaaaggaaaccaggcttgtgttttatttgttattatttccctaatatcctcaattatgtgactctcccatcagtggatctgatctgctgcacatgtgacattgttgtccctgctgttctggacactggggagacagggccagggcaccaggaatcatgtttgtttgtttttttctttgtcccaagcctgtcccaggctctctatcttctctgctacatctccacaacagacagagacagcccatgccagcctccatgcctgggaccctgcccaaccctacaatgccaggatcttccgccgtcttgatgccaatggagcgacaaatgtcagtgaactccagcatcatggggatgcaaggtccaaatctcagcaacccctgtgcttctccccaggtccagccaatgcattcagaagccaaaatgaggttgaaggctgcattgactcaccaccctgctgccatgtcaaatgggaacatgaacaccatgggacacatgatggagatgatgggctcccggcaggaccagacgccacaccatcacatgcactcgcacccgcatcagcaccagacactgccaccccatcacccttacccacaccagcaccagcacccagcacaccatcctcaccctcaaccccatcaccagcagaaccatccacatcaccactcccattcccaccttcatgcacacccagcacatcaccagacctcgccacatccgcccctgcacaccggcaaccaagcacaggtttcaccagcaacacaacagatgcagccaacccagacaatacagccaccccagcccacaggggggcgccggcgaagggtggtagacgaggatccggacgagaggcggcggaaatttctggaacggaaccgggcagctgccacccgctgcagacagaagaggaaggtctgggtgatgtcattggaaaagaaagcagaagaactcacccagacaaacatgcagcttcagaatgaagtgtctatgttgaaaaatgaggtggcccagctgaaacagttgttgttaacacataaagactgcccaataacagccatgcagaaagaatcacaaggatatctaagtccagagagtagccctcctgctagtcctgtcccagcttgctcccagcaacaagtcatccagcataataccatcactacttcctcatcggtcagcgaggtggtaggaagctccaccctcagccagctcaccactcacagaacagacctgaatccgattctttaaaatgcaccatcagacctggcctccaagaagagctgtagcgtaccatgcgtcctttcttttaagggcatttttagaattaactcagacctggaagactcctcagttcttcaaagactggctttcatttttatagttattatggaaatgttgtcttttatacttagttatataagaaaaaagggagttatgcaattaatatctatcagcttgggaaacgctttggtgcttttctccagttttctggtaccagttacttgtttataaactgaaccttttctgtatatagccatggtttcattcttatcagtccaaccctttgcctgaaacattgaatcttgttaaaccacagcttttagctaaaatgaggtatacctagatgtcaagtaagacagatccaaggtaactgggtaggaaatcttttgacatcttaactcatgttgagtttgtgctgtggtgtcaccagaattccagataaacacacagcctttcccatacctttttttttcttactataaaatattataagatccattgatgtccaaataataccaccgagcatctcttcacctctcctcctcttggtccacttgctaatgcccagttttcttctccatttccactttttcttaggctccctatttactattcattttgacttccttctgttttatttttttccctttagcattgcatgtgaataagaaaataatgtttaaagaaaaaaaaaaaaaagcaaacctccaaa

SEQ ID NO: 331464 - DNA, 2662 bp, Homo sapiens
  misc_feature (145)..(145): n is a, c, g, or t
aacatttacaacaaagttgattctgtgtagggttggaggctagacagttccacaaatttttagtcacattttccatgtcagttaaatctagggagttcaagactactggaaaaattagtctcattactaaaagaaacttagagancgagggaggtaccagagtctaggaggtacctctgggttgcagaagtaattgtaaaataccagacctgttctttttactaaaagctagtttcactatcttctggtctgaaatactgaggcaaatactcaagacttattttcttcctaatcttgctggtgaaacagaagttactagaaagaaaggaagaaaaaacttgatttggtgactgcaggaagcaacacgttgctgcttttattctacagataatgatttatgaggaatccaagatgaatttggagcaggagaggccgtctgtctgcagtgccccaggctgctcccagcgcttcccaacagaggaccatctgatgattcataggcacaaacatgaaatgactttgaagtttccttcaataaagacagacaatatgttatcagatcaaactccgaccccaacgagattcctgaagaactgcgaggaggtgggcctcttcagcgagctggactgctccctggagcacgagttcaggaaggctcaggaagaggagagcagcaagcggaatatctcgatgcataatgcagttggtggggccatgacggggcccggaactcaccagcttagcagcgctcggctgcccaaccatgacaccaacgttgtgattcagcaagccatgccgtcgcctcagtccagctctgtcatcactcaggcaccttccaccaaccgccagatcgggcctgtcccaggctctctatcttctctgctacatctccacaacagacagagacagcccatgccagcctccatgcctgggaccctgcccaaccctacaatgccaggatcttccgccgtcttgatgccaatggagcgacaaatgtcagtgaactccagcatcatggggatgcaaggtccaaatctcagcaacccctgtgcttctccccaggtccagccaatgcattcagaagccaaaatgaggttgaaggctgcattgactcaccaccctgctgccatgtcaaatgggaacatgaacaccatgggacacatgatggagatgatgggctcccggcaggaccagacgccacaccatcacatgcactcgcacccgcatcagcaccagacactgccaccccatcacccttacccacaccagcaccagcacccagcacaccatcctcaccctcaaccccatcaccagcagaaccatccacatcaccactcccattcccaccttcatgcacacccagcacatcaccagacctcgccacatccgcccctgcacaccggcaaccaagcacaggtttcaccagcaacacaacagatgcagccaacccagacaatacagccaccccagcccacaggggggcgccggcgaagggtggtagacgaggatccggacgagaggcggcggaaatttctggaacggaaccgggcagctgccacccgctgcagacagaagaggaaggtctgggtgatgtcattggaaaagaaagcagaagaactcacccagacaaacatgcagcttcagaatgaagtgtctatgttgaaaaatgaggtggcccagctgaaacagttgttgttaacacataaagactgcccaataacagccatgcagaaagaatcacaaggatatctaagtccagagagtagccctcctgctagtcctgtcccagcttgctcccagcaacaagtcatccagcataataccatcactacttcctcatcggtcagcgaggtggtaggaagctccaccctcagccagctcaccactcacagaacagacctgaatccgattctttaaaatgcaccatcagacctggcctccaagaagagctgtagcgtaccatgcgtcctttcttttaagggcatttttagaattaactcagacctggaagactcctcagttcttcaaagactggctttcatttttatagttattatggaaatgttgtcttttatacttagttatataagaaaaaagggagttatgcaattaatatctatcagcttgggaaacgctttggtgcttttctccagttttctggtaccagttacttgtttataaactgaaccttttctgtatatagccatggtttcattcttatcagtccaaccctttgcctgaaacattgaatcttgttaaaccacagcttttagctaaaatgaggtatacctagatgtcaagtaagacagatccaaggtaactgggtaggaaatcttttgacatcttaactcatgttgagtttgtgctgtggtgtcaccagaattccagataaacacacagcctttcccatacctttttttttcttactataaaatattataagatccattgatgtccaaataataccaccgagcatctcttcacctctcctcctcttggtccacttgctaatgcccagttttcttctccatttccactttttcttaggctccctatttactattcattttgacttccttctgttttatttttttccctttagcattgcatgtgaataagaaaataatgtttaaagaaaaaaaaaaaaaagcaaacctccaaa

SEQ ID NO: 331465 - DNA, 1868 bp, Homo sapiens
gacagaagtacagctttaaatagccttgcagatacatttttctaaaaatgcagacctgaggcctgtcccaggctctctatcttctctgctacatctccacaacagacagagacagcccatgccagcctccatgcctgggaccctgcccaaccctacaatgccaggatcttccgccgtcttgatgccaatggagcgacaaatgtcagtgaactccagcatcatggggatgcaaggtccaaatctcagcaacccctgtgcttctccccaggtccagccaatgcattcagaagccaaaatgaggttgaaggctgcattgactcaccaccctgctgccatgtcaaatgggaacatgaacaccatgggacacatgatggagatgatgggctcccggcaggaccagacgccacaccatcacatgcactcgcacccgcatcagcaccagacactgccaccccatcacccttacccacaccagcaccagcacccagcacaccatcctcaccctcaaccccatcaccagcagaaccatccacatcaccactcccattcccaccttcatgcacacccagcacatcaccagacctcgccacatccgcccctgcacaccggcaaccaagcacaggtttcaccagcaacacaacagatgcagccaacccagacaatacagccaccccagcccacaggggggcgccggcgaagggtggtagacgaggatccggacgagaggcggcggaaatttctggaacggaaccgggcagctgccacccgctgcagacagaagaggaaggtctgggtgatgtcattggaaaagaaagcagaagaactcacccagacaaacatgcagcttcagaatgaagtgtctatgttgaaaaatgaggtggcccagctgaaacagttgttgttaacacataaagactgcccaataacagccatgcagaaagaatcacaaggatatctaagtccagagagtagccctcctgctagtcctgtcccagcttgctcccagcaacaagtcatccagcataataccatcactacttcctcatcggtcagcgaggtggtaggaagctccaccctcagccagctcaccactcacagaacagacctgaatccgattctttaaaatgcaccatcagacctggcctccaagaagagctgtagcgtaccatgcgtcctttcttttaagggcatttttagaattaactcagacctggaagactcctcagttcttcaaagactggctttcatttttatagttattatggaaatgttgtcttttatacttagttatataagaaaaaagggagttatgcaattaatatctatcagcttgggaaacgctttggtgcttttctccagttttctggtaccagttacttgtttataaactgaaccttttctgtatatagccatggtttcattcttatcagtccaaccctttgcctgaaacattgaatcttgttaaaccacagcttttagctaaaatgaggtatacctagatgtcaagtaagacagatccaaggtaactgggtaggaaatcttttgacatcttaactcatgttgagtttgtgctgtggtgtcaccagaattccagataaacacacagcctttcccatacctttttttttcttactataaaatattataagatccattgatgtccaaataataccaccgagcatctcttcacctctcctcctcttggtccacttgctaatgcccagttttcttctccatttccactttttcttaggctccctatttactattcattttgacttccttctgttttatttttttccctttagcattgcatgtgaataagaaaataatgtttaaagaaaaaaaaaaaaaagcaaacctccaaa

SEQ ID NO: 331466 - DNA, 5895 bp, Homo sapiens
ggcggaggaggagccgcgggcgcggcgccgcgctgtccccggccgccgcccgccccactccgcaccgcatgtaaacagtcccagccggcccagcccggccccggaggagcccgcgcaggccgagccgagcgccgcgctgcccgcccgggaggagggcgcctaggagcgggagggcgggcggcggcgggaggcgggcgcggggccgcgatggatttccagcagctggccgacgttgcggagaaatggtgctccaacacgcccttcgagctcatcgccaccgaggagaccgaacgcaggatggatttctacgccgaccccggcgtctccttctatgtgctgtgtccggacaacggctgcggcgacaattttcacgtgtggagtgagagcgaggactgcctgcctttcttgcagctagcacaggattacatctcctcctgcggcaagaagacgctccacgaagtcctggaaaaagtcttcaagtctttcagacctttactggggcttccggatgcagatgacgatgcgtttgaagagtacagtgctgacgtggaagaagaggagccagaggcggaccacccccagatgggggtcagccagcagtaaatctgggggctcccctgagaaggagagtgagccccacagtaacctaggtggggtcactgcccctcctgggttagcattttgcattagcacttcgaaataggacatctggctcccagcatccaaattaaaatgaaatacctttttaacgaccacaaaatatctgtgatgagctttgctcagaagtgacctgaatttcactcccgcttcagtggggtttctatggagttgtcttggtagcctttgccattttgaatttagagtccattttgtggctgactattctcttaagtttatgttggagaattaacattcgctgactcgaatgtagagaactctgaatgtattaaggataggttttgagtcctcacaggtgaccttactgagggaaagcatggcagagaagaaatgcagtctgcactttttatgtactttttaagtgtccgtaagtgaaaggttttgcttataaagcatgaattttaatatctagtcattaaactgcacaagtgcaaatacaagggcaggaaaggataatcacttagctttggactaagagggtaagagaggcccagaagcctttaagtgttttgccattactgagttacctgggtatgtagcgactggttcgtggttaggtgtaaatgttacttgcttgttcgactgtttcaaaacatgctaattccaaagccacttttgaagtctatagtggaaaatatagatggggtgaaagatataatgtattgatttttaaagctgtttataagccgtcccacgtataaaatgaaacattttaccttctctctttctaatgagatggccgcttgttaaatcatgaaaacatccagaattcaagtgccgcttaaactttgaagccatagataaatttgttagaaaagtaaaccaggattaaaagtttttaaaaatatggtagaatccttctttactttttaagtcttttatttaaaaaaaaaaaagtcaaaaaaaggattccattgtgtaatttatttaaaaatttaatcacatgtttcgagggacttaattgtggtgtatttgtaaagggacacgaaggtaggaatcttttaatcgtgggttagcttggttaacagggaacgttttaataatcaagatactcagacaactcacagaaacaacttctgtaataactggaaatactgctgttatcgtttagccaacaattacttactggggacatcctttgtaatgctaacatggaattattcctggacccttctgcatccctggttttagttaacctaggatgcggaatgcctcctttacaacactagattaaacctagcatctggggtgggtacgtttaaacagtcacacatgtgcctgttaggttgtgaaagttttgaattaaaaacaagcagtagcagcagaggccacagaacttatgggagtcttgtatatcttccaggcatgtcggtgtaaacctgattgtctcgacattttctgtttaattgattggtgctgtgaggagttcggctgctcgtggtaaaacagcgtactccagttttaagtcatcgggtaaaataataggacagtgatttccatctgtgcttcagtacccactttgtgttcttttcttgaaaagtcatactaaaggttaatttcaagtaaaatgaatttccttccaagtagcctattagtaaaacacaacttagtgtttcatccattggggtgagcatatactgccctttgcagccctgcctgtgttctgattggctccattcatgagcaaaggtgattgtgagctgtatattacacaggtgtcgcccaggtttcgtaacctccactttaatgcagtaagccgcaagaatgacttctgcaagtgaaatgaggaagcttcactagcttgctccattggaaggtaaactgaaattttatacgttgaagcttaaaatctaaatttatgtatgtttggaaatggaatggacattaacataaaatgtattttatcaaaaaagtgtttagactttgaccaaatacatgttggtattatcatgttaatgttctctgtttataaaaattgagtggagatagatagactcggccattctgtgggctgatgagaattctgggctttgttttgcaccaggggtaggaaacagagaacatgtctgtatgttacttaatctccatagcaaaatcccaaacagcattagcagatcgaattgtttcttctaagacttcctttttctgaatgtgtgcacatcccttctcgtgctcacacacttgcccacacactcacttcttcctgcgctgtggctgctctaagcagggctgtgcatggtgcaaagctgcagtcagtgagcctggcagcctgtggtttctgttatggaaatggttccatggtgaaacacatccctgacccttcacagacttacacatttactcaccaggaggtggcagcggtgtgggaggaggagtgttgaccttggacgcaggagagacacctgggttctagttcaagtcggccaaggactgtgtgaccttgacaagtctaactggtctgtgaacaaggggcatttgcccttccagctgtaaacactgcccttctgtgcctgccttatgtgtgtgtgtgagtaaggagcaacagtcaaggaaacttttagggattcgagaagaaaatacatgtgggatcttgccaaggtgctgcctttaggatgctgacccctgcactaccttagaacatgttgatctgtgagtgcccaagcccctgagggctcgatctcatggggcagatgaaattctcttccttagaggaaagggaaaggtgaggccccagaggacttatctcagctgtacatgctctgcctgtggagacatggcttttctttgtgctgtggcagactggggctttggaagtggtgtatgtttaacttacctgagagtgagagatgtgtaggaagaatagctggaagaaagtgaaagatgagtgccagtacttttggcctgttatccagtagagagaaagtgacagtgaaagtaacgtgagagagaaagagtgtgtgtgtatatgtgagagagagaaagaaagagaaaggaatgcttgattgcttgttgttcactgggccagctctgaaatccaaaatcatgccttgataacattacaaaaccgtgatcctgggtttgagtgaatcctagagacattgttcttatggccgcctggtttccgcagcctgatcaccatatcgagcagacgtcaaggaatcagagtgaagtacggagccagggagggaggtgaggccccgtgtagtgcctgtcaccactgtggattcacctgcactcaggtgtccactcctgtctcccaggcccaaagcagcacatggtgcaatggaaaagtctcttatgtagggatcctccttgtgtcctggtgccagaattagatttccagtgtacttcaacgaaaacctctctcctttatagttgctgtcatctttcatgtataaacagaaaccgtctctagcacaatatatttctgaatattgtttctgtttcataagagcacaatgtacatggacctaggggagctgtggtcccaagtgtcattggaatttatattttaggaataggctttgcatgttaaaattcacaagttgggaaactggtatgaacagatctgatttcttacagagaggcatgaaggaataggcaggacttaacttggggtgggaggagatgaataagggagaatgggagagttggggtctgacagttaccacctgagccccaggaaaactgttttcattttcacggctgtctcactgggggcctgctttcctcaaaggaactgactgtatgttgagaggcaatgccttgtgttggcatggctttgccactttaaaagtgccccccagccaaggagaccaacaggaaccctgctcatctggtagggctctttccttcagtaaaaccagctgccagcctgagaagcctgtctttcccaaatgcaggcagatctgagaggggctccaggcacccggcaggtaaatcacaaagcaaacttgggtgtccttggcagcggggaggaagcaggagtgccccctcaggccagagggcagggccaacctcctcactgtgcttcaaggttgtagaaagagcacaattaatgcttaagcgatcacagacccctctcccctgcagtgggtgttagctccaaagagatgccattgctgatcacccagtcttcggagaagcctaaaatttctttgaattaaaaactgatcctttttcataaagacccagtcacttctcccagtttagtgataacaggtatgacacaagaagctgaagtcttttagattttatagagagtaattctgaaacctgccagaatgctggtagcctgtggtgtccatggcaatgggtgtccatggtaaaatatctatagcttctgctcactgggcaaatataaaagacaacatattatttaacataatatgttgtcttttatatttttatttaaatctggattacgaaaatatagtacccatgagcatttcatgttagaaaccccatttaaagcactataaggctgaataggcacaagcgattaaaagtagatgccaggccacataaaaataaatgttttaatttacttagagctgtattcaagttgtttgataccagacagaaagctgacagtctgttctttgtaaactgcctttccctgtttttctgttttgttttgtttctcaagtttcattttttactaagccccttctgacacctaggcagataaagataagagtagtgcgcagtacaaatgtcagctctgaagaggaggaagtaaatcttcaatgctagggcagatcttcactatccgtgatccagtcttaatttgagcatgagagcaaaatttagtcatctacacaagaagcaaaagcaaggaatagttgttgggtttttgttttttggttgttgtttttttttttttttaggcaagaagtgttgccggtagggtatgtgtgctttctttgccttcctatttcctttcaaagaaatctcttgtaaattacaaaactgtgaattgggttgccaaaaactgttgcccttcgttagatgcttcaaacagtgtaaatcctatactgcaccctgtccacctctgctccctcctccctcccctgagagtgaggacctcatccgaccatgtaattaccattcgcttgctattaaagagcctttcaaactctaaaaacacacacatacaaaacaccaaaatcaaaactacaatacaaaaaaaaaaagggggggggcaaaaaaaatccc

SEQ ID NO: 331467 - DNA, 6267 bp, Homo sapiens
aaaaaataaaacctagactgggcatggtggctcacgcctgtagtcccagcaatttgggaggctgaggcaggtggatcgagaccagcctgggcaacatggcgaaaccctgtctctaccaaaaatacaaagaattagtcaggtgtggtggtgcgcacctgtagttccacctacttgggtggccaagatgggagggtcacttgaatctggcaggaagaggttgcagtgagttaagatcatgccactgcactccagcctgggcaacagagcaaaaccctgtctgaaaaagaaaaagaaaaagaaacaaaaaatctaaaaccgatctcctcttagtatgtgttagattgtgaaatgatgcttcggtatgatgtccttttaaagcattttagggaagggaagttttcagaaagcctttgttttccagtgacatagtggtgacttggtgggttctcttaagttatttgcatttggaagtaaatttaccaccacgcctactcacaggccgatctgggtaaagaatgtcttgttccaagttaatgcttacaaactatgcttaattaatctttcagccgtagctgaaagcaaagttaaggattttgaaggcaaaggctctggtttctccttccccatgtctgaaaaccgcccttagcctgcacaaggtgaacagtggaaatcattggtgaggaatggccacccactgccctctttactgtgtaggagcagatctgatgatgaacagagcagcacgtgtggagtgagagcgaggactgcctgcctttcttgcagctagcacaggattacatctcctcctgcggcaagaagacgctccacgaagtcctggaaaaagtcttcaagtctttcagacctttactggggcttccggatgcagatgacgatgcgtttgaagagtacagtgctgacgtggaagaagaggagccagaggcggaccacccccagatgggggtcagccagcagtaaatctgggggctcccctgagaaggagagtgagccccacagtaacctaggtggggtcactgcccctcctgggttagcattttgcattagcacttcgaaataggacatctggctcccagcatccaaattaaaatgaaatacctttttaacgaccacaaaatatctgtgatgagctttgctcagaagtgacctgaatttcactcccgcttcagtggggtttctatggagttgtcttggtagcctttgccattttgaatttagagtccattttgtggctgactattctcttaagtttatgttggagaattaacattcgctgactcgaatgtagagaactctgaatgtattaaggataggttttgagtcctcacaggtgaccttactgagggaaagcatggcagagaagaaatgcagtctgcactttttatgtactttttaagtgtccgtaagtgaaaggttttgcttataaagcatgaattttaatatctagtcattaaactgcacaagtgcaaatacaagggcaggaaaggataatcacttagctttggactaagagggtaagagaggcccagaagcctttaagtgttttgccattactgagttacctgggtatgtagcgactggttcgtggttaggtgtaaatgttacttgcttgttcgactgtttcaaaacatgctaattccaaagccacttttgaagtctatagtggaaaatatagatggggtgaaagatataatgtattgatttttaaagctgtttataagccgtcccacgtataaaatgaaacattttaccttctctctttctaatgagatggccgcttgttaaatcatgaaaacatccagaattcaagtgccgcttaaactttgaagccatagataaatttgttagaaaagtaaaccaggattaaaagtttttaaaaatatggtagaatccttctttactttttaagtcttttatttaaaaaaaaaaaagtcaaaaaaaggattccattgtgtaatttatttaaaaatttaatcacatgtttcgagggacttaattgtggtgtatttgtaaagggacacgaaggtaggaatcttttaatcgtgggttagcttggttaacagggaacgttttaataatcaagatactcagacaactcacagaaacaacttctgtaataactggaaatactgctgttatcgtttagccaacaattacttactggggacatcctttgtaatgctaacatggaattattcctggacccttctgcatccctggttttagttaacctaggatgcggaatgcctcctttacaacactagattaaacctagcatctggggtgggtacgtttaaacagtcacacatgtgcctgttaggttgtgaaagttttgaattaaaaacaagcagtagcagcagaggccacagaacttatgggagtcttgtatatcttccaggcatgtcggtgtaaacctgattgtctcgacattttctgtttaattgattggtgctgtgaggagttcggctgctcgtggtaaaacagcgtactccagttttaagtcatcgggtaaaataataggacagtgatttccatctgtgcttcagtacccactttgtgttcttttcttgaaaagtcatactaaaggttaatttcaagtaaaatgaatttccttccaagtagcctattagtaaaacacaacttagtgtttcatccattggggtgagcatatactgccctttgcagccctgcctgtgttctgattggctccattcatgagcaaaggtgattgtgagctgtatattacacaggtgtcgcccaggtttcgtaacctccactttaatgcagtaagccgcaagaatgacttctgcaagtgaaatgaggaagcttcactagcttgctccattggaaggtaaactgaaattttatacgttgaagcttaaaatctaaatttatgtatgtttggaaatggaatggacattaacataaaatgtattttatcaaaaaagtgtttagactttgaccaaatacatgttggtattatcatgttaatgttctctgtttataaaaattgagtggagatagatagactcggccattctgtgggctgatgagaattctgggctttgttttgcaccaggggtaggaaacagagaacatgtctgtatgttacttaatctccatagcaaaatcccaaacagcattagcagatcgaattgtttcttctaagacttcctttttctgaatgtgtgcacatcccttctcgtgctcacacacttgcccacacactcacttcttcctgcgctgtggctgctctaagcagggctgtgcatggtgcaaagctgcagtcagtgagcctggcagcctgtggtttctgttatggaaatggttccatggtgaaacacatccctgacccttcacagacttacacatttactcaccaggaggtggcagcggtgtgggaggaggagtgttgaccttggacgcaggagagacacctgggttctagttcaagtcggccaaggactgtgtgaccttgacaagtctaactggtctgtgaacaaggggcatttgcccttccagctgtaaacactgcccttctgtgcctgccttatgtgtgtgtgtgagtaaggagcaacagtcaaggaaacttttagggattcgagaagaaaatacatgtgggatcttgccaaggtgctgcctttaggatgctgacccctgcactaccttagaacatgttgatctgtgagtgcccaagcccctgagggctcgatctcatggggcagatgaaattctcttccttagaggaaagggaaaggtgaggccccagaggacttatctcagctgtacatgctctgcctgtggagacatggcttttctttgtgctgtggcagactggggctttggaagtggtgtatgtttaacttacctgagagtgagagatgtgtaggaagaatagctggaagaaagtgaaagatgagtgccagtacttttggcctgttatccagtagagagaaagtgacagtgaaagtaacgtgagagagaaagagtgtgtgtgtatatgtgagagagagaaagaaagagaaaggaatgcttgattgcttgttgttcactgggccagctctgaaatccaaaatcatgccttgataacattacaaaaccgtgatcctgggtttgagtgaatcctagagacattgttcttatggccgcctggtttccgcagcctgatcaccatatcgagcagacgtcaaggaatcagagtgaagtacggagccagggagggaggtgaggccccgtgtagtgcctgtcaccactgtggattcacctgcactcaggtgtccactcctgtctcccaggcccaaagcagcacatggtgcaatggaaaagtctcttatgtagggatcctccttgtgtcctggtgccagaattagatttccagtgtacttcaacgaaaacctctctcctttatagttgctgtcatctttcatgtataaacagaaaccgtctctagcacaatatatttctgaatattgtttctgtttcataagagcacaatgtacatggacctaggggagctgtggtcccaagtgtcattggaatttatattttaggaataggctttgcatgttaaaattcacaagttgggaaactggtatgaacagatctgatttcttacagagaggcatgaaggaataggcaggacttaacttggggtgggaggagatgaataagggagaatgggagagttggggtctgacagttaccacctgagccccaggaaaactgttttcattttcacggctgtctcactgggggcctgctttcctcaaaggaactgactgtatgttgagaggcaatgccttgtgttggcatggctttgccactttaaaagtgccccccagccaaggagaccaacaggaaccctgctcatctggtagggctctttccttcagtaaaaccagctgccagcctgagaagcctgtctttcccaaatgcaggcagatctgagaggggctccaggcacccggcaggtaaatcacaaagcaaacttgggtgtccttggcagcggggaggaagcaggagtgccccctcaggccagagggcagggccaacctcctcactgtgcttcaaggttgtagaaagagcacaattaatgcttaagcgatcacagacccctctcccctgcagtgggtgttagctccaaagagatgccattgctgatcacccagtcttcggagaagcctaaaatttctttgaattaaaaactgatcctttttcataaagacccagtcacttctcccagtttagtgataacaggtatgacacaagaagctgaagtcttttagattttatagagagtaattctgaaacctgccagaatgctggtagcctgtggtgtccatggcaatgggtgtccatggtaaaatatctatagcttctgctcactgggcaaatataaaagacaacatattatttaacataatatgttgtcttttatatttttatttaaatctggattacgaaaatatagtacccatgagcatttcatgttagaaaccccatttaaagcactataaggctgaataggcacaagcgattaaaagtagatgccaggccacataaaaataaatgttttaatttacttagagctgtattcaagttgtttgataccagacagaaagctgacagtctgttctttgtaaactgcctttccctgtttttctgttttgttttgtttctcaagtttcattttttactaagccccttctgacacctaggcagataaagataagagtagtgcgcagtacaaatgtcagctctgaagaggaggaagtaaatcttcaatgctagggcagatcttcactatccgtgatccagtcttaatttgagcatgagagcaaaatttagtcatctacacaagaagcaaaagcaaggaatagttgttgggtttttgttttttggttgttgtttttttttttttttaggcaagaagtgttgccggtagggtatgtgtgctttctttgccttcctatttcctttcaaagaaatctcttgtaaattacaaaactgtgaattgggttgccaaaaactgttgcccttcgttagatgcttcaaacagtgtaaatcctatactgcaccctgtccacctctgctccctcctccctcccctgagagtgaggacctcatccgaccatgtaattaccattcgcttgctattaaagagcctttcaaactctaaaaacacacacatacaaaacaccaaaatcaaaactacaatacaaaaaaaaaaagggggggggcaaaaaaaatccc

SEQ ID NO: 331468 - DNA, 5743 bp, Homo sapiens
ggcggaggaggagccgcgggcgcggcgccgcgctgtccccggccgccgcccgccccactccgcaccgcatgtaaacagtcccagccggcccagcccggccccggaggagcccgcgcaggccgagccgagcgccgcgctgcccgcccgggaggagggcgcctaggagcgggagggcgggcggcggcgggaggcgggcgcggggccgcgatggatttccagcagctggccgacgttgcggagaaatggtgctccaacacgcccttcgagctcatcgccaccgaggagaccgaacgcaggatggatttctacgccgaccccggcgtctccttctatgtgctgtgtccggacaacggctgcggcgacaattttcacgtgtggagtgagagcgaggactgcctgcctttcttgcagctagcacaggattacatctcctcctgcggcaagaagacgctccacgaagtcctggaaaaagtcttcaagtctttcagacctttactggggcttccggatgcagatgacgatgcgtttgaagagtacagtgctgacgtggaagaagaggagccagaggcggaccacccccagatgggggtcagccagcagtaaatctgggggctcccctgagaaggagagtgagccccacagtaacctaggtggggtcactgcccctcctgggttagcattttgcattagcacttcgaaataggacatctggctcccagcatccaaattaaaatgaaatacctttttaacgaccacaaaatatctgtgatgagctttgctcagaagtgacctgaatttcactcccgcttcagtggggtttctatggagttgtcttggtagcctttgccattttgaatttagagtccattttgtggctgactattctcttaagtttatgttggagaattaacattcgctgactcgaatgtagagaactctgaatgtattaaggataggttttgagtcctcacaggtgaccttactgagggaaagcatggcagagaagaaatgcagtctgcactttttatgtactttttaagtgtccgtaagtgaaaggttttgcttataaagcatgaattttaatatctagtcattaaactgcacaagtgcaaatacaagggcaggaaaggataatcacttagctttggactaagagggtaagagaggcccagaagcctttaagtgttttgccattactgagttacctgggtatgtagcgactggttcgtggttaggtgtaaatgttacttgcttgttcgactgtttcaaaacatgctaattccaaagccacttttgaagtctatagtggaaaatatagatggggtgaaagatataatgtattgatttttaaagctgtttataagccgtcccacgtataaaatgaaacattttaccttctctctttctaatgagatggccgcttgttaaatcatgaaaacatccagaattcaagtgccgcttaaactttgaagccatagataaatttgttagaaaagtaaaccaggattaaaagtttttaaaaatatggtagaatccttctttactttttaagtcttttatttaaaaaaaaaaaagtcaaaaaaaggattccattgtgtaatttatttaaaaatttaatcacatgtttcgagggacttaattgtggtgtatttgtaaagggacacgaaggtaggaatcttttaatcgtgggttagcttggttaacagggaacgttttaataatcaagatactcagacaactcacagaaacaacttctgtaataactggaaatactgctgttatcgtttagccaacaattacttactggggacatcctttgtaatgctaacatggaattattcctggacccttctgcatccctggttttagttaacctaggatgcggaatgcctcctttacaacactagattaaacctagcatctggggtgggtacgtttaaacagtcacacatgtgcctgttaggttgtgaaagttttgaattaaaaacaagcagtagcagcagaggccacagaacttatgggagtcttgtatatcttccaggcatgtcggtgtaaacctgattgtctcgacattttctgtttaattgattggtgctgtgaggagttcggctgctcgtggtaaaacagcgtactccagttttaagtcatcgggtaaaataataggacagtgatttccatctgtgcttcagtacccactttgtgttcttttcttgaaaagtcatactaaaggttaatttcaagtaaaatgaatttccttccaagtagcctattagtaaaacacaacttagtgtttcatccattggggtgagcatatactgccctttgcagccctgcctgtgttctgattggctccattcatgagcaaaggtgattgtgagctgtatattacacaggtgtcgcccaggtttcgtaacctccactttaatgcagtaagccgcaagaatgacttctgcaagtgaaatgaggaagcttcactagcttgctccattggaaggtaaactgaaattttatacgttgaagcttaaaatctaaatttatgtatgtttggaaatggaatggacattaacataaaatgtattttatcaaaaaagtgtttagactttgaccaaatacatgttggtattatcatgttaatgttctctgtttataaaaattgagtggagatagatagactcggccattctgtgggctgatgagaattctgggctttgttttgcaccaggggtaggaaacagagaacatgtctgtatgttacttaatctccatagcaaaatcccaaacagcattagcagatcgaattgtttcttctaagacttcctttttctgaatgtgtgcacatcccttctcgtgctcacacacttgcccacacactcacttcttcctgcgctgtggctgctctaagcagggctgtgcatggtgcaaagctgcagtcagtgagcctggcagcctgtggtttctgttatggaaatggttccatggtgaaacacatccctgacccttcacagacttacacatttactcaccaggaggtggcagcggtgtgggaggaggagtgttgaccttggacgcaggagagacacctgggttctagttcaagtcggccaaggactgtgtgaccttgacaagtctaactggtctgtgaacaaggggcatttgcccttccagctgtaaacactgcccttctgtgcctgccttatgtgtgtgtgtgagtaaggagcaacagtcaaggaaacttttagggattcgagaagaaaatacatgtgggatcttgccaaggtgctgcctttaggatgctgacccctgcactaccttagaacatgttgatctgtgagtgcccaagcccctgagggctcgatctcatggggcagatgaaattctcttccttagaggaaagggaaaggtgaggccccagaggacttatctcagctgtacatgctctgcctgtggagacatggcttttctttgtgctgtggcagactggggctttggaagtggtgtatgtttaacttacctgagagtgagagatgtgtaggaagaatagctggaagaaagtgaaagatgagtgccagtacttttggcctgttatccagtagagagaaagtgacagtgaaagtaacgtgagagagaaagagtgtgtgtgtatatgtgagagagagaaagaaagagaaaggaatgcttgattgcttgttgttcactgggccagctctgaaatccaaaatcatgccttgataacattacaaaaccgtgatcctgggtttgagtgaatcctagagacattgttcttatggccgcctggtttccgcagcctgatcaccatatcgagcagacgtcaaggaatcagagtgaagtacggagccagggagggaggtgaggccccgtgtagtgcctgtcaccactgtggattcacctgcactcaggtgtccactcctgtctcccaggcccaaagcagcacatggtgcaatggaaaagtctcttatgtagggatcctccttgtgtcctggtgccagaattagatttccagtgtacttcaacgaaaacctctctcctttatagttgctgtcatctttcatgtataaacagaaaccgtctctagcacaatatatttctgaatattgtttctgtttcataagagcacaatgtacatggacctaggggagctgtggtcccaagtgtcattggaatttatattttaggaataggctttgcatgttaaaattcacaagttgggaaactggtatgaacagatctgatttcttacagagaggcatgaaggaataggcaggacttaacttggggtgggaggagatgaataagggagaatgggagagttggggtctgacagttaccacctgagccccaggaaaactgttttcattttcacggctgtctcactgggggcctgctttcctcaaaggaactgactgtatgttgagaggcaatgccttgtgttggcatggctttgccactttaaaagtgccccccagccaaggagaccaacaggaaccctgctcatctggtagggctctttccttcagtaaaaccagctgccagcctgagaagcctgtctttcccaaatgcaggcagatctgagaggggctccaggcacccggcaggtaaatcacaaagcaaacttgggtgtccttggcagcggggaggaagcaggagtgccccctcaggccagagggcagggccaacctcctcactgtgcttcaaggttgtagaaagagcacaattaatgcttaagcgatcacagacccctctcccctgcagtgggtgttagctccaaagagatgccattgctgatcacccagtcttcggagaagcctaaaatttctttgaattaaaaactgatcctttttcataaagacccagtcacttctcccagtttagtgataacaggtatgacacaagaagctgaagtcttttatatttttatttaaatctggattacgaaaatatagtacccatgagcatttcatgttagaaaccccatttaaagcactataaggctgaataggcacaagcgattaaaagtagatgccaggccacataaaaataaatgttttaatttacttagagctgtattcaagttgtttgataccagacagaaagctgacagtctgttctttgtaaactgcctttccctgtttttctgttttgttttgtttctcaagtttcattttttactaagccccttctgacacctaggcagataaagataagagtagtgcgcagtacaaatgtcagctctgaagaggaggaagtaaatcttcaatgctagggcagatcttcactatccgtgatccagtcttaatttgagcatgagagcaaaatttagtcatctacacaagaagcaaaagcaaggaatagttgttgggtttttgttttttggttgttgtttttttttttttttaggcaagaagtgttgccggtagggtatgtgtgctttctttgccttcctatttcctttcaaagaaatctcttgtaaattacaaaactgtgaattgggttgccaaaaactgttgcccttcgttagatgcttcaaacagtgtaaatcctatactgcaccctgtccacctctgctccctcctccctcccctgagagtgaggacctcatccgaccatgtaattaccattcgcttgctattaaagagcctttcaaactctaaaaacacacacatacaaaacaccaaaatcaaaactacaatacaaaaaaaaaaagggggggggcaaaaaaaatccc

SEQ ID NO: 331469 - DNA, 5772 bp, Homo sapiens
ggcggaggaggagccgcgggcgcggcgccgcgctgtccccggccgccgcccgccccactccgcaccgcatgtaaacagtcccagccggcccagcccggccccggaggagcccgcgcaggccgagccgagcgccgcgctgcccgcccgggaggagggcgcctaggagcgggagggcgggcggcggcgggaggcgggcgcggggccgcgatggatttccagcagctggccgacgttgcggagaaatggtgctccaacacgcccttcgagctcatcgccaccgaggagaccgaacgcaggatggatttctacgccgaccccggcgtctccttctatgtgctgtgtccggacaacggctgcggcgacaattttttactggggcttccggatgcagatgacgatgcgtttgaagagtacagtgctgacgtggaagaagaggagccagaggcggaccacccccagatgggggtcagccagcagtaaatctgggggctcccctgagaaggagagtgagccccacagtaacctaggtggggtcactgcccctcctgggttagcattttgcattagcacttcgaaataggacatctggctcccagcatccaaattaaaatgaaatacctttttaacgaccacaaaatatctgtgatgagctttgctcagaagtgacctgaatttcactcccgcttcagtggggtttctatggagttgtcttggtagcctttgccattttgaatttagagtccattttgtggctgactattctcttaagtttatgttggagaattaacattcgctgactcgaatgtagagaactctgaatgtattaaggataggttttgagtcctcacaggtgaccttactgagggaaagcatggcagagaagaaatgcagtctgcactttttatgtactttttaagtgtccgtaagtgaaaggttttgcttataaagcatgaattttaatatctagtcattaaactgcacaagtgcaaatacaagggcaggaaaggataatcacttagctttggactaagagggtaagagaggcccagaagcctttaagtgttttgccattactgagttacctgggtatgtagcgactggttcgtggttaggtgtaaatgttacttgcttgttcgactgtttcaaaacatgctaattccaaagccacttttgaagtctatagtggaaaatatagatggggtgaaagatataatgtattgatttttaaagctgtttataagccgtcccacgtataaaatgaaacattttaccttctctctttctaatgagatggccgcttgttaaatcatgaaaacatccagaattcaagtgccgcttaaactttgaagccatagataaatttgttagaaaagtaaaccaggattaaaagtttttaaaaatatggtagaatccttctttactttttaagtcttttatttaaaaaaaaaaaagtcaaaaaaaggattccattgtgtaatttatttaaaaatttaatcacatgtttcgagggacttaattgtggtgtatttgtaaagggacacgaaggtaggaatcttttaatcgtgggttagcttggttaacagggaacgttttaataatcaagatactcagacaactcacagaaacaacttctgtaataactggaaatactgctgttatcgtttagccaacaattacttactggggacatcctttgtaatgctaacatggaattattcctggacccttctgcatccctggttttagttaacctaggatgcggaatgcctcctttacaacactagattaaacctagcatctggggtgggtacgtttaaacagtcacacatgtgcctgttaggttgtgaaagttttgaattaaaaacaagcagtagcagcagaggccacagaacttatgggagtcttgtatatcttccaggcatgtcggtgtaaacctgattgtctcgacattttctgtttaattgattggtgctgtgaggagttcggctgctcgtggtaaaacagcgtactccagttttaagtcatcgggtaaaataataggacagtgatttccatctgtgcttcagtacccactttgtgttcttttcttgaaaagtcatactaaaggttaatttcaagtaaaatgaatttccttccaagtagcctattagtaaaacacaacttagtgtttcatccattggggtgagcatatactgccctttgcagccctgcctgtgttctgattggctccattcatgagcaaaggtgattgtgagctgtatattacacaggtgtcgcccaggtttcgtaacctccactttaatgcagtaagccgcaagaatgacttctgcaagtgaaatgaggaagcttcactagcttgctccattggaaggtaaactgaaattttatacgttgaagcttaaaatctaaatttatgtatgtttggaaatggaatggacattaacataaaatgtattttatcaaaaaagtgtttagactttgaccaaatacatgttggtattatcatgttaatgttctctgtttataaaaattgagtggagatagatagactcggccattctgtgggctgatgagaattctgggctttgttttgcaccaggggtaggaaacagagaacatgtctgtatgttacttaatctccatagcaaaatcccaaacagcattagcagatcgaattgtttcttctaagacttcctttttctgaatgtgtgcacatcccttctcgtgctcacacacttgcccacacactcacttcttcctgcgctgtggctgctctaagcagggctgtgcatggtgcaaagctgcagtcagtgagcctggcagcctgtggtttctgttatggaaatggttccatggtgaaacacatccctgacccttcacagacttacacatttactcaccaggaggtggcagcggtgtgggaggaggagtgttgaccttggacgcaggagagacacctgggttctagttcaagtcggccaaggactgtgtgaccttgacaagtctaactggtctgtgaacaaggggcatttgcccttccagctgtaaacactgcccttctgtgcctgccttatgtgtgtgtgtgagtaaggagcaacagtcaaggaaacttttagggattcgagaagaaaatacatgtgggatcttgccaaggtgctgcctttaggatgctgacccctgcactaccttagaacatgttgatctgtgagtgcccaagcccctgagggctcgatctcatggggcagatgaaattctcttccttagaggaaagggaaaggtgaggccccagaggacttatctcagctgtacatgctctgcctgtggagacatggcttttctttgtgctgtggcagactggggctttggaagtggtgtatgtttaacttacctgagagtgagagatgtgtaggaagaatagctggaagaaagtgaaagatgagtgccagtacttttggcctgttatccagtagagagaaagtgacagtgaaagtaacgtgagagagaaagagtgtgtgtgtatatgtgagagagagaaagaaagagaaaggaatgcttgattgcttgttgttcactgggccagctctgaaatccaaaatcatgccttgataacattacaaaaccgtgatcctgggtttgagtgaatcctagagacattgttcttatggccgcctggtttccgcagcctgatcaccatatcgagcagacgtcaaggaatcagagtgaagtacggagccagggagggaggtgaggccccgtgtagtgcctgtcaccactgtggattcacctgcactcaggtgtccactcctgtctcccaggcccaaagcagcacatggtgcaatggaaaagtctcttatgtagggatcctccttgtgtcctggtgccagaattagatttccagtgtacttcaacgaaaacctctctcctttatagttgctgtcatctttcatgtataaacagaaaccgtctctagcacaatatatttctgaatattgtttctgtttcataagagcacaatgtacatggacctaggggagctgtggtcccaagtgtcattggaatttatattttaggaataggctttgcatgttaaaattcacaagttgggaaactggtatgaacagatctgatttcttacagagaggcatgaaggaataggcaggacttaacttggggtgggaggagatgaataagggagaatgggagagttggggtctgacagttaccacctgagccccaggaaaactgttttcattttcacggctgtctcactgggggcctgctttcctcaaaggaactgactgtatgttgagaggcaatgccttgtgttggcatggctttgccactttaaaagtgccccccagccaaggagaccaacaggaaccctgctcatctggtagggctctttccttcagtaaaaccagctgccagcctgagaagcctgtctttcccaaatgcaggcagatctgagaggggctccaggcacccggcaggtaaatcacaaagcaaacttgggtgtccttggcagcggggaggaagcaggagtgccccctcaggccagagggcagggccaacctcctcactgtgcttcaaggttgtagaaagagcacaattaatgcttaagcgatcacagacccctctcccctgcagtgggtgttagctccaaagagatgccattgctgatcacccagtcttcggagaagcctaaaatttctttgaattaaaaactgatcctttttcataaagacccagtcacttctcccagtttagtgataacaggtatgacacaagaagctgaagtcttttagattttatagagagtaattctgaaacctgccagaatgctggtagcctgtggtgtccatggcaatgggtgtccatggtaaaatatctatagcttctgctcactgggcaaatataaaagacaacatattatttaacataatatgttgtcttttatatttttatttaaatctggattacgaaaatatagtacccatgagcatttcatgttagaaaccccatttaaagcactataaggctgaataggcacaagcgattaaaagtagatgccaggccacataaaaataaatgttttaatttacttagagctgtattcaagttgtttgataccagacagaaagctgacagtctgttctttgtaaactgcctttccctgtttttctgttttgttttgtttctcaagtttcattttttactaagccccttctgacacctaggcagataaagataagagtagtgcgcagtacaaatgtcagctctgaagaggaggaagtaaatcttcaatgctagggcagatcttcactatccgtgatccagtcttaatttgagcatgagagcaaaatttagtcatctacacaagaagcaaaagcaaggaatagttgttgggtttttgttttttggttgttgtttttttttttttttaggcaagaagtgttgccggtagggtatgtgtgctttctttgccttcctatttcctttcaaagaaatctcttgtaaattacaaaactgtgaattgggttgccaaaaactgttgcccttcgttagatgcttcaaacagtgtaaatcctatactgcaccctgtccacctctgctccctcctccctcccctgagagtgaggacctcatccgaccatgtaattaccattcgcttgctattaaagagcctttcaaactctaaaaacacacacatacaaaacaccaaaatcaaaactacaatacaaaaaaaaaaagggggggggcaaaaaaaatccc

SEQ ID NO: 331470 - DNA, 5967 bp, Homo sapiens
acagggcaagaatggctcatggttctggatttcactggggagaagcccacacagccttcctgctgggaccgcccaggccatacccaaagaaatgactccaaagacagtaagtgggccaggaagacaaaaggctgttctcttgccatgaatatgtgtatccaaccatcgttcagaagtaagaagtattatattatttgtatcaggcctttctcttgaggccacccagattttaaatattttcccatctgcatgagaaaaatgcttgaaagtgtcatgtaaactgacaatttaaatagaatagatagaaagatagaggatgggggtgggcagatgattccttgggtagaatggaactttctccaagttctggaggctctaatggacaagatgccaacctcgggagttttcctagccggacctcttgaatctgtcccaggccagcacgtgtggagtgagagcgaggactgcctgcctttcttgcagctagcacaggattacatctcctcctgcggcaagaagacgctccacgaagtcctggaaaaagtcttcaagtctttcagacctttactggggcttccggatgcagatgacgatgcgtttgaagagtacagtgctgacgtggaagaagaggagccagaggcggaccacccccagatgggggtcagccagcagtaaatctgggggctcccctgagaaggagagtgagccccacagtaacctaggtggggtcactgcccctcctgggttagcattttgcattagcacttcgaaataggacatctggctcccagcatccaaattaaaatgaaatacctttttaacgaccacaaaatatctgtgatgagctttgctcagaagtgacctgaatttcactcccgcttcagtggggtttctatggagttgtcttggtagcctttgccattttgaatttagagtccattttgtggctgactattctcttaagtttatgttggagaattaacattcgctgactcgaatgtagagaactctgaatgtattaaggataggttttgagtcctcacaggtgaccttactgagggaaagcatggcagagaagaaatgcagtctgcactttttatgtactttttaagtgtccgtaagtgaaaggttttgcttataaagcatgaattttaatatctagtcattaaactgcacaagtgcaaatacaagggcaggaaaggataatcacttagctttggactaagagggtaagagaggcccagaagcctttaagtgttttgccattactgagttacctgggtatgtagcgactggttcgtggttaggtgtaaatgttacttgcttgttcgactgtttcaaaacatgctaattccaaagccacttttgaagtctatagtggaaaatatagatggggtgaaagatataatgtattgatttttaaagctgtttataagccgtcccacgtataaaatgaaacattttaccttctctctttctaatgagatggccgcttgttaaatcatgaaaacatccagaattcaagtgccgcttaaactttgaagccatagataaatttgttagaaaagtaaaccaggattaaaagtttttaaaaatatggtagaatccttctttactttttaagtcttttatttaaaaaaaaaaaagtcaaaaaaaggattccattgtgtaatttatttaaaaatttaatcacatgtttcgagggacttaattgtggtgtatttgtaaagggacacgaaggtaggaatcttttaatcgtgggttagcttggttaacagggaacgttttaataatcaagatactcagacaactcacagaaacaacttctgtaataactggaaatactgctgttatcgtttagccaacaattacttactggggacatcctttgtaatgctaacatggaattattcctggacccttctgcatccctggttttagttaacctaggatgcggaatgcctcctttacaacactagattaaacctagcatctggggtgggtacgtttaaacagtcacacatgtgcctgttaggttgtgaaagttttgaattaaaaacaagcagtagcagcagaggccacagaacttatgggagtcttgtatatcttccaggcatgtcggtgtaaacctgattgtctcgacattttctgtttaattgattggtgctgtgaggagttcggctgctcgtggtaaaacagcgtactccagttttaagtcatcgggtaaaataataggacagtgatttccatctgtgcttcagtacccactttgtgttcttttcttgaaaagtcatactaaaggttaatttcaagtaaaatgaatttccttccaagtagcctattagtaaaacacaacttagtgtttcatccattggggtgagcatatactgccctttgcagccctgcctgtgttctgattggctccattcatgagcaaaggtgattgtgagctgtatattacacaggtgtcgcccaggtttcgtaacctccactttaatgcagtaagccgcaagaatgacttctgcaagtgaaatgaggaagcttcactagcttgctccattggaaggtaaactgaaattttatacgttgaagcttaaaatctaaatttatgtatgtttggaaatggaatggacattaacataaaatgtattttatcaaaaaagtgtttagactttgaccaaatacatgttggtattatcatgttaatgttctctgtttataaaaattgagtggagatagatagactcggccattctgtgggctgatgagaattctgggctttgttttgcaccaggggtaggaaacagagaacatgtctgtatgttacttaatctccatagcaaaatcccaaacagcattagcagatcgaattgtttcttctaagacttcctttttctgaatgtgtgcacatcccttctcgtgctcacacacttgcccacacactcacttcttcctgcgctgtggctgctctaagcagggctgtgcatggtgcaaagctgcagtcagtgagcctggcagcctgtggtttctgttatggaaatggttccatggtgaaacacatccctgacccttcacagacttacacatttactcaccaggaggtggcagcggtgtgggaggaggagtgttgaccttggacgcaggagagacacctgggttctagttcaagtcggccaaggactgtgtgaccttgacaagtctaactggtctgtgaacaaggggcatttgcccttccagctgtaaacactgcccttctgtgcctgccttatgtgtgtgtgtgagtaaggagcaacagtcaaggaaacttttagggattcgagaagaaaatacatgtgggatcttgccaaggtgctgcctttaggatgctgacccctgcactaccttagaacatgttgatctgtgagtgcccaagcccctgagggctcgatctcatggggcagatgaaattctcttccttagaggaaagggaaaggtgaggccccagaggacttatctcagctgtacatgctctgcctgtggagacatggcttttctttgtgctgtggcagactggggctttggaagtggtgtatgtttaacttacctgagagtgagagatgtgtaggaagaatagctggaagaaagtgaaagatgagtgccagtacttttggcctgttatccagtagagagaaagtgacagtgaaagtaacgtgagagagaaagagtgtgtgtgtatatgtgagagagagaaagaaagagaaaggaatgcttgattgcttgttgttcactgggccagctctgaaatccaaaatcatgccttgataacattacaaaaccgtgatcctgggtttgagtgaatcctagagacattgttcttatggccgcctggtttccgcagcctgatcaccatatcgagcagacgtcaaggaatcagagtgaagtacggagccagggagggaggtgaggccccgtgtagtgcctgtcaccactgtggattcacctgcactcaggtgtccactcctgtctcccaggcccaaagcagcacatggtgcaatggaaaagtctcttatgtagggatcctccttgtgtcctggtgccagaattagatttccagtgtacttcaacgaaaacctctctcctttatagttgctgtcatctttcatgtataaacagaaaccgtctctagcacaatatatttctgaatattgtttctgtttcataagagcacaatgtacatggacctaggggagctgtggtcccaagtgtcattggaatttatattttaggaataggctttgcatgttaaaattcacaagttgggaaactggtatgaacagatctgatttcttacagagaggcatgaaggaataggcaggacttaacttggggtgggaggagatgaataagggagaatgggagagttggggtctgacagttaccacctgagccccaggaaaactgttttcattttcacggctgtctcactgggggcctgctttcctcaaaggaactgactgtatgttgagaggcaatgccttgtgttggcatggctttgccactttaaaagtgccccccagccaaggagaccaacaggaaccctgctcatctggtagggctctttccttcagtaaaaccagctgccagcctgagaagcctgtctttcccaaatgcaggcagatctgagaggggctccaggcacccggcaggtaaatcacaaagcaaacttgggtgtccttggcagcggggaggaagcaggagtgccccctcaggccagagggcagggccaacctcctcactgtgcttcaaggttgtagaaagagcacaattaatgcttaagcgatcacagacccctctcccctgcagtgggtgttagctccaaagagatgccattgctgatcacccagtcttcggagaagcctaaaatttctttgaattaaaaactgatcctttttcataaagacccagtcacttctcccagtttagtgataacaggtatgacacaagaagctgaagtcttttagattttatagagagtaattctgaaacctgccagaatgctggtagcctgtggtgtccatggcaatgggtgtccatggtaaaatatctatagcttctgctcactgggcaaatataaaagacaacatattatttaacataatatgttgtcttttatatttttatttaaatctggattacgaaaatatagtacccatgagcatttcatgttagaaaccccatttaaagcactataaggctgaataggcacaagcgattaaaagtagatgccaggccacataaaaataaatgttttaatttacttagagctgtattcaagttgtttgataccagacagaaagctgacagtctgttctttgtaaactgcctttccctgtttttctgttttgttttgtttctcaagtttcattttttactaagccccttctgacacctaggcagataaagataagagtagtgcgcagtacaaatgtcagctctgaagaggaggaagtaaatcttcaatgctagggcagatcttcactatccgtgatccagtcttaatttgagcatgagagcaaaatttagtcatctacacaagaagcaaaagcaaggaatagttgttgggtttttgttttttggttgttgtttttttttttttttaggcaagaagtgttgccggtagggtatgtgtgctttctttgccttcctatttcctttcaaagaaatctcttgtaaattacaaaactgtgaattgggttgccaaaaactgttgcccttcgttagatgcttcaaacagtgtaaatcctatactgcaccctgtccacctctgctccctcctccctcccctgagagtgaggacctcatccgaccatgtaattaccattcgcttgctattaaagagcctttcaaactctaaaaacacacacatacaaaacaccaaaatcaaaactacaatacaaaaaaaaaaagggggggggcaaaaaaaatccc

SEQ ID NO: 331471 - DNA, 6605 bp, Homo sapiens
ggcggaggaggagccgcgggcgcggcgccgcgctgtccccggccgccgcccgccccactccgcaccgcatgtaaacagtcccagccggcccagcccggccccggaggagcccgcgcaggccgagccgagcgccgcgctgcccgcccgggaggagggcgcctaggagcgggagggcgggcggcggcgggaggcgggcgcggggccgcgatggatttccagcagctggccgacgttgcggagaaatggtgctccaacacgcccttcgagctcatcgccaccgaggagaccgaacgcaggatggatttctacgccgaccccggcgtctccttctatgtgctgtgtccggacaacggctgcggcgacaattttcacgtgtggagtgagagcgaggactgcctgcctttcttgcagctagcacaggattacatctcctcctgcggcaagaagacgctccacgaagtcctggaaaaagtcttcaagtctttcagacctttactggggcttccggatgcagatgacgatgcgtttgaagagtacagtgctgacgtggaagaagaggagccagaggcggaccacccccagatgggggtcagccagcagtaaatctgggggctcccctgagaaggagagtgagccccacagtaacctaggtggggtcactgcccctcctgggttagcattttgcattagcacttcgaaataggacatctggctcccagcatccaaattaaaatgaaatacctttttaacgaccacaaaatatctgtgatgagctttgctcagaagtgacctgaatttcactcccgcttcagtggggtttctatggagttgtcttggtagcctttgccattttgaatttagagtccattttgtggctgactattctcttaagtttatgttggagaattaacattcgctgactcgaatgtagagaactctgaatgtattaaggataggttttgagtcctcacaggtgaccttactgagggaaagcatggcagagaagaaatgcagtctgcactttttatgtactttttaagtgtccgtaagtgaaaggttttgcttataaagcatgaattttaatatctagtcattaaactgcacaagtgcaaatacaagggcaggaaaggataatcacttagctttggactaagagggtaagagaggcccagaagcctttaagtgttttgccattactgagttacctgggtatgtagcgactggttcgtggttaggtgtaaatgttacttgcttgttcgactgtttcaaaacatgctaattccaaagccacttttgaagtctatagtggaaaatatagatggggtgaaagatataatgtattgatttttaaagctgtttataagccgtcccacgtataaaatgaaacattttaccttctctctttctaatgagatggccgcttgttaaatcatgaaaacatccagaattcaagtgccgcttaaactttgaagccatagataaatttgttagaaaagtaaaccaggattaaaagtttttaaaaatatggtagaatccttctttactttttaagtcttttatttaaaaaaaaaaaagtcaaaaaaaggattccattgtgtaatttatttaaaaatttaatcacatgtttcgagggacttaattgtggtgtatttgtaaagggacacgaaggtaggaatcttttaatcgtgggttagcttggttaacagggaacgttttaataatcaagatactcagacaactcacagaaacaacttctgtaataactggaaatactgctgttatcgtttagccaacaattacttactggggacatcctttgtaatgctaacatggaattattcctggacccttctgcatccctggttttagttaacctaggatgcggaatgcctcctttacaacactagattaaacctagcatctggggtgggtacgtttaaacagtcacacatgtgcctgttaggttgtgaaagttttgaattaaaaacaagcagtagcagcagaggccacagaacttatgggagtcttgtatatcttccaggcatgtcggtgtaaacctgattgtctcgacattttctgtttaattgattggtgctgtgaggagttcggctgctcgtggtaaaacagcgtactccagttttaagtcatcgggtaaaataataggacagtgatttccatctgtgcttcagtacccactttgtgttcttttcttgaaaagtcatactaaaggttaatttcaagtaaaatgaatttccttccaagtagcctattagtaaaacacaacttagtgtttcatccattggggtgagcatatactgccctttgcagccctgcctgtgttctgattggctccattcatgagcaaaggtgattgtgagctgtatattacacaggtgtcgcccaggtttcgtaacctccactttaatgcagtaagccgcaagaatgacttctgcaagtgaaatgaggaagcttcactagcttgctccattggaaggtaaactgaaattttatacgttgaagcttaaaatctaaatttatgtatgtttggaaatggaatggacattaacataaaatgtattttatcaaaaaagtgtttagactttgaccaaatacatgttggtattatcatgttaatgttctctgtttataaaaattgagtggagatagatagactcggccattctgtgggctgatgagaattctgggctttgttttgcaccaggggtaggaaacagagaacatgtctgtatgttacttaatctccatagcaaaatcccaaacagcattagcagatcgaattgtttcttctaagacttcctttttctgaatgtgtgcacatcccttctcgtgctcacacacttgcccacacactcacttcttcctgcgctgtggctgctctaagcagggctgtgcatggtgcaaagctgcagtcagtgagcctggcagcctgtggtttctgttatggaaatggttccatggtgaaacacatccctgacccttcacagacttacacatttactcaccaggaggtggcagcggtgtgggaggaggagtgttgaccttggacgcaggagagacacctgggttctagttcaagtcggccaaggactgtgtgaccttgacaagtctaactggtctgtgaacaaggggcatttgcccttccagctgtaaacactgcccttctgtgcctgccttatgtgtgtgtgtgagtaaggagcaacagtcaaggaaacttttagggattcgagaagaaaatacatgtgggatcttgccaaggtgctgcctttaggatgctgacccctgcactaccttagaacatgttgatctgtgagtgcccaagcccctgagggctcgatctcatggggcagatgaaattctcttccttagaggaaagggaaaggtgaggccccagaggacttatctcagctgtacatgctctgcctgtggagacatggcttttctttgtgctgtggcagactggggctttggaagtggtgtatgtttaacttacctgagagtgagagatgtgtaggaagaatagctggaagaaagtgaaagatgagtgccagtacttttggcctgttatccagtagagagaaagtgacagtgaaagtaacgtgagagagaaagagtgtgtgtgtatatgtgagagagagaaagaaagagaaaggaatgcttgattgcttgttgttcactgggccagctctgaaatccaaaatcatgccttgataacattacaaaaccgtgatcctgggtttgagtgaatcctagagacattgttcttatggccgcctggtttccgcagcctgatcaccatatcgagcagacgtcaaggaatcagagtgaagtacggagccagggagggaggtgaggccccgtgtagtgcctgtcaccactgtggattcacctgcactcaggtgtccactcctgtctcccaggcccaaagcagcacatggtgcaatggaaaagtctcttatgtagggatcctccttgtgtcctggtgccagaattagatttccagtgtacttcaacgaaaacctctctcctttatagttgctgtcatctttcatgtataaacagaaaccgtctctagcacaatatatttctgaatattgtttctgtttcataagagcacaatgtacatggacctaggggagctgtggtcccaagtgtcattggaatttatattttaggaataggctttgcatgttaaaattcacaagttgggaaactggtatgaacagatctgatttcttacagagaggcatgaaggaataggcaggacttaacttggggtgggaggagatgaataagggagaatgggagagttggggtctgacagttaccacctgagccccaggaaaactgttttcattttcacggctgtctcactgggggcctgctttcctcaaaggaactgactgtatgttgagaggcaatgccttgtgttggcatggctttgccactttaaaagtgccccccagccaaggagaccaacaggaaccctgctcatctggtagggctctttccttcagtaaaaccagctgccagcctgagaagcctgtctttcccaaatgcaggcagatctgagaggggctccaggcacccggcaggtaaatcacaaagcaaacttgggtgtccttggcagcggggaggaagcaggagtgccccctcaggccagagggcagggccaacctcctcactgtgcttcaaggttgtagaaagagcacaattaatgcttaagcgatcacagacccctctcccctgcagtgggtgttagctccaaagagatgccattgctgatcacccagtcttcggagaagcctaaaatttctttgaattaaaaactgatcctttttcataaagacccagtcacttctcccagtttagtgataacaggtatgacacaagaagctgaagtcttttagattttatagagagtaattctgaaacctgccagaatgctggtagcctgtggtgtccatggcaatgggtgtccatggtaaaatatctatagcttctgctcactgggcaaatataaaagacaacatattatttaacataatatgttgtcttttatatttttatttaaatctggattacgaaaatatagtacccatgagcatttcatgttagaaaccccatttaaagcactataaggctgaataggcacaagcgattaaaagtagatgccaggccacataaaaataaatgttttaatttacttagagctgtattcaagttgtttgataccagacagaaagctgacagtctgttctttgtaaactgcctttccctgtttttctgttttgttttgtttctcaagtttcattttttactaagccccttctgacacctaggcagataaagataagagtagtgcgcagtacaaatgtcagctctgaagaggaggaagtaaatcttcaatgctagggcagatcttcactatccgtgatccagtcttaatttgagcatgagagcaaaatttagtcatctacacaagaagcaaaagcaaggaatagttgttgggtttttgttttttggttgttgtttttttttttttttaggcaagaagtgttgccggtagggtatgtgtgctttctttgccttcctatttcctttcaaagaaatctcttgtaaattacaaaactgtgaattgggttgccaaaaactgttgcccttcgttagatgcttcaaacagtgtaaatcctatactgcaccctgtccacctctgctccctcctccctcccctgagagtgaggacctcatccgaccatgtaattaccattcgcttgctattaaagagcctttcaaactctaaaaaaaaaaaaaaaaaaaaaaaaaaaaaaaaaaaaaaaaaaaaaaaaaaaaaaaaaaaaaaaaaaaaggaaggaaggagagaaacaaaaaacaaaacctgcagcacaaggagagaagacacataataatgaggcgaggagcacaagaatgacaatgtatgtctgcaaggcagcgggagagaactagagagagagagcgaagcggagccgcgaatatatgaatgacggagcatggagagacgacgcgacgaatcaatgacagtggtccgcaatgcaggacgaggatacaaacgagcatcagatgagagaagggtgctacatcataggaggaggcgagacgaatgagctagcatgtcagagatggaggtgaaagagagaaaaaagaagaaggtgagagtgaggagataaagacgacacgccaaattacaggaaagtcaagtaaatgagaataagcaaaggaacaaagaaggatagaagataagaacaaagtaaaaagacagagaagtgagaaaagccaagaaagagaggatgaagacgacaaaccaaagaacgggagtagagttatcgcacttgctgtggacgagggaagatgtaggagtgcacgataggcgagggagaacggagacggaggagcagatggtaatacgagaagatacaggattcatagcacgaggggagaggtggatagacacaggtagagtagataacgtgagagagatcagatgaaagaagtgggcagcacggcgaggtcggaggaaggcgtaggcaggggggtggtaggggggt

SEQ ID NO: 331472 - DNA, 5244 bp, Homo sapiens
  misc_feature (304)..(304): n is a, c, g, or t
ccaggctagactaacatcacaattaaaagaactagagaagcaagagcaaacatattcaaaagctagcagaaggcaagaaataactaagatcacagcagaactgaaggaaatagagacacaaaaagcccttcaacaaatcagtgaatccaggagctggttttttgaaaagatcaacaaaattgataggttaggtctacctggagtaaatctagttgttctgacttctacaccccttacgtgacaaaattctgctttctcctttgctttgtttttcttaacatccctcttctttcctatcttcctngttaggtctacctggcaggtgaccttactgagggaaagcatggcagagaagaaatgcagtctgcactttttatgtactttttaagtgtccgtaagtgaaaggttttgcttataaagcatgaattttaatatctagtcattaaactgcacaagtgcaaatacaagggcaggaaaggataatcacttagctttggactaagagggtaagagaggcccagaagcctttaagtgttttgccattactgagttacctgggtatgtagcgactggttcgtggttaggtgtaaatgttacttgcttgttcgactgtttcaaaacatgctaattccaaagccacttttgaagtctatagtggaaaatatagatggggtgaaagatataatgtattgatttttaaagctgtttataagccgtcccacgtataaaatgaaacattttaccttctctctttctaatgagatggccgcttgttaaatcatgaaaacatccagaattcaagtgccgcttaaactttgaagccatagataaatttgttagaaaagtaaaccaggattaaaagtttttaaaaatatggtagaatccttctttactttttaagtcttttatttaaaaaaaaaaaagtcaaaaaaaggattccattgtgtaatttatttaaaaatttaatcacatgtttcgagggacttaattgtggtgtatttgtaaagggacacgaaggtaggaatcttttaatcgtgggttagcttggttaacagggaacgttttaataatcaagatactcagacaactcacagaaacaacttctgtaataactggaaatactgctgttatcgtttagccaacaattacttactggggacatcctttgtaatgctaacatggaattattcctggacccttctgcatccctggttttagttaacctaggatgcggaatgcctcctttacaacactagattaaacctagcatctggggtgggtacgtttaaacagtcacacatgtgcctgttaggttgtgaaagttttgaattaaaaacaagcagtagcagcagaggccacagaacttatgggagtcttgtatatcttccaggcatgtcggtgtaaacctgattgtctcgacattttctgtttaattgattggtgctgtgaggagttcggctgctcgtggtaaaacagcgtactccagttttaagtcatcgggtaaaataataggacagtgatttccatctgtgcttcagtacccactttgtgttcttttcttgaaaagtcatactaaaggttaatttcaagtaaaatgaatttccttccaagtagcctattagtaaaacacaacttagtgtttcatccattggggtgagcatatactgccctttgcagccctgcctgtgttctgattggctccattcatgagcaaaggtgattgtgagctgtatattacacaggtgtcgcccaggtttcgtaacctccactttaatgcagtaagccgcaagaatgacttctgcaagtgaaatgaggaagcttcactagcttgctccattggaaggtaaactgaaattttatacgttgaagcttaaaatctaaatttatgtatgtttggaaatggaatggacattaacataaaatgtattttatcaaaaaagtgtttagactttgaccaaatacatgttggtattatcatgttaatgttctctgtttataaaaattgagtggagatagatagactcggccattctgtgggctgatgagaattctgggctttgttttgcaccaggggtaggaaacagagaacatgtctgtatgttacttaatctccatagcaaaatcccaaacagcattagcagatcgaattgtttcttctaagacttcctttttctgaatgtgtgcacatcccttctcgtgctcacacacttgcccacacactcacttcttcctgcgctgtggctgctctaagcagggctgtgcatggtgcaaagctgcagtcagtgagcctggcagcctgtggtttctgttatggaaatggttccatggtgaaacacatccctgacccttcacagacttacacatttactcaccaggaggtggcagcggtgtgggaggaggagtgttgaccttggacgcaggagagacacctgggttctagttcaagtcggccaaggactgtgtgaccttgacaagtctaactggtctgtgaacaaggggcatttgcccttccagctgtaaacactgcccttctgtgcctgccttatgtgtgtgtgtgagtaaggagcaacagtcaaggaaacttttagggattcgagaagaaaatacatgtgggatcttgccaaggtgctgcctttaggatgctgacccctgcactaccttagaacatgttgatctgtgagtgcccaagcccctgagggctcgatctcatggggcagatgaaattctcttccttagaggaaagggaaaggtgaggccccagaggacttatctcagctgtacatgctctgcctgtggagacatggcttttctttgtgctgtggcagactggggctttggaagtggtgtatgtttaacttacctgagagtgagagatgtgtaggaagaatagctggaagaaagtgaaagatgagtgccagtacttttggcctgttatccagtagagagaaagtgacagtgaaagtaacgtgagagagaaagagtgtgtgtgtatatgtgagagagagaaagaaagagaaaggaatgcttgattgcttgttgttcactgggccagctctgaaatccaaaatcatgccttgataacattacaaaaccgtgatcctgggtttgagtgaatcctagagacattgttcttatggccgcctggtttccgcagcctgatcaccatatcgagcagacgtcaaggaatcagagtgaagtacggagccagggagggaggtgaggccccgtgtagtgcctgtcaccactgtggattcacctgcactcaggtgtccactcctgtctcccaggcccaaagcagcacatggtgcaatggaaaagtctcttatgtagggatcctccttgtgtcctggtgccagaattagatttccagtgtacttcaacgaaaacctctctcctttatagttgctgtcatctttcatgtataaacagaaaccgtctctagcacaatatatttctgaatattgtttctgtttcataagagcacaatgtacatggacctaggggagctgtggtcccaagtgtcattggaatttatattttaggaataggctttgcatgttaaaattcacaagttgggaaactggtatgaacagatctgatttcttacagagaggcatgaaggaataggcaggacttaacttggggtgggaggagatgaataagggagaatgggagagttggggtctgacagttaccacctgagccccaggaaaactgttttcattttcacggctgtctcactgggggcctgctttcctcaaaggaactgactgtatgttgagaggcaatgccttgtgttggcatggctttgccactttaaaagtgccccccagccaaggagaccaacaggaaccctgctcatctggtagggctctttccttcagtaaaaccagctgccagcctgagaagcctgtctttcccaaatgcaggcagatctgagaggggctccaggcacccggcaggtaaatcacaaagcaaacttgggtgtccttggcagcggggaggaagcaggagtgccccctcaggccagagggcagggccaacctcctcactgtgcttcaaggttgtagaaagagcacaattaatgcttaagcgatcacagacccctctcccctgcagtgggtgttagctccaaagagatgccattgctgatcacccagtcttcggagaagcctaaaatttctttgaattaaaaactgatcctttttcataaagacccagtcacttctcccagtttagtgataacaggtatgacacaagaagctgaagtcttttagattttatagagagtaattctgaaacctgccagaatgctggtagcctgtggtgtccatggcaatgggtgtccatggtaaaatatctatagcttctgctcactgggcaaatataaaagacaacatattatttaacataatatgttgtcttttatatttttatttaaatctggattacgaaaatatagtacccatgagcatttcatgttagaaaccccatttaaagcactataaggctgaataggcacaagcgattaaaagtagatgccaggccacataaaaataaatgttttaatttacttagagctgtattcaagttgtttgataccagacagaaagctgacagtctgttctttgtaaactgcctttccctgtttttctgttttgttttgtttctcaagtttcattttttactaagccccttctgacacctaggcagataaagataagagtagtgcgcagtacaaatgtcagctctgaagaggaggaagtaaatcttcaatgctagggcagatcttcactatccgtgatccagtcttaatttgagcatgagagcaaaatttagtcatctacacaagaagcaaaagcaaggaatagttgttgggtttttgttttttggttgttgtttttttttttttttaggcaagaagtgttgccggtagggtatgtgtgctttctttgccttcctatttcctttcaaagaaatctcttgtaaattacaaaactgtgaattgggttgccaaaaactgttgcccttcgttagatgcttcaaacagtgtaaatcctatactgcaccctgtccacctctgctccctcctccctcccctgagagtgaggacctcatccgaccatgtaattaccattcgcttgctattaaagagcctttcaaactctaaaaacacacacatacaaaacaccaaaatcaaaactacaatacaaaaaaaaaaagggggggggcaaaaaaaatccc

SEQ ID NO: 331473 - DNA, 5880 bp, Homo sapiens
ggcggaggaggagccgcgggcgcggcgccgcgctgtccccggccgccgcccgccccactccgcaccgcatgtaaacagtcccagccggcccagcccggccccggaggagcccgcgcaggccgagccgagcgccgcgctgcccgcccgggaggagggcgcctaggagcgggagggcgggcggcggcgggaggcgggcgcggggccgcgatggatttccagcagctggccgacgttgcggagaaatggtgctccaacacgcccttcgagctcatcgccaccgaggagaccgaacgcaggatggatttctacgccgaccccggcgtctccttctatgtgctgtgtccggacaacggctgcggcgacaattttcacgtgtggagtgagagcgaggactgcctgcctttcttgcagctagcacaggattacatctcctcctgcggcaagaagacgctccacgaagtcctggaaaaagtcttcaagtctttcagacctttactggggcttccggatgcagatgacgatgcgtttgaagagtacagtgctgacgtggaagaagaggagccagaggcggaccacccccagatgggggtcagccagcagtaaatctgggggctcccctgagaaggagagtgagccccacagtaacctaggtggggtcactgcccctcctgggttagcattttgcattagcacttcgaaataggacatctggctcccagcatccaaattaaaatgaaatacctttttaacgaccacaaaatatctgtgatgagctttgctcagaagtgacctgaatttcactcccgcttcagtggggtttctatggagttgtcttggtagcctttgccattttgaatttagagtccattttgtggctgactattctcttaagtttatgttggagaattaacattcgctgactcgaatgtagagaactctgaatgtattaaggataggttttgagtcctcacaggtgaccttactgagggaaagcatggcagagaagaaatgcagtctgcactttttatgtactttttaagtgtccgtaagtgaaaggttttgcttataaagcatgaattttaatatctagtcattaaactgcacaagtgcaaatacaagggcaggaaaggataatcacttagctttggactaagagggtaagagaggcccagaagcctttaagtgttttgccattactgagttacctgggtatgtagcgactggttcgtggttaggtgtaaatgttacttgcttgttcgactgtttcaaaacatgctaattccaaagccacttttgaagtctatagtggaaaatatagatggggtgaaagatataatgtattgatttttaaagctgtttataagccgtcccacgtataaaatgaaacattttaccttctctctttctaatgagatggccgcttgttaaatcatgaaaacatccagaattcaagtgccgcttaaactttgaagccatagataaatttgttagaaaagtaaaccaggattaaaagtttttaaaaatatggtagaatccttctttactttttaagtcttttatttaaaaaaaaaaaagtcaaaaaaaggattccattgtgtaatttatttaaaaatttaatcacatgtttcgagggacttaattgtggtgtatttgtaaagggacacgaaggtaggaatcttttaatcgtgggttagcttggttaacagggaacgttttaataatcaagatactcagacaactcacagaaacaacttctgtaataactggaaatactgctgttatcgtttagccaacaattacttactggggacatcctttgtaatgctaacatggaattattcctggacccttctgcatccctggttttagttaacctaggatgcggaatgcctcctttacaacactagattaaacctagcatctggggtgggtacgtttaaacagtcacacatgtgcctgttaggttgtgaaagttttgaattaaaaacaagcagtagcagcagaggccacagaacttatgggagtcttgtatatcttccaggcatgtcggtgtaaacctgattgtctcgacattttctgtttaattgattggtgctgtgaggagttcggctgctcgtggtaaaacagcgtactccagttttaagtcatcgggtaaaataataggacagtgatttccatctgtgcttcagtacccactttgtgttcttttcttgaaaagtcatactaaaggttaatttcaagtaaaatgaatttccttccaagtagcctattagtaaaacacaacttagtgtttcatccattggggtgagcatatactgccctttgcagccctgcctgtgttctgattggctccattcatgagcaaaggtgattgtgagctgtatattacacaggtgtcgcccaggtttcgtaacctccactttaatgcagtaagccgcaagaatgacttctgcaagtgaaatgaggaagcttcactagcttgctccattggaaggtaaactgaaattttatacgttgaagcttaaaatctaaatttatgtatgtttggaaatggaatggacattaacataaaatgtattttatcaaaaaagtgtttagactttgaccaaatacatgttggtattatcatgttaatgttctctgtttataaaaattgagtggagatagatagactcggccattctgtgggctgatgagaattctgggctttgttttgcaccaggggtaggaaacagagaacatgtctgtatgttacttaatctccatagcaaaatcccaaacagcattagcagatcgaattgtttcttctaagacttcctttttctgaatgtgtgcacatcccttctcgtgctcacacacttgcccacacactcacttcttcctgcgctgtggctgctctaagcagggctgtgcatggtgcaaagctgcagtcagtgagcctggcagcctgtggtttctgttatggaaatggttccatggtgaaacacatccctgacccttcacagacttacacatttactcaccaggaggtggcagcggtgtgggaggaggagtgttgaccttggacgcaggagagacacctgggttctagttcaagtcggccaaggactgtgtgaccttgacaagtctaactggtctgtgaacaaggggcatttgcccttccagctgtaaacactgcccttctgtgcctgccttatgtgtgtgtgtgagtaaggagcaacagtcaaggaaacttttagggattcgagaagaaaatacatgtgggatcttgccaaggtgctgcctttaggatgctgacccctgcactaccttagaacatgttgatctgtgagtgcccaagcccctgagggctcgatctcatggggcagatgaaattctcttccttagaggaaagggaaaggtgaggccccagaggacttatctcagctgtacatgctctgcctgtggagacatggcttttctttgtgctgtggcagactggggctttggaagtggtgtatgtttaacttacctgagagtgagagatgtgtaggaagaatagctggaagaaagtgaaagatgagtgccagtacttttggcctgttatccagtagagagaaagtgacagtgaaagtaacgtgagagagaaagagtgtgtgtgtatatgtgagagagagaaagaaagagaaaggaatgcttgattgcttgttgttcactgggccagctctgaaatccaaaatcatgccttgataacattacaaaaccgtgatcctgggtttgagtgaatcctagagacattgttcttatggccgcctggtttccgcagcctgatcaccatatcgagcagacgtcaaggaatcagagtgaagtacggagccagggagggaggtgaggccccgtgtagtgcctgtcaccactgtggattcacctgcactcaggtgtccactcctgtctcccaggcccaaagcagcacatggtgcaatggaaaagtctcttatgtagggatcctccttgtgtcctggtgccagaattagatttccagtgtacttcaacgaaaacctctctcctttatagttgctgtcatctttcatgtataaacagaaaccgtctctagcacaatatatttctgaatattgtttctgtttcataagagcacaatgtacatggacctaggggagctgtggtcccaagtgtcattggaatttatattttaggaataggctttgcatgttaaaattcacaagttgggaaactggtatgaacagatctgatttcttacagagaggcatgaaggaataggcaggacttaacttggggtgggaggagatgaataagggagaatgggagagttggggtctgacagttaccacctgagccccaggaaaactgttttcattttcacggctgtctcactgggggcctgctttcctcaaaggaactgactgtatgttgagaggcaatgccttgtgttggcatggctttgccactttaaaagtgccccccagccaaggagaccaacaggaaccctgctcatctggtagggctctttccttcagtaaaaccagctgccagcctgagaagcctgtctttcccaaatgcaggcagatctgagaggggctccaggcacccggcaggtaaatcacaaagcaaacttgggtgtccttggcagcggggaggaagcaggagtgccccctcaggccagagggcagggccaacctcctcactgtgcttcaaggttgtagaaagagcacaattaatgcttaagcgatcacagacccctctcccctgcagtgggtgttagctccaaagagatgccattgctgatcacccagtcttcggagaagcctaaaatttctttgaattaaaaactgatcctttttcataaagacccagtcacttctcccagtttagtgataacaggtatgacacaagaagctgaagtcttttagattttatagagagtaattctgaaacctgccagaatgctggtagcctgtggtgtccatggcaatgggtgtccatggtaaaatatctatagcttctgctcactgggcaaatataaaagacaacatattatttaacataatatgttgtcttttatatttttatttaaatctggattacgaaaatatagtacccatgagcatttcatgttagaaaccccatttaaagcactataaggctgaataggcacaagcgattaaaagtagatgccaggccacataaaaataaatgttttaatttacttagagctgtattcaagttgtttgataccagacagaaagctgacagtctgttctttgtaaactgcctttccctgtttttctgttttgttttgtttctcaagtttcattttttactaagccccttctgacacctaggcagataaagataagagtagtgcgcagtacaaatgtcagctctgaagaggaggaagtaaatcttcaatgctagggcagatcttcactatccgtgatccagtcttaatttgagcatgagagcaaaatttagtcatctacacaagaagcaaaagcaaggaatagttgttgggtttttgttttttggttgttgtttttttttttttttaggcaagaagtgttgccggtagggtatgtgtgctttctttgccttcctatttcctttcaaagaaatctcttgtaaattacaaaactgtgaattgggttgccaaaaactgttgcccttcgttagatgcttcaaacagtgtaaatcctatactgcaccctgtccacctctgctccctcctccctcccctgagagtgaggacctcatccgaccatgtaattaccattcgcttgctattgaaacttctaaaactaggcatagttttagaaggtacaatagcaattaggtgacaagcaaaacagaaacaggtcacagctg

SEQ ID NO: 331474 - DNA, 5852 bp, Homo sapiens
ggcggaggaggagccgcgggcgcggcgccgcgctgtccccggccgccgcccgccccactccgcaccgcatgtaaacagtcccagccggcccagcccggccccggaggagcccgcgcaggccgagccgagcgccgcgctgcccgcccgggaggagggcgcctaggagcgggagggcgggcggcggcgggaggcgggcgcggggccgcgatggatttccagcagctggccgacgttgcggagaaatggtgctccaacacgcccttcgagctcatcgccaccgaggagaccgaacgcaggatggatttctacgccgaccccggcgtctccttctatgtgctgtgtccggacaacggctgcggcgacaattttcacgtgtggagtgagagcgaggactgcctgcctttcttgcagctagcacaggattacatctcctcctgcggcaagaagacgctccacgaagtcctggaaaaagtcttcaagtctttcagacctttactggggcttccggatgcagatgacgatgcgtttgaagagtacagtgctgacgtggaagaagaggagccagaggcggaccacccccagatgggggtcagccagcagtaaatctgggggctcccctgagaaggagagtgagccccacagtaacctaggtggggtcactgcccctcctgggttagcattttgcattagcacttcgaaataggacatctggctcccagcatccaaattaaaatgaaatacctttttaacgaccacaaaatatctgtgatgagctttgctcagaagtgacctgaatttcactcccgcttcagtggggtttctatggagttgtcttggtagcctttgccattttgaatttagagtccattttgtggctgactattctcttaagtttatgttggagaattaacattcgctgactcgaatgtagagaactctgaatgtattaaggataggttttgagtcctcacaggtgaccttactgagggaaagcatggcagagaagaaatgcagtctgcactttttatgtactttttaagtgtccgtaagtgaaaggttttgcttataaagcatgaattttaatatctagtcattaaactgcacaagtgcaaatacaagggcaggaaaggataatcacttagctttggactaagagggtaagagaggcccagaagcctttaagtgttttgccattactgagttacctgggtatgtagcgactggttcgtggttaggtgtaaatgttacttgcttgttcgactgtttcaaaacatgctaattccaaagccacttttgaagtctatagtggaaaatatagatggggtgaaagatataatgtattgatttttaaagctgtttataagccgtcccacgtataaaatgaaacattttaccttctctctttctaatgagatggccgcttgttaaatcatgaaaacatccagaattcaagtgccgcttaaactttgaagccatagataaatttgttagaaaagtaaaccaggattaaaagtttttaaaaatatggtagaatccttctttactttttaagtcttttatttaaaaaaaaaaaagtcaaaaaaaggattccattgtgtaatttatttaaaaatttaatcacatgtttcgagggacttaattgtggtgtatttgtaaagggacacgaaggtaggaatcttttaatcgtgggttagcttggttaacagggaacgttttaataatcaagatactcagacaactcacagaaacaacttctgtaataactggaaatactgctgttatcgtttagccaacaattacttactggggacatcctttgtaatgctaacatggaattattcctggacccttctgcatccctggttttagttaacctaggatgcggaatgcctcctttacaacactagattaaacctagcatctggggtgggtacgtttaaacagtcacacatgtgcctgttaggttgtgaaagttttgaattaaaaacaagcagtagcagcagaggccacagaacttatgggagtcttgtatatcttccaggcatgtcggtgtaaacctgattgtctcgacattttctgtttaattgattggtgctgtgaggagttcggctgctcgtggtaaaacagcgtactccagttttaagtcatcgggtaaaataataggacagtgatttccatctgtgcttcagtacccactttgtgttcttttcttgaaaagtcatactaaaggttaatttcaagtaaaatgaatttccttccaagtagcctattagtaaaacacaacttagtgtttcatccattggggtgagcatatactgccctttgcagccctgcctgtgttctgattggctccattcatgagcaaaggtgattgtgagctgtatattacacaggtgtcgcccaggtttcgtaacctccactttaatgcagtaagccgcaagaatgacttctgcaagtgaaatgaggaagcttcactagcttgctccattggaaggtaaactgaaattttatacgttgaagcttaaaatctaaatttatgtatgtttggaaatggaatggacattaacataaaatgtattttatcaaaaaagtgtttagactttgaccaaatacatgttggtattatcatgttaatgttctctgtttataaaaattgagtggagatagatagactcggccattctgtgggctgatgagaattctgggctttgttttgcaccaggggtaggaaacagagaacatgtctgtatgttacttaatctccatagcaaaatcccaaacagcattagcagatcgaattgtttcttctaagacttcctttttctgaatgtgtgcacatcccttctcgtgctcacacacttgcccacacactcacttcttcctgcgctgtggctgctctaagcagggctgtgcatggtgcaaagctgcagtcagtgagcctggcagcctgtggtttctgttatggaaatggttccatggtgaaacacatccctgacccttcacagacttacacatttactcaccaggaggtggcagcggtgtgggaggaggagtgttgaccttggacgcaggagagacacctgggttctagttcaagtcggccaaggactgtgtgaccttgacaagtctaactggtctgtgaacaaggggcatttgcccttccagctgtaaacactgcccttctgtgcctgccttatgtgtgtgtgtgagtaaggagcaacagtcaaggaaacttttagggattcgagaagaaaatacatgtgggatcttgccaaggtgctgcctttaggatgctgacccctgcactaccttagaacatgttgatctgtgagtgcccaagcccctgagggctcgatctcatggggcagatgaaattctcttccttagaggaaagggaaaggtgaggccccagaggacttatctcagctgtacatgctctgcctgtggagacatggcttttctttgtgctgtggcagactggggctttggaagtggtgtatgtttaacttacctgagagtgagagatgtgtaggaagaatagctggaagaaagtgaaagatgagtgccagtacttttggcctgttatccagtagagagaaagtgacagtgaaagtaacgtgagagagaaagagtgtgtgtgtatatgtgagagagagaaagaaagagaaaggaatgcttgattgcttgttgttcactgggccagctctgaaatccaaaatcatgccttgataacattacaaaaccgtgatcctgggtttgagtgaatcctagagacattgttcttatggccgcctggtttccgcagcctgatcaccatatcgagcagacgtcaaggaatcagagtgaagtacggagccagggagggaggtgaggccccgtgtagtgcctgtcaccactgtggattcacctgcactcaggtgtccactcctgtctcccaggcccaaagcagcacatggtgcaatggaaaagtctcttatgtagggatcctccttgtgtcctggtgccagaattagatttccagtgtacttcaacgaaaacctctctcctttatagttgctgtcatctttcatgtataaacagaaaccgtctctagcacaatatatttctgaatattgtttctgtttcataagagcacaatgtacatggacctaggggagctgtggtcccaagtgtcattggaatttatattttaggaataggctttgcatgttaaaattcacaagttgggaaactggtatgaacagatctgatttcttacagagaggcatgaaggaataggcaggacttaacttggggtgggaggagatgaataagggagaatgggagagttggggtctgacagttaccacctgagccccaggaaaactgttttcattttcacggctgtctcactgggggcctgctttcctcaaaggaactgactgtatgttgagaggcaatgccttgtgttggcatggctttgccactttaaaagtgccccccagccaaggagaccaacaggaaccctgctcatctggtagggctctttccttcagtaaaaccagctgccagcctgagaagcctgtctttcccaaatgcaggcagatctgagaggggctccaggcacccggcaggtaaatcacaaagcaaacttgggtgtccttggcagcggggaggaagcaggagtgccccctcaggccagagggcagggccaacctcctcactgtgcttcaaggttgtagaaagagcacaattaatgcttaagcgatcacagacccctctcccctgcagtgggtgttagctccaaagagatgccattgctgatcacccagtcttcggagaagcctaaaatttctttgaattaaaaactgatcctttttcataaagacccagtcacttctcccagtttagtgataacaggtatgacacaagaagctgaagtcttttagattttatagagagtaattctgaaacctgccagaatgctggtagcctgtggtgtccatggcaatgggtgtccatggtaaaatatctatagcttctgctcactgggcaaatataaaagacaacatattatttaacataatatgttgtcttttatatttttatttaaatctggattacgaaaatatagtacccatgagcatttcatgttagaaaccccatttaaagcactataaggctgaataggcacaagcgattaaaagtagatgccaggccacataaaaataaatgttttaatttacttagagctgtattcaagttgtttgataccagacagaaagctgacagtctgttctttgtaaactgcctttccctgtttttctgttttgttttgtttctcaagtttcattttttactaagccccttctgacacctaggcagataaagataagagtagtgcgcagtacaaatgtcagctctgaagaggaggaagtaaatcttcaatgctagggcagatcttcactatccgtgatccagtcttaatttgagcatgagagcaaaatttagtcatctacacaagaagctttttttttttttttaggcaagaagtgttgccggtagggtatgtgtgctttctttgccttcctatttcctttcaaagaaatctcttgtaaattacaaaactgtgaattgggttgccaaaaactgttgcccttcgttagatgcttcaaacagtgtaaatcctatactgcaccctgtccacctctgctccctcctccctcccctgagagtgaggacctcatccgaccatgtaattaccattcgcttgctattaaagagcctttcaaactctaaaaacacacacatacaaaacaccaaaatcaaaactacaatacaaaaaaaaaaagggggggggcaaaaaaaatccc

SEQ ID NO: 331475 - DNA, 1217 bp, Homo sapiens
  misc_feature (172)..(172): n is a, c, g, or t
cgccctgcccgtagttctggttgtaattcgagtggggtcttgaatagaaagccaggcgcccgcgatggcccattcgcgggcgaggggatgcgtcgtcgacgcagcggtcaccactcacccgcacctgcatgtccttaccattcctggagaacttccacagacggtgttcctngttaggtctacctggcacccagtcacttctcccagtttagtgataacaggtatgacacaagaagctgaagtcttttagattttatagagagtaattctgaaacctgccagaatgctggtagcctgtggtgtccatggcaatgggtgtccatggtaaaatatctatagcttctgctcactgggcaaatataaaagacaacatattatttaacataatatgttgtcttttatatttttatttaaatctggattacgaaaatatagtacccatgagcatttcatgttagaaaccccatttaaagcactataaggctgaataggcacaagcgattaaaagtagatgccaggccacataaaaataaatgttttaatttacttagagctgtattcaagttgtttgataccagacagaaagctgacagtctgttctttgtaaactgcctttccctgtttttctgttttgttttgtttctcaagtttcattttttactaagccccttctgacacctaggcagataaagataagagtagtgcgcagtacaaatgtcagctctgaagaggaggaagtaaatcttcaatgctagggcagatcttcactatccgtgatccagtcttaatttgagcatgagagcaaaatttagtcatctacacaagaagcaaaagcaaggaatagttgttgggtttttgttttttggttgttgtttttttttttttttaggcaagaagtgttgccggtagggtatgtgtgctttctttgccttcctatttcctttcaaagaaatctcttgtaaattacaaaactgtgaattgggttgccaaaaactgttgcccttcgttagatgcttcaaacagtgtaaatcctatactgcaccctgtccacctctgctccctcctccctcccctgagagtgaggacctcatccgaccatgtaattaccattcgcttgctattaaagagcctttcaaactctaaaaacacacacatacaaaacaccaaaatcaaaactacaatacaaaaaaaaaaagggggggggcaaaaaaaatccc

SEQ ID NO: 331476 - DNA, 1163 bp, Homo sapiens
cacccaggcgcacttctggtggttgcctggcaatctttggtgctccttggcttggagatgtatcaccctgatcacccagtcttcggagaagcctaaaatttctttgaattaaaaactgatcctttttcataaagacccagtcacttctcccagtttagtgataacaggtatgacacaagaagctgaagtcttttagattttatagagagtaattctgaaacctgccagaatgctggtagcctgtggtgtccatggcaatgggtgtccatggtaaaatatctatagcttctgctcactgggcaaatataaaagacaacatattatttaacataatatgttgtcttttatatttttatttaaatctggattacgaaaatatagtacccatgagcatttcatgttagaaaccccatttaaagcactataaggctgaataggcacaagcgattaaaagtagatgccaggccacataaaaataaatgttttaatttacttagagctgtattcaagttgtttgataccagacagaaagctgacagtctgttctttgtaaactgcctttccctgtttttctgttttgttttgtttctcaagtttcattttttactaagccccttctgacacctaggcagataaagataagagtagtgcgcagtacaaatgtcagctctgaagaggaggaagtaaatcttcaatgctagggcagatcttcactatccgtgatccagtcttaatttgagcatgagagcaaaatttagtcatctacacaagaagcaaaagcaaggaatagttgttgggtttttgttttttggttgttgtttttttttttttttaggcaagaagtgttgccggtagggtatgtgtgctttctttgccttcctatttcctttcaaagaaatctcttgtaaattacaaaactgtgaattgggttgccaaaaactgttgcccttcgttagatgcttcaaacagtgtaaatcctatactgcaccctgtccacctctgctccctcctccctcccctgagagtgaggacctcatccgaccatgtaattaccattcgcttgctattaaagagcctttcaaactctaaaaacacacacatacaaaacaccaaaatcaaaactacaatacaaaaaaaaaaagggggggggcaaaaaaaatccc

SEQ ID NO: 331477 - DNA, 516 bp, Homo sapiens
attctaatgatgctattgaaacttctaaaactaggcctagttttagaagtttcagtagcatcttcactatccgtgatccagtcttaatttgagcatgagagcaaaatttagtcatctacacaagaagcaaaagcaaggaatagttgttgggtttttgttttttggttgttgtttttttttttttttaggcaagaagtgttgccggtagggtatgtgtgctttctttgccttcctatttcctttcaaagaaatctcttgtaaattacaaaactgtgaattgggttgccaaaaactgttgcccttcgttagatgcttcaaacagtgtaaatcctatactgcaccctgtccacctctgctccctcctccctcccctgagagtgaggacctcatccgaccatgtaattaccattcgcttgctattaaagagcctttcaaactctaaaaacacacacatacaaaacaccaaaatcaaaactacaatacaaaaaaaaaaagggggggggcaaaaaaaatccc

SEQ ID NO: 331478 - DNA, 657 bp, Homo sapiens
gcattttagggaagggaagttttcagaaagcctttgttttccagtgacatagtggtgacttggtgggttctcttaagttatttgcatttggaagtaaatttaccaccacgcctactcacaggccgatctgggtaaagaatgtcttgttccaagttaatgcttacaaactatgcttaattaatctttcagccgtagctgaaagcaaagttaaggattttgaaggcaaaggctctggtttctccttccccatgtctgaaaaccgcccttagcctgcacaaggtgaacagtggaaatcattggtgaggaatggccacccactgccctctttactgtgtaggagcagatctgatgatgaacagagcaggtgaggtatggaccaaaagctcgggggcttctatagattagacattttttcttccctttcaacgcaaacaaatcaagaacgcatgtatgaattttactgtagaatggaggccttcttcaaattgatgttattaagaaaatctgcttggcttttctgaacttcacactgagtgtagtgactgtgtgtctttgttttctccttccgtcgcccgtgggcacgcagcacgtgtggagtgagagcgaggactgcctgcctttcttgcagctagcacaggattacatctcctcctgcgg

SEQ ID NO: 331479 - DNA, 5679 bp, Homo sapiens
ggcggaggaggagccgcgggcgcggcgccgcgctgtccccggccgccgcccgccccactccgcaccgcatgtaaacagtcccagccggcccagcccggccccggaggagcccgcgcaggccgagccgagcgccgcgctgcccgcccgggaggagggcgcctaggagcgggagggcgggcggcggcgggaggcgggcgcggggccgcgatggatttccagcagctggccgacgttgcggagaaatggtgctccaacacgcccttcgagctcatcgccaccgaggagaccgaacgcaggatggatttctacgccgaccccggcgtctccttctatgtgctgtgtccggacaacggctgcggcgacaattttcacgtgtggagtgagagcgaggactgcctgcctttcttgcagctagcacaggattacatctcctcctgcggcaagaagacgctccacgaagtcctggaaaaagtcttcaagtctttcagacctttactggggcttccggatgcagatgacgatgcgtttgaagagtacagtgctgacgtggaagaagaggagccagaggcggaccacccccagatgggggtcagccagcagtaaatctgggggctcccctgagaaggagagtgagccccacagtaacctaggtggggtcactgcccctcctgggttagcattttgcattagcacttcgaaataggacatctggctcccagcatccaaattaaaatgaaatacctttttaacgaccacaaaatatctgtgatgagctttgctcagaagtgacctgaatttcactcccgcttcagtggggtttctatggagttgtcttggtagcctttgccattttgaatttagagtccattttgtggctgactattctcttaagtttatgttggagaattaacattcgctgactcgaatgtagagaactctgaatgtattaaggataggttttgagtcctcacaggtgaccttactgagggaaagcatggcagagaagaaatgcagtctgcactttttatgtactttttaagtgtccgtaagtgaaaggttttgcttataaagcatgaattttaatatctagtcattaaactgcacaagtgcaaatacaagggcaggaaaggataatcacttagctttggactaagagggtaagagaggcccagaagcctttaagtgttttgccattactgagttacctgggtatgtagcgactggttcgtggttaggtgtaaatgttacttgcttgttcgactgtttcaaaacatgctaattccaaagccacttttgaagtctatagtggaaaatatagatggggtgaaagatataatgtattgatttttaaagctgtttataagccgtcccacgtataaaatgaaacattttaccttctctctttctaatgagatggccgcttgttaaatcatgaaaacatccagaattcaagtgccgcttaaactttgaagccatagataaatttgttagaaaagtaaaccaggattaaaagtttttaaaaatatggtagaatccttctttactttttaagtcttttatttaaaaaaaaaaaagtcaaaaaaaggattccattgtgtaatttatttaaaaatttaatcacatgtttcgagggacttaattgtggtgtatttgtaaagggacacgaaggtaggaatcttttaatcgtgggttagcttggttaacagggaacgttttaataatcaagatactcagacaactcacagaaacaacttctgtaataactggaaatactgctgttatcgtttagccaacaattacttactggggacatcctttgtaatgctaacatggaattattcctggacccttctgcatccctggttttagttaacctaggatgcggaatgcctcctttacaacactagattaaacctagcatctggggtgggtacgtttaaacagtcacacatgtgcctgttaggttgtgaaagttttgaattaaaaacaagcagtagcagcagaggccacagaacttatgggagtcttgtatatcttccaggcatgtcggtgtaaacctgattgtctcgacattttctgtttaattgattggtgctgtgaggagttcggctgctcgtggtaaaacagcgtactccagttttaagtcatcgggtaaaataataggacagtgatttccatctgtgcttcagtacccactttgtgttcttttcttgaaaagtcatactaaaggttaatttcaagtaaaatgaatttccttccaagtagcctattagtaaaacacaacttagtgtttcatccattggggtgagcatatactgccctttgcagccctgcctgtgttctgattggctccattcatgagcaaaggtgattgtgagctgtatattacacaggtgtcgcccaggtttcgtaacctccactttaatgcagtaagccgcaagaatgacttctgcaagtgaaatgaggaagcttcactagcttgctccattggaaggtaaactgaaattttatacgttgaagcttaaaatctaaatttatgtatgtttggaaatggaatggacattaacataaaatgtattttatcaaaaaagtgtttagactttgaccaaatacatgttggtattatcatgttaatgttctctgtttataaaaattgagtggagatagatagactcggccattctgtgggctgatgagaattctgggctttgttttgcaccaggggtaggaaacagagaacatgtctgtatgttacttaatctccatagcaaaatcccaaacagcattagcagatcgaattgtttcttctaagacttcctttttctgaatgtgtgcacatcccttctcgtgctcacacacttgcccacacactcacttcttcctgcgctgtggctgctctaagcagggctgtgcatggtgcaaagctgcagtcagtgagcctggcagcctgtggtttctgttatggaaatggttccatggtgaaacacatccctgacccttcacagacttacacatttactcaccaggaggtggcagcggtgtgggaggaggagtgttgaccttggacgcaggagagacacctgggttctagttcaagtcggccaaggactgtgtgaccttgacaagtctaactggtctgtgaacaaggggcatttgcccttccagctgtaaacactgcccttctgtgcctgccttatgtgtgtgtgtgagtaaggagcaacagtcaaggaaacttttagggattcgagaagaaaatacatgtgggatcttgccaaggtgctgcctttaggatgctgacccctgcactaccttagaacatgttgatctgtgagtgcccaagcccctgagggctcgatctcatggggcagatgaaattctcttccttagaggaaagggaaaggtgaggccccagaggacttatctcagctgtacatgctctgcctgtggagacatggcttttctttgtgctgtggcagactggggctttggaagtggtgtatgtttaacttacctgagagtgagagatgtgtaggaagaatagctggaagaaagtgaaagatgagtgccagtacttttggcctgttatccagtagagagaaagtgacagtgaaagtaacgtgagagagaaagagtgtgtgtgtatatgtgagagagagaaagaaagagaaaggaatgcttgattgcttgttgttcactgggccagctctgaaatccaaaatcatgccttgataacattacaaaaccgtgatcctgggtttgagtgaatcctagagacattgttcttatggccgcctggtttccgcagcctgatcaccatatcgagcagacgtcaaggaatcagagtgaagtacggagccagggagggaggtgaggccccgtgtagtgcctgtcaccactgtggattcacctgcactcaggtgtccactcctgtctcccaggcccaaagcagcacatggtgcaatggaaaagtctcttatgtagggatcctccttgtgtcctggtgccagaattagatttccagtgtacttcaacgaaaacctctctcctttatagttgctgtcatctttcatgtataaacagaaaccgtctctagcacaatatatttctgaatattgtttctgtttcataagagcacaatgtacatggacctaggggagctgtggtcccaagtgtcattggaatttatattttaggaataggctttgcatgttaaaattcacaagttgggaaactggtatgaacagatctgatttcttacagagaggcatgaaggaataggcaggacttaacttggggtgggaggagatgaataagggagaatgggagagttggggtctgacagttaccacctgagccccaggaaaactgttttcattttcacggctgtctcactgggggcctgctttcctcaaaggaactgactgtatgttgagaggcaatgccttgtgttggcatggctttgccactttaaaagtgccccccagccaaggagaccaacaggaaccctgctcatctggtagggctctttccttcagtaaaaccagctgccagcctgagaagcctgtctttcccaaatgcaggcagatctgagaggggctccaggcacccggcaggtaaatcacaaagcaaacttgggtgtccttggcagcggggaggaagcaggagtgccccctcaggccagagggcagggccaacctcctcactgtgcttcaaggttgtagaaagagcacaattaatgcttaagcgatcacagacccctctcccctgcagtgggtgttagctccaaagagatgccattgctgatcacccagtcttcggagaagcctaaaatttctttgaattaaaaactgatcctttttcataaagacccagtcacttctcccagtttagtgataacaggtatgacacaagaagctgaagtcttttagattttatagagagtaattctgaaacctgccagaatgctggtagcctgtggtgtccatggcaatgggtgtccatggtaaaatatctatagcttctgctcactgggcaaatataaaagacaacatattatttaacataatatgttgtcttttatatttttatttaaatctggattacgaaaatatagtacccatgagcatttcatgttagaaaccccatttaaagcactataaggctgaataggcacaagcgattaaaagtagatgccaggccacataaaaataaatgttttaatttacttagagctgtattcaagttgtttgataccagacagaaagctgacagtctgttctttgtaaactgcctttccctgtttttctgttttgttttgtttctcaagtttcattttttactaagccccttctgacacctaggcagataaagataagagtagtgcgcagtacaaatgtcagctctgaagaggaggaagtaaatcttcaatgctagggcagatcttcactatccgtgatccagtcttaatttgagcatgagagcaaaatttagtcatctacacaagaagcaaaagcaaggaatagttgttgggtttttgttttttggttgttggacgcttgagcaggcgtcattgcttggaaccctaataaacgatgcactctacaaatgaaagtgtccttgaccatggatatcaatatagcagaaatgccaggtcttagatgattggaatgtgggggccca

SEQ ID NO: 331480 - DNA, 317 bp, Homo sapiens
agaaagaactgaaactggaggcatctgttcaggcacccagagaaagcctcacgcgcacaaagcagcaaacagaacaaaccccagtgccatcatggagcccagacttgagcacacagggaccctggcgtggagcacgagggtgccaaggcccgcaggtggctgacttgtgtgctctggtgccatgctcagatttgatgggatgaccctgcaattgcctgctttgtgagccacacaggcctgggtcaaaaagacgacggaccaccagcctgggcaacacacaaagcgaaacctgtctccacttaaaagataattagggt

SEQ ID NO: 331481 - DNA, 697 bp, Homo sapiens
tggtctcaaactcctgacctcaggtgatccgcccaccttggcctcccaaagtgctgggattacaagcatgagccaccgcacctaacctctccaaatatttttagaaagagctgctaagagctaggtggaattgtaagggatgtgtccatgctcctcctgcaatcttcacctagaatataagaggatgaggatggcacactagattttttttttttatctagtgtgccaggaagttatcagagagcttcaaacaatggagttactggatctggtttatggtttccaaagatcactctgactactatgtgtagaatggattgcatgaggccaagagtggggtctcagttacaacagcatcatgatcgattgctgatgttatgacttagtattttggttaatataattatcatttatttccttatgaatacgagtaccaagtgaaataccagaatagcactcctattttagatcaacgaggataggggagtttttgcacttgggttcagaagtacttgatttgtaaaccccaagacattttctgtaaaaatttgaggttgtgcatatttttctggagtcaaagttcttcttagttgcttaaagggatatatgtcccccaaatggtgacttacatgctgaaaaactgggggcataccaggtcatttcctgaagcttgttcccagctctaaaatatgaacac

SEQ ID NO: 331482 - DNA, 253 bp, Homo sapiens
tggtccacagatgctcaacagaaactcccgcaccaaatcacttccagctttgacatctctgccaaagtttttattcagcctctcagttatatttctacccaactttccacactggtagacagaataaaaatcttcacctacaatttgtccatctttgacactaccaagcacgtgtatcttaagtgttgttagatgttgaagacaaacattattttgttagccaagaagttgctatgttggcaagaagtcatct

SEQ ID NO: 331483 - DNA, 316 bp, Homo sapiens
gaaaacacgtcttcaatcagaaaaagaagcaatccttgtgaaactcccaagtacactttttgaattgatggatccatttgttacactcttcaaaaagtttcaacgctgccctcagctcttgctatctcatttcggtcttttgacccttaagtcttagttattccttatgacatggtaaagattggacagtaaaactaattgtgacagtactcaacagagaaaagcctgtaatgaatagcatcagggagaccttgtgaagaattgcactttaaacataaaaggttgcagatgaattgaagaaaggaaaaaaatatga

SEQ ID NO: 331484 - DNA, 4023 bp, Homo sapiens
taatacagcaactctctcccaaagaacagagagcttttgagcttaaattgaaagaaatcaaagaacagcataaaaactttgaggatttttattcctttatgatcatgaaaaccaattttaataaagaatacatagaaaatgtggtccggaatatcctgaaagggcagaatattttcaccaaggaagcaaagctcttttcttttctggctcttcttaattcatatgtgcctgataccaccatttcactatcacagtgtgaaaaattcttaggaattggaaacaagaaggctttctgggggacagaaaaatttgaagacaagatgggcacctactctacaattctgataaaaacagaggtcatcgaatgtgggaactactgtggagtacgcatcattcactctttgattgcagagttctcactggaagaattgaagaaaagctatcacctgaataaaagtcaaattatgttggatatgctaactgagaatttgttcttcgatactggtatgggaaaaagtaaatttttgcaagatatgcacacactcctactcacaagacaccgcgatgaacatgaaggtgaaacaggaaattggttttccccatttattgaagcattacataaagatgaaggaaatgaagcagttgaagctgtattgcttgaaagtatccatcggttcaacccaaatgcattcatttgccaagcgttggcaagacatttctacattaaaaagaaggactttggcaatgctctaaactgggcaaaacaagcaaaaatcatagaacctgacaattcttatatctcagatacactgggtcaagtctacaaaagtaaaataagatggtggatagaggaaaacggaggaaacgggaacatttcagttgatgatctaattgctcttttggatttagcagaacatgcctcaagtgcattcaaagaatctcaacagcaaagtgaagatagagagtatgaagtgaaggaaagattgtatccgaagtcaaaaaggcggtatgatacttacaatatagctggttatcaaggagagatagaagttgggctttacacaatccaaattctccagctcattcctttttttgataataaaaatgagctatctaaaagatatatggtcaattttgtatcaggaagtagtgatattccaggggatccaaacaatgaatataaattagccctcaaaaactatattccttatttaactaaattgaaattttctttgaaaaagtcctttgatttttttgatgaatactttgtcctgctaaaacccaggaacaatattaagcaaaatgaagaggccaaaactcggagaaaggtggctggatattttaagaaatatgtagatatattttgtctcttagaagaatcacaaaacaacacaggtcttggatcaaagttcagtgagccacttcaagtagagagatgcaggagaaacctagtagctttaaaagcagacaagttttctgggctcttggaatatcttatcaaaagtcaagaggatgctataagcactatgaaatgtatagtgaacgaatatacttttctcttagaacaatgcactgtcaaaatccagtcaaaagaaaagctaaatttcatcttggccaacattattctctcctgtatccaacctacctccagattagtaaagccagttgaaaaactaaaagatcagcttcgagaagtcttgcaaccaataggactgacttatcagttttcagaaccgtattttctagcttccctcttattctggccagaaaatcaacaactagatcaacattctgaacaaatgaaagagtatgctcaagcactaaaaaattctttcaaggggcaatataaacatatgcatcgtacaaagcaaccaattgcatatttctttcttggaaaaggtaaaagactggaaagacttgttcacaaaggaaaaattgaccagtgctttaagaagacaccagatattaattccttgtggcagagtggagatgtgtggaaggaggaaaaagtccaagaacttttgcttcgtttacaaggtcgagctgaaaacaattgtttatatatagaatatggaatcaatgaaaaaatcacaatacccatcactcccgcttttttaggtcaacttagaagtggcagaagcatagagaaggtgtctttttacctgggattttccattggaggcccacttgcttatgacattgaaattgtttaagagcctgatattcttcctccaagaatttgatctcagtacccatttaatttttttggactcaagatctatgctttaaaccggcaaggttatagatacagcctctagctcttcagatctgtacatgcagtatttaatttcctcttaaacatgttatgagttctacaaagacaatagtgaaaaaggaaggagtgagatatatgaaaagtagcaaatatgttccttggtttggttaacatcattgatgacaaaataataaggagctatgactggagtcaggagaagttagtgtaataagctggctacacagaaccccactacttaccaggcatggattgaagaagattgtctactcaaatggcatttagacattagaatgtctgggaaaatatttctcaaagacagcaaaaacctctcaaactgaggagcaacatttattcttactaagcagatcatcaatgtatcatgtgcttggcactcaaggatcttccaaaacagaggaccaaccagtcttctgaaggtcatgcccacagaagtcatcagaccttaccaaagtaggttggagaattagattgccttttcatgcagtgagattcagttaagcaaaaatgaaatttgtctctatagctaattagcttatcaactcccctccaaacaaacaattaaaaaaaaaacatacagacactcaaattccacaagctaatgaacaaaagggactcttgtgagaagactaatgagtccctcatccagaagatgccaatgtactggcagattaacatacaacctatgttttgaacaaaaacaaccagcgatacgtaatcaaaatgtaattttcccctaataaaattatggatatgggcagtcatcaatggctgccaaaaccattaagtggaaagctgattaaaaaacaaaaatttctaatggatttatcaaactgtcccaaatcctgataaatattaacatcacagaggaagaccagacattatgggcctggaagtactataggagtgcacacatcacccgtgacatggtcttgccaaataattaaacctgaatttgatcaggtctctggatcttatttgcaattcaaaagaaattttaaaaaaatcctactaacaccaccacaaatatgcaatcagcaatatccagaaaggggaaattcacaggacaaaaacctggttttcttttttggtttcttcaaccaaaaaagaaagaaattgcaaaggaccaaaaaaatgttggggaatctatacattataagggacttaacaactaaagggcaacatatagactttagatcctaatttgagcaaaatctaaaatcaattattaggcaatcagaaaaatttgaacacagactagatatttgaggatattaaggtactatattattgaagattccatggttatgttttttaaagagttcatgccttttagagatacatactaaagtatttgtaaataaatgacatgatctagaatcagtaattttgtgtttggggtgtgggggtggtgaaagggaagtagaaccgaaacaagattagtcctgagttaacaatggctgcaagctggatacatggaattcagcacacttttctccctcttactgattatgcttttgaaattttctcttgtaaaacatttagaaaacaaaaacaaaaaaaatgtgatttgtttctgtcttcaaaatctcattagaattttttcactggaggaagattttcccttgcttctgcataaaattttaactccataacttataagctcactctttattgttactttctaattgacaaataaaaattgtatatta

SEQ ID NO: 331485 - DNA, 3678 bp, Homo sapiens
taatacagcaactctctcccaaagaacagagagcttttgagcttaaattgaaagaaatcaaagaacagcataaaaactttgaggatttttattcctttatgatcatgaaaaccaattttaataaagaatacatagaaaatgtggtccggaatatcctgaaagggcagaatattttcaccaaggaagcaaagctcttttcttttctggctcttcttaattcatatgtgcctgataccaccatttcactatcacagtgtgaaaaattcttaggaattggaaacaagaaggctttctgggggacagaaaaatttgaagacaagatgggcacctactctacaattctgataaaaacagaggtcatcgaatgtgggaactactgtggagtacgcatcattcactctttgattgcagagttctcactggaagaattgaagaaaagctatcacctgaataaaagtcaaattatgttggatatgctaactgagaatttgttcttcgatactggtatgggaaaaagtaaatttttgcaagatatgcacacactcctactcacaagacaccgcgatgaacatgaaggtgaaacaggaaattggttttccccatttattgaagcattacataaagatgaaggaaatgaagcagttgaagctgtattgcttgaaagtatccatcggttcaacccaaatgcattcatttgccaagcgttggcaagacatttctacattaaaaagaaggactttggcaatgctctaaactgggcaaaacaagcaaaaatcatagaacctgacaattcttatatctcagatacactgggtcaagtctacaaaagtaaaataagatggtggatagaggaaaacggaggaaacgggaacatttcagttgatgatctaattgctcttttggatttagcagaacatgcctcaagtgcattcaaagaatctcaacagcaaagtgaagatagagagtatgaagtgaaggaaagattgtatccgaagtcaaaaaggcggtatgatacttacaatatagctggttatcaaggagagatagaagttgggctttacacaatccaaattctccagctcattcctttttttgataataaaaatgagctatctaaaagatatatggtcaattttgtatcaggaagtagtgatattccaggggatccaaacaatgaatataaattagccctcaaaaactatattccttatttaactaaattgaaattttctttgaaaaagtcctttgatttttttgatgaatactttgtcctgctaaaacccaggaacaatattaagcaaaatgaagaggccaaaactcggagaaaggtggctggatattttaagaaatatgtagatatattttgtctcttagaagaatcacaaaacaacacaggtcttggatcaaagttcagtgagccacttcaagtagagagatgcaggagaaacctagtagctttaaaagcagacaagttttctgggctcttggaatatcttatcaaaagtcaagaggatgctataagcactatgaaatgtatagtgaacgaatatacttttctcttagaacaatgcactgtcaaaatccagtcaaaagaaaagctaaatttcatcttggccaacattattctctcctgtatccaacctacctccagattagtaaagccagttgaaaaactaaaagatcagcttcgagaagtcttgcaaccaataggactgacttatcagttttcagaaccgtattttctagcttccctcttattctggccagaaaatcaacaactagatcaacattctgaacaaatgaaagagtatgctcaagcactaaaaaattctttcaaggggcaatataaacatatgcatcgtacaaagcaaccaattgcatatttctttcttggaaaaggtaaaagactggaaagacttgttcacaaaggaaaaattgaccagtgctttaagaagacaccagatattaattccttgtggcagagtggagatgtgtggaaggaggaaaaagtccaagaacttttgcttcgtttacaaggtcgagctgaaaacaattgtttatatatagaatatggaatcaatgaaaaaatcacaatacccatcactcccgcttttttaggtcaacttagaagtggcagaagcatagagaaggtgtctttttacctgggattttccattggaggcccacttgcttatgacattgaaattgtttaagagcctgatattcttcctccaagaatttgatctcagtacccatttaatttttttggactcaagatctatgctttaaaccggcaaggttatagatacagcctctagctcttcagatctgtacatgcagtatttaatttcctcttaaacatgttatgagttctacaaagacaatagtgaaaaaggaaggagtgagatatatgaaaagtagcaaatatgttccttggtttggttaacatcattgatgacaaaataataaggagctatgactggagtcaggagaagttagtgtaataagctggctacacagaaccccactacttaccaggcatggattgaagaagattgtctactcaaatggcatttagacattagaatgtctgggaaaatatttctcaaagacagcaaaaacctctcaaactgaggagcaacatttattcttactaagcagatcatcaatgtatcatgtgcttggcactcaaggatcttccaaaacagaggaccaaccagtcttctgaaggtcatgcccacagaagtcatcagaccttaccaaagtaggttggagaattagattgccttttcatgcagtgagattcagttaagcaaaaatgaaatttgtctctatagctaattagcttatcaactcccctccaaacaaacaattaaaaaaaaaacatacagacactcaaattccacaagctaatgaacaaaagggactcttgtgagaagactaatgagtccctcatccagaagatgccaatgtactggcagattaacatacaacctatgttttgaacaaaaacaaccagcgatacgtaatcaaaatgtaattttcccctaataaaattatggatatgggcagtcatcaatggctgccaaaaccattaagtggaaagctgattaaaaaacaaaaatttctaatggatttatcaaactgtcccaaatcctgataaatattaacatcacagaggaagaccagacattatgggcctggaagtactataggagtgcacacatcacccgtgacatggtcttgccaaataattaaacctgaatttgatcaggtctctggatcttatttgcaattcaaaagaaattttaaaaaaatcctactaacaccaccacaaatatgcaatcagcaatatccagaaaggggaaattcacaggacaaaaacctggttttcttttttggtttcttcaaccaaaaaagaaagaaattgcaaaggaccaaaaaaatgttggggaatctatacattataagggacttaacaactaaagggcaacatatagactttagatcctaatttgagcaaaatctaaaatcaattattaggcaatcagaaaaatttgaacacagactagatatttgaggatattaaggtactatattattgaagattccatggttatgttttttaaagagttcatgccttttagagatacatactaaagtatttgtaaataaatg

SEQ ID NO: 331486 - DNA, 3862 bp, Homo sapiens
  misc_feature (3725)..(3725): n is a, c, g, or t
  misc_feature (3727)..(3727): n is a, c, g, or t
  misc_feature (3729)..(3729): n is a, c, g, or t
  misc_feature (3731)..(3731): n is a, c, g, or t
  misc_feature (3733)..(3733): n is a, c, g, or t
  misc_feature (3775)..(3775): n is a, c, g, or t
taatacagcaactctctcccaaagaacagagagcttttgagcttaaattgaaagaaatcaaagaacagcataaaaactttgaggatttttattcctttatgatcatgaaaaccaattttaataaagaatacatagaaaatgtggtccggaatatcctgaaagggcagaatattttcaccaaggaagcaaagctcttttcttttctggctcttcttaattcatatgtgcctgataccaccatttcactatcacagtgtgaaaaattcttaggaattggaaacaagaaggctttctgggggacagaaaaatttgaagacaagatgggcacctactctacaattctgataaaaacagaggtcatcgaatgtgggaactactgtggagtacgcatcattcactctttgattgcagagttctcactggaagaattgaagaaaagctatcacctgaataaaagtcaaattatgttggatatgctaactgagaatttgttcttcgatactggtatgggaaaaagtaaatttttgcaagatatgcacacactcctactcacaagacaccgcgatgaacatgaaggtgaaacaggaaattggttttccccatttattgaagcattacataaagatgaaggaaatgaagcagttgaagctgtattgcttgaaagtatccatcggttcaacccaaatgcattcatttgccaagcgttggcaagacatttctacattaaaaagaaggactttggcaatgctctaaactgggcaaaacaagcaaaaatcatagaacctgacaattcttatatctcagatacactgggtcaagtctacaaaagtaaaataagatggtggatagaggaaaacggaggaaacgggaacatttcagttgatgatctaattgctcttttggatttagcagaacatgcctcaagtgcattcaaagaatctcaacagcaaagtgaagatagagagtatgaagtgaaggaaagattgtatccgaagtcaaaaaggcggtatgatacttacaatatagctggttatcaaggagagatagaagttgggctttacacaatccaaattctccagctcattcctttttttgataataaaaatgagctatctaaaagatatatggtcaattttgtatcaggaagtagtgatattccaggggatccaaacaatgaatataaattagccctcaaaaactatattccttatttaactaaattgaaattttctttgaaaaagtcctttgatttttttgatgaatactttgtcctgctaaaacccaggaacaatattaagcaaaatgaagaggccaaaactcggagaaaggtggctggatattttaagaaatatgtagatatattttgtctcttagaagaatcacaaaacaacacaggtcttggatcaaagttcagtgagccacttcaagtagagagatgcaggagaaacctagtagctttaaaagcagacaagttttctgggctcttggaatatcttatcaaaagtcaagaggatgctataagcactatgaaatgtatagtgaacgaatatacttttctcttagaacaatgcactgtcaaaatccagtcaaaagaaaagctaaatttcatcttggccaacattattctctcctgtatccaacctacctccagattagtaaagccagttgaaaaactaaaagatcagcttcgagaagtcttgcaaccaataggactgacttatcagttttcagaaccgtattttctagcttccctcttattctggccagaaaatcaacaactagatcaacattctgaacaaatgaaagagtatgctcaagcactaaaaaattctttcaaggggcaatataaacatatgcatcgtacaaagcaaccaattgcatatttctttcttggaaaaggtaaaagactggaaagacttgttcacaaaggaaaaattgaccagtgctttaagaagacaccagatattaattccttgtggcagagtggagatgtgtggaaggaggaaaaagtccaagaacttttgcttcgtttacaaggtcgagctgaaaacaattgtttatatatagaatatggaatcaatgaaaaaatcacaatacccatcactcccgcttttttaggtcaacttagaagtggcagaagcatagagaaggtgtctttttacctgggattttccattggaggcccacttgcttatgacattgaaattgtttaagagcctgatattcttcctccaagaatttgatctcagtacccatttaatttttttggactcaagatctatgctttaaaccggcaaggttatagatacagcctctagctcttcagatctgtacatgcagtatttaatttcctcttaaacatgttatgagttctacaaagacaatagtgaaaaaggaaggagtgagatatatgaaaagtagcaaatatgttccttggtttggttaacatcattgatgacaaaataataaggagctatgactggagtcaggagaagttagtgtaataagctggctacacagaaccccactacttaccaggcatggattgaagaagattgtctactcaaatggcatttagacattagaatgtctgggaaaatatttctcaaagacagcaaaaacctctcaaactgaggagcaacatttattcttactaagcagatcatcaatgtatcatgtgcttggcactcaaggatcttccaaaacagaggaccaaccagtcttctgaaggtcatgcccacagaagtcatcagaccttaccaaagtaggttggagaattagattgccttttcatgcagtgagattcagttaagcaaaaatgaaatttgtctctatagctaattagcttatcaactcccctccaaacaaacaattaaaaaaaaaacatacagacactcaaattccacaagctaatgaacaaaagggactcttgtgagaagactaatgagtccctcatccagaagatgccaatgtactggcagattaacatacaacctatgttttgaacaaaaacaaccagcgatacgtaatcaaaatgtaattttcccctaataaaattatggatatgggcagtcatcaatggctgccaaaaccattaagtggaaagctgattaaaaaacaaaaatttctaatggatttatcaaactgtcccaaatcctgataaatattaacatcacagaggaagaccagacattatgggcctggaagtactataggagtgcacacatcacccgtgacatggtcttgccaaataattaaacctgaatttgatcaggtctctggatcttatttgcaattcaaaagaaattttaaaaaaatcctactaacaccaccacaaatatgcaatcagcaatatccagaaaggggaaattcacaggacaaaaacctggttttcttttttggtttcttcaaccaaaaaagaaagaaattgcaaaggaccaaaaaaatgttggggaatctatacattataagggacttaacaactaaagggcaacatatagactttagatcctaatttgagcaaaatctaaaatcaattattaggcaatcagaaaaatttgaacacagactagatatttgaggatattaaggtactatattattgaagattccatggttatgttttttaaagagttcatgccttttagagatacatactaaagtatttgtaaataaatgacatgatctagaatcagtaattttgtgtttggggtgtgggggtggcnanananancatgccccattgaggggtcaacttgacataaagtggagactntttcaaaatggctggtacatcctaaggagggttcgggaagcatatcctctctgccttttcatcagtgcttaggggtccagctgggac

SEQ ID NO: 331487 - DNA, 364 bp, Homo sapiens
ccaagccacctgacagttctgtgcaagaccttccctgtgcagctccatgtagtttcttgggaagtaagagaagatactcatttcttcagggtgaagctcactcaacttatgctccttgccaaagtcaccagttccaccttccctttttttagcaatgggatgcacatggagaccaccactgtcttttccagaagctcctcaatctgggttgccttagttcatcagtaatagtgttgaacatcaaagaataagtggtcaggatcctgccttgctcattccgtgagaagatccttgtaccttaagaaagcagagatacgggaagagcaaggtggctcacgcctgtaatcccagccctttgggaggc

SEQ ID NO: 331488 - DNA, 136 bp, Homo sapiens
acactgacaccatctattacaccacccctggaaaacagctcggaatttctccctatcatcaccatcatcctaccactgctgctactgatttattttactttatgggaggggtcagagaagtctttttttttttttt

SEQ ID NO: 331489 - DNA, 689 bp, Homo sapiens
ttgacatgtcttgaggttatgctggcagccctatgcagaggctcatgtcgtaaggaactgaggccacagtgaagatccagtgaggaagtaaggcctcttgtcaacagccacacacatacaacgggaagtggatcctttattcccagtcaagcctttgcatgatgtggccctgctagcatcttgattacagtctcatgagagaactcaaacaaggccatgcaactaagctgctcctgaattcctggaccacagaaacgatgagataataaccgtttcttgttttatgtcactaagtttagggataatttgttatacaatgatatagtttggctgtgtccccacccaaatctcatcttgaattgtaactcccataattcccatgtgttgtgggagggacccattgggagatgattgaatctttgggagtggtttccctcacactgttcttatggtagtgaataagtctcatgagatctgatggttttgtaaggtttcccttttcaattggttctcattctctcttgccaccaccatgtaagaagtacatttcgccttccaccatgattgtgaggcctccccagccatgtggaactgtgagtctgttaaacctctttttcctcccagtctcaggtatgtatttatcagcagtgtgaaaatggactaatacatacaagagaaaacataatata

SEQ ID NO: 331490 - DNA, 1146 bp, Homo sapiens
cgtctgcgtcagttggtcacgtggttgttcggagcgggcgagcggagttagcagggctttactgcagagcgcgccgggcactccagcgaccgtggggatcagcgtaggtgagctgtggccttttgcgaggtgctgcagccatagctacgtgcgttcgctacgaggattgagcgtctccacccatcttctgtgcttcaccatctacataatgaatcccagtatgaagcagaaacaagaagaaatcaaagagaatataaagaatagttctgtcccaagaagaactctgaagatgattcagccttctgcatctggatctcttgttggaagagaaaatgagctgtccgcaggcttgtccaaaaggaaacatcggaatgaccacttaacatctacaacttccagccctggggttattgtcccagaatctagtgaaaataaaaatcttggaggagtcacccaggagtcatttgatcttatgattaaagaaaatccatcctctcagtattggaaggaagtggcagaaaaacggagaaaggcgctgtatgaagcacttaaggaaaatgagaaacttcataaagaaattgaacaaaaggacaatgaaattgcccgcctgaaaaaggagaataaagaactggcagaagtagcagaacatgtacagtatatggcagagctaatagagagactgaatggtgaacctctggataattttgaatcactggataatcaggaatttgattctgaagaagaaactgttgaggattctctagtggaagactcagaaattggcacgtgtgctgaaggaactgtatcttcctctacggatgcaaagccatgtatatgaaatgcattaatatttgactgttgagaattttactgccgaagtttacctccactagttctttgtagcagagtacataactacataatgccaactctggaatcaaatttccttgtttgaatcctgggaccctattgcattaaagtacaaatactatgtatttttaatctatgatggtttatgtgaataggattttctcagttgtcagccatgacttatgtttattactaaataaacttcaaactcctgttgaacattgtgtataacttagaataatgaaatataaggagtatgtgtagaaaaaaaaaaag

SEQ ID NO: 331491 - DNA, 1278 bp, Homo sapiens
cgtctgcgtcagttggtcacgtggttgttcggagcgggcgagcggagttagcagggctttactgcagagcgcgccgggcactccagcgaccgtggggatcagcgtaggtgagctgtggccttttgcgaggtgctgcagccatagctacgtgcgttcgctacgaggattgagcgtctccacccagtaagtgggcaagaggcggcaggaagtgggtacgcaggggcgcaaggcgcacagcctctagacgactcgctttccctccggccaacctctgaagccgcgtcctactttgacagctgcagggccgcggcctggtcttctgtgcttcaccatctacataatgaatcccagtatgaagcagaaacaagaagaaatcaaagagaatataaagaatagttctgtcccaagaagaactctgaagatgattcagccttctgcatctggatctcttgttggaagagaaaatgagctgtccgcaggcttgtccaaaaggaaacatcggaatgaccacttaacatctacaacttccagccctggggttattgtcccagaatctagtgaaaataaaaatcttggaggagtcacccaggagtcatttgatcttatgattaaagaaaatccatcctctcagtattggaaggaagtggcagaaaaacggagaaaggcgctgtatgaagcacttaaggaaaatgagaaacttcataaagaaattgaacaaaaggacaatgaaattgcccgcctgaaaaaggagaataaagaactggcagaagtagcagaacatgtacagtatatggcagagctaatagagagactgaatggtgaacctctggataattttgaatcactggataatcaggaatttgattctgaagaagaaactgttgaggattctctagtggaagactcagaaattggcacgtgtgctgaaggaactgtatcttcctctacggatgcaaagccatgtatatgaaatgcattaatatttgactgttgagaattttactgccgaagtttacctccactagttctttgtagcagagtacataactacataatgccaactctggaatcaaatttccttgtttgaatcctgggaccctattgcattaaagtacaaatactatgtatttttaatctatgatggtttatgtgaataggattttctcagttgtcagccatgacttatgtttattactaaataaacttcaaactcctgttgaacattgtgtataacttagaataatgaaatataaggagtatgtgtagaaaaaaaaaaag

SEQ ID NO: 331492 - DNA, 1282 bp, Homo sapiens
cccccccccccccccccccaacgagttcaggcaacgggcgggtttaatcggcacaggaggctttactgcagagcgcgccgggcactccagcgaccgtggggatcagcgtaggtgagctgtggccttttgcgaggtgctgcagccatagctacgtgcgttcgctacgaggattgagcgtctccacccagtaagtgggcaagaggcggcaggaagtgggtacgcaggggcgcaaggcgcacagcctctagacgactcgctttccctccggccaacctctgaagccgcgtcctactttgacagctgcagggccgcggcctggtcttctgtgcttcaccatctacataatgaatcccagtatgaagcagaaacaagaagaaatcaaagagaatataaagaatagttctgtcccaagaagaactctgaagatgattcagccttctgcatctggatctcttgttggaagagaaaatgagctgtccgcaggcttgtccaaaaggaaacatcggaatgaccacttaacatctacaacttccagccctggggttattgtcccagaatctagtgaaaataaaaatcttggaggagtcacccaggagtcatttgatcttatgattaaagaaaatccatcctctcagtattggaaggaagtggcagaaaaacggagaaaggcgctgtatgaagcacttaaggaaaatgagaaacttcataaagaaattgaacaaaaggacaatgaaattgcccgcctgaaaaaggagaataaagaactggcagaagtagcagaacatgtacagtatatggcagagctaatagagagactgaatggtgaacctctggataattttgaatcactggataatcaggaatttgattctgaagaagaaactgttgaggattctctagtggaagactcagaaattggcacgtgtgctgaaggaactgtatcttcctctacggatgcaaagccatgtatatgaaatgcattaatatttgactgttgagaattttactgccgaagtttacctccactagttctttgtagcagagtacataactacataatgccaactctggaatcaaatttccttgtttgaatcctgggaccctattgcattaaagtacaaatactatgtatttttaatctatgatggtttatgtgaataggattttctcagttgtcagccatgacttatgtttattactaaataaacttcaaactcctgttgaacattgtgtataacttagaataatgaaatataaggagtatgtgtagaaaaaaaaaaag

SEQ ID NO: 331493 - DNA, 960 bp, Homo sapiens
cgggcagagcgacagaggatccccgtcggcatgcaagtgtcagaaacaagaagaaatcaaagagaatataaagaatagttctgtcccaagaagaactctgaagatgattcagccttctgcatctggatctcttgttggaagagaaaatgagctgtccgcaggcttgtccaaaaggaaacatcggaatgaccacttaacatctacaacttccagccctggggttattgtcccagaatctagtgaaaataaaaatcttggaggagtcacccaggagtcatttgatcttatgattaaagaaaatccatcctctcagtattggaaggaagtggcagaaaaacggagaaaggcgctgtatgaagcacttaaggaaaatgagaaacttcataaagaaattgaacaaaaggacaatgaaattgcccgcctgaaaaaggagaataaagaactggcagaagtagcagaacatgtacagtatatggcagagctaatagagagactgaatggtgaacctctggataattttgaatcactggataatcaggaatttgattctgaagaagaaactgttgaggattctctagtggaagactcagaaattggcacgtgtgctgaaggaactgtatcttcctctacggatgcaaagccatgtatatgaaatgcattaatatttgactgttgagaattttactgccgaagtttacctccactagttctttgtagcagagtacataactacataatgccaactctggaatcaaatttccttgtttgaatcctgggaccctattgcattaaagtacaaatactatgtatttttaatctatgatggtttatgtgaataggattttctcagttgtcagccatgacttatgtttattactaaataaacttcaaactcctgttgaacattgtgtataacttagaataatgaaatataaggagtatgtgtagaaaaaaaaaaag

SEQ ID NO: 331494 - DNA, 1035 bp, Homo sapiens
cgtctgcgtcagttggtcacgtggttgttcggagcgggcgagcggagttagcagggctttactgcagagcgcgccgggcactccagcgaccgtggggatcagcgtaggtgagctgtggccttttgcgaggtgctgcagccatagctacgtgcgttcgctacgaggattgagcgtctccacccatcttctgtgcttcaccatctacataatgaatcccagtatgaagcagaaacaagaagaaatcaaagagaatataaagaatagttctgtcccaagaagaactctgaagatgattcagccttctgcatctggatctcttgttggaagagaaaatgagctgtccgcaggcttgtccaaaaggaaacatcggaatgaccacttaacatctacaacttccagccctggggttattgtcccagaatctagtgaaaataaaaatcttggaggagtcacccaggagtcatttgatcttatgattaaagaaaatccatcctctcagtattggaaggaagtggcagaaaaacggagaaaggcgctgtatgaagcacttaaggaaaatgagaaaagactgaatggtgaacctctggataattttgaatcactggataatcaggaatttgattctgaagaagaaactgttgaggattctctagtggaagactcagaaattggcacgtgtgctgaaggaactgtatcttcctctacggatgcaaagccatgtatatgaaatgcattaatatttgactgttgagaattttactgccgaagtttacctccactagttctttgtagcagagtacataactacataatgccaactctggaatcaaatttccttgtttgaatcctgggaccctattgcattaaagtacaaatactatgtatttttaatctatgatggtttatgtgaataggattttctcagttgtcagccatgacttatgtttattactaaataaacttcaaactcctgttgaacattgtgtataacttagaataatgaaatataaggagtatgtgtagaaaaaaaaaaag

SEQ ID NO: 331495 - DNA, 751 bp, Homo sapiens
cccccccccccccccccccaacgagttcaggcaacgggcgggtttaatcggcacaggaggctttactgcagagcgcgccgggcactccagcgaccgtggggatcagcgtaggtgagctgtggccttttgcgaggtgctgcagccatagctacgtgcgttcgctacgaggattgagcgtctccacccatcttctgtgcttcaccatctacataatgaatcccagtatgaagcagaaacaagaagaaatcaaagagaatataaagacaaaaaaaaaaagaaaaactcttttgtgcgggcgcggactcggcgccccggggaaagaagtgtttttaagacacccatctggttgtgggcgggcggcgggggcccccaggaggggatcaggtgtgcgaccatgggcgcacacagagggggtgcccaaaggagagaacccaggggctcacagacaagatagggtggtgcgggagttctcctcaaccaataagaaaaaaccgcccgggcggggagcaaccccgagaggcgggtttctgggaccaaaacccccaaagggggggaggtccgggagaggacactaaacggaggcgtcttatcaaccgggggaggtccccaagcgagcgcctcgtgatacctaaaatatagcgccccgcggtggggagaaacaccagccagacgcacagcgtgacagagcaggcacacacgagcaacatcagtaagaccgacacgtcgagaggatcgtagagacatacaccag

SEQ ID NO: 331496 - DNA, 432 bp, Homo sapiens
atacagttgataagtgttttcattatagctgtccgcaggcttgtccaaaaggaaacatcggaatgaccacttaacatctacaacttccagccctggggttattgtcccagaatctagtgaaaataaaaatcttggaggagtcacccaggagtcatttgatcttatgattaaaggtatgaaaaaatagataacttttgtcttaattttaaattatgatataaggaaaaatttgttaatactattatgaattctgccaattactgtaatctggggatagtataacagcactataaatgtttttgtatgtgaccatttgtttgacaagatccatgtgtggatgaaatgttaggaaaagggaggcccagtggcagtgggctcacacctgtaatcccagtagcctaggaggttgaagcaggaggatggcttgagtct

SEQ ID NO: 331497 - DNA, 1220 bp, Homo sapiens
cgtctgcgtcagttggtcacgtggttgttcggagcgggcgagcggagttagcagggctttactgcagagcgcgccgggcactccagcgaccgtggggatcagcgtaggtgagctgtggccttttgcgaggtgctgcagccatagctacgtgcgttcgctacgaggattgagcgtctccacccagtaagtgggcaagaggcggcaggaagtgggtacgcaggggcgcaaggcgcacagcctctagacgactcgctttccctccggccaacctctgaagccgcgtcctactttgacagctgcagggccgcggcctggtcttctgtgcttcaccatctacataatgaatcccagtatgaagcagaaacaagaagaaatcaaagagaatataaagaatagttctgtcccaagaagaactctgaagatgattcagccttctgcatctggatctcttgttggaagagaaaatgagctgtccgcaggcttgtccaaaaggaaacatcggaatgaccacttaacatctacaacttccagccctggggttattgtcccagaatctagtgaaaataaaaatcttggaggagtcacccaggagtcatttgatcttatgattaaagaaaatccatcctctcagtattggaaggaagtggcagaaaaacggagaaaggcgctgtatgaagcacttaaggaaaatgagaaacttcataaagaaattgaacaaaaggacaatgaaattgcccgcctgaaaaaggagaataaagaactggcagaagtagcagaacatgtacagtatatggcagagctaatagagagactgaatggtgaacctctggataattttgaatcactggataatcaggaatttgattctgaagaagaaactgttgaggattctctagtggaagactcagaaattggcacgtgtgctgaaggaactgtatcttcctctacggatgcaaagccatgtatatgaaatgcattaatatttgactgttgagaattttactgccgaagtttacctccactagttctttgtagcagagtacataactacataatgccaactctggaatcaaatttccttgtttgaatcctgggaccctattgcattaaagtacaaatactatgtatttttaatctatgatggtttatgtgaataggattttctcagttgtcagccatgacttatgtttattactaaataaacttcaaactcctgttga

SEQ ID NO: 331498 - DNA, 1053 bp, Homo sapiens
gacgcgcggggccacactgcccgccccctagcctggcgctgggcctccgggacaagttggctgggtccgggcttggggactgcaacgcggtcttctgtgcttcaccatctacataatgaatcccagtatgaagcagaaacaagaagaaatcaaagagaatataaagaatagttctgtcccaagaagaactctgaagatgattcagccttctgcatctggatctcttgttggaagagaaaatgagctgtccgcaggcttgtccaaaaggaaacatcggaatgaccacttaacatctacaacttccagccctggggttattgtcccagaatctagtgaaaataaaaatcttggaggagtcacccaggagtcatttgatcttatgattaaagaaaatccatcctctcagtattggaaggaagtggcagaaaaacggagaaaggcgctgtatgaagcacttaaggaaaatgagaaacttcataaagaaattgaacaaaaggacaatgaaattgcccgcctgaaaaaggagaataaagaactggcagaagtagcagaacatgtacagtatatggcagagctaatagagagactgaatggtgaacctctggataattttgaatcactggataatcaggaatttgattctgaagaagaaactgttgaggattctctagtggaagactcagaaattggcacgtgtgctgaaggaactgtatcttcctctacggatgcaaagccatgtatatgaaatgcattaatatttgactgttgagaattttactgccgaagtttacctccactagttctttgtagcagagtacataactacataatgccaactctggaatcaaatttccttgtttgaatcctgggaccctattgcattaaagtacaaatactatgtatttttaatctatgatggtttatgtgaataggattttctcagttgtcagccatgacttatgtttattactaaataaacttcaaactcctgttgaacattgtgtataacttagaataatgaaatataaggagtatgtgtagaaaaaaaaaaag

SEQ ID NO: 331499 - DNA, 1095 bp, Homo sapiens
cgtctgcgtcagttggtcacgtggttgttcggagcgggcgagcggagttagcagggctttactgcagagcgcgccgggcactccagcgaccgtggggatcagcgtaggtgagctgtggccttttgcgaggtgctgcagccatagctacgtgcgttcgctacgaggattgagcgtctccacccatcttctgtgcttcaccatctacataatgaatcccagtatgaagcagaaacaagaagaaatcaaagagaatataaagaatagttctgtcccaagaagaactctgaagatgattcagccttctgcatctggatctcttgttggaagagaaaatgagctgtccgcaggcttgtccaaaaggaaacatcggaatgaccacttaacatctacaacttccagccctggggttattgtcccagaatctagtgaaaataaaaatcttggaggagtcacccaggagtcatttgatcttatgattaaagaaaatccatcctctcagtattggaaggaagtggcagaaaaacggagaaaggcgctgtatgaagcacttaaggaaaatgagaaagagaataaagaactggcagaagtagcagaacatgtacagtatatggcagagctaatagagagactgaatggtgaacctctggataattttgaatcactggataatcaggaatttgattctgaagaagaaactgttgaggattctctagtggaagactcagaaattggcacgtgtgctgaaggaactgtatcttcctctacggatgcaaagccatgtatatgaaatgcattaatatttgactgttgagaattttactgccgaagtttacctccactagttctttgtagcagagtacataactacataatgccaactctggaatcaaatttccttgtttgaatcctgggaccctattgcattaaagtacaaatactatgtatttttaatctatgatggtttatgtgaataggattttctcagttgtcagccatgacttatgtttattactaaataaacttcaaactcctgttgaacattgtgtataacttagaataatgaaatataaggagtatgtgtagaaaaaaaaaaag

SEQ ID NO: 331500 - DNA, 1578 bp, Homo sapiens
gcggagcggagcggcggcgggcgcagctagcgggtcggccgcggagcggaggtgcagctcggcttcccccggcacccctccccctcgggcgccagccccacccctccgccggccgggccgaccccgccgtactatcccctgcggcgcgagcccggggcggctccaagcgccccccagcagacccccatcatgggcagccagagctccaaggctccccggggcgacgtgaccgccgaggaggcagcaggcgcttcccccgcgaaggccaacggccaggagaatggccacgtgaaaagcaatggagacttatcccccaagggtgaaggggagtcgccccctgtgaacggaacagatgaggcagccggggccactggcgatgccatcgagccagcaccccctagccagggtgctgaggccaagggggaggtcccccccaaggagacccccaagaagaagaagaaattctctttcaagaagcctttcaaattgagcggcctgtccttcaagagaaatcggaaggagggtgggggtgattcttctgcctcctcacccacagaggaagagcaggagcagggggagatcggtgcctgcagcgacgagggcactgctcaggaagggaaggccgcagccacccctgagagccaggaaccccaggccaagggggcagaggctagtgcagcctcagaagaagaggcagggccccaggctacagagccatccactccctcggggccggagagtggccctacaccagccagcgctgagcagaatgagtagctaggtaggggcaggtgggtgatctctaagctgcaaaaactgtgctgtccttgtgaggtcactgcctggacctggtgccctggctgccttcctgtgcccagaaaggaaggggctattgcctcctcccagccacgttccctttcctcctctccctcctgtggattctcccatcagccatctggttctcctcttaaggccagttgaagatggtcccttacagcttcccaagttaggttagtgatgtgaaatgctcctgtccctggccctacctccttccctgtccccacccctgcataaggcagttgttggttttcttccccaattcttttccaagtaggttttgtttaccctactccccaaatccctgagccagaagtggggtgcttatactcccaaaccttgagtgtccagccttcccctgttgtttttagtctcttgtgctgtgcctagtggcacctgggctggggaggacactgccccgtctaggtttttataaatgtcttactcaagttcaaacctccagcctgtgaatcaactgtgtctcttttttgacttggtaagcaagtattaggctttggggtggggggaggtctgtaatgtgaaacaacttcttgtctttttttctcccactgttgtaaataacttttaatggccaaaccccagatttgtactttttttttttttctaactgctaaaaccattctcttccacctggttttactgtaacatttggaaaaggaataaatgtcgtccctttaaaaaaaaacaacaaacaaacacaaacaacacaaaaacaagggg

SEQ ID NO: 331501 - DNA, 618 bp, Homo sapiens
ggtcccttacagcttcccaagttaggttagtgatcatcttcaactggccttaagaggagaaccagatggctgccttacagcttcccaagttaggttagtgatgtgaaatgctcctgtccctggccctacctccttccctgtccccacccctgcataaggcagttgttggttttcttccccaattcttttccaagtaggttttgtttaccctactccccaaatccctgagccagaagtggggtgcttatactcccaaaccttgagtgtccagccttcccctgttgtttttagtctcttgtgctgtgcctagtggcacctgggctggggaggacactgccccgtctaggtttttataaatgtcttactcaagttcaaacctccagcctgtgaatcaactgtgtctcttttttgacttggtaagcaagtattaggctttggggtggggggaggtctgtaatgtgaaacaacttcttgtctttttttctcccactgttgtaaataacttttaatggccaaaccccagatttgtactttttttttttttctaactgctaaaaccattctcttccacctggttttactgtaacatttggaaaaggaataaatgtcgtcccttta

SEQ ID NO: 331502 - DNA, 771 bp, Homo sapiens
  misc_feature (630)..(631): n is a, c, g, or t
ggtcccttacagcttcccaagttaggttagtgatcatcttcaactggccttaagaggagaaccagatggctgccttacagcttcccaagttaggttagtgatgtgaaatgctcctgtccctggccctacctccttccctgtccccacccctgcataaggcagttgttggttttcttccccaattcttttccaagtaggttttgtttaccctactccccaaatccctgagccagaagtggggtgcttatactcccaaaccttgagtgtccagccttcccctgttgtttttagtctcttgtgctgtgcctagtggcacctgggctggggaggacactgccccgtctaggtttttataaatgtcttactcaagttcaaacctccagcctgtgaatcaactgtgtctcttttttgacttggtaagcaagtattaggctttggggtggggggaggtctgtaatgtgaaacaacttcttgtctttttttctcccactgttgtaaataacttttaatggccaaaccccagatttgtactttttttttttttctaactgctaaaaccattctcttccacctggttttactgtaacatttggaaaaggaataaatgtcgtccctttaaaaaacacaccnnaaacaacctccggggcatccattccggtcgcggaacaaagcggccatcgcatggcccgggcccacggtgtcccgaccccagttcttggcccaagggggcaatccccggcccccatgcgagccatatccgaacccggaccg

SEQ ID NO: 331503 - DNA, 399 bp, Homo sapiens
ggtttttataaatgtcttactcaagttcaaacctagacggggcagtgtcctccccagcccaggtgccactaggcacagcacaagagactaaaaacaacaggggaaggctggacactgccccgtctaggtttttataaatgtcttactcaagttcaaacctccagcctgtgaatcaactgtgtctcttttttgacttggtaagcaagtattaggctttggggtggggggaggtctgtaatgtgaaacaacttcttgtctttttttctcccactgttgtaaataacttttaatggccaaaccccagatttgtactttttttttttttctaactgctaaaaccattctcttccacctggttttactgtaacatttggaaaaggaataaatgtcgtcccttta

SEQ ID NO: 331504 - DNA, 1167 bp, Homo sapiens
  misc_feature (403)..(403): n is a, c, g, or t
  misc_feature (408)..(408): n is a, c, g, or t
ggtttttataaatgtcttactcaagttcaaacctagacggggcagtgtcctccccagcccaggtgccactaggcacagcacaagagactaaaaacaacaggggaaggctggacactgccccgtctaggtttttataaatgtcttactcaagttcaaacctccagcctgtgaatcaactgtgtctcttttttgacttggtaagcaagtattaggctttggggtggggggaggtctgtaatgtgaaacaacttcttgtctttttttctcccactgttgtaaataacttttaatggccaaaccccagatttgtactttttttttttttctaactgctaaaaccattctcttccacctggttttactgtaacatttggaaaaggaataaatgtcgtccctttaaaanaacanaaaagacaactcagaggcaccaaaatgcccgcggacgcgagacaatacagagggacgacgaccacgcggcaccacgggctccacacccgtgctcacccgtgcacccagccctcccggacaccaacacggagcgcagacaccgccgcgacacccccactatacgcgcagcccgcgcgacgatacagtcgctggaccgacgcccgggcctgacccgcgcgcacgccgacgaccccggcgcaaaccgcgggagcgcgccggcgacgcgccccgcgccgcactcaccgccgccgcaccagcagcgcgcgcgccgagcacgcgcgacacaccgcgacacccagacgactcggggggatgggaagagtcggccgctgcgcctggtcgtgtgcgtcaggtgcggggctagccggtcgcgcgcgggacaggggctcggggtcgcgggggcggcggtggctggggcgggcctggaggcggacggccgcgcggcctgccgccgcaacgtcgggcggtgtggggcggtgcggcgggggcgccaggggacacgcaagcaccagctcccgcgcgccagccagacagcctccgttggcgcacggcgccaggtagcggcacgaccgcgcggcgcactaggccgcagccgcgatccgccgcgccgcgggcgcgaccgctgctcgcctggcgacgcacgccgctgccgcggcgggcgcggacaggggggccggagggcgaggcggcaagtgcgcaccgcggccgctgccgcgacag

SEQ ID NO: 331505 - DNA, 209 bp, Homo sapiens
tcgacccacgcgtcgcggacgcgtgggtcgacccacgcgtccggttctagatcgcgagcggccgccctttttttctcccactgttgtaaataacttttaatggccaaaccccagatttgtactttttttttttttctaactgctaaaaccattctcttccacctggttttactgtaacatttggaaaaggaataaatgtcgtcccttta

SEQ ID NO: 331506 - DNA, 1452 bp, Homo sapiens
gcggagcggagcggcggcgggcgcagctagcgggccgaccccgccgtactatcccctgcggcgcgagcccggggcggctccaagcgccccccagcagacccccatcatgggcagccagagctccaaggctccccggggcgacgtgaccgccgaggaggcagcaggcgcttcccccgcgaaggccaacggccaggagaatggccacgtgaaaagcaatggagacttatcccccaagggtgaaggggagtcgccccctgtgaacggaacagatgaggcagccggggccactggcgatgccatcgagccagcaccccctagccagggtgctgaggccaagggggaggtcccccccaaggagacccccaagaagaagaagaaattctctttcaagaagcctttcaaattgagcggcctgtccttcaagagaaatcggaaggagggtgggggtgattcttctgcctcctcacccacagaggaagagcaggagcagggggagatcggtgcctgcagcgacgagggcactgctcaggaagggaaggccgcagccacccctgagagccaggaaccccaggccaagggggcagaggctagtgcagcctcagaagaagaggcagggccccaggctacagagccatccactccctcggggccggagagtggccctacaccagccagcgctgagcagaatgagtagctaggtaggggcaggtgggtgatctctaagctgcaaaaactgtgctgtccttgtgaggtcactgcctggacctggtgccctggctgccttcctgtgcccagaaaggaaggggctattgcctcctcccagccacgttccctttcctcctctccctcctgtggattctcccatcagccatctggttctcctcttaaggccagttgaagatggtcccttacagcttcccaagttaggttagtgatgtgaaatgctcctgtccctggccctacctccttccctgtccccacccctgcataaggcagttgttggttttcttccccaattcttttccaagtaggttttgtttaccctactccccaaatccctgagccagaagtggggtgcttatactcccaaaccttgagtgtccagccttcccctgttgtttttagtctcttgtgctgtgcctagtggcacctgggctggggaggacactgccccgtctaggtttttataaatgtcttactcaagttcaaacctccagcctgtgaatcaactgtgtctcttttttgacttggtaagcaagtattaggctttggggtggggggaggtctgtaatgtgaaacaacttcttgtctttttttctcccactgttgtaaataacttttaatggccaaaccccagatttgtactttttttttttttctaactgctaaaaccattctcttccacctggttttactgtaacatttggaaaaggaataaatgtcgtcccttta

SEQ ID NO: 331507 - DNA, 1437 bp, Homo sapiens
tggcttctacaagaggacagaaccaagaggagtggcaactaattggatgtgggagaatccacaggagggagaggaggaaagggaacgtgttctgggaggaggcaatagccccttcctttctgggcacaggaaggtagccattctcctggccgcttcccccgcgaaggccaacggccaggagaatggccacgtgaaaagcaatggagacttatcccccaagggtgaaggggagtcgccccctgtgaacggaacagatgaggcagccggggccactggcgatgccatcgagccagcaccccctagccagggtgctgaggccaagggggaggtcccccccaaggagacccccaagaagaagaagaaattctctttcaagaagcctttcaaattgagcggcctgtccttcaagagaaatcggaaggagggtgggggtgattcttctgcctcctcacccacagaggaagagcaggagcagggggagatcggtgcctgcagcgacgagggcactgctcaggaagggaaggccgcagccacccctgagagccaggaaccccaggccaagggggcagaggctagtgcagcctcagaagaagaggcagggccccaggctacagagccatccactccctcggggccggagagtggccctacaccagccagcgctgagcagaatgagtagctaggtaggggcaggtgggtgatctctaagctgcaaaaactgtgctgtccttgtgaggtcactgcctggacctggtgccctggctgccttcctgtgcccagaaaggaaggggctattgcctcctcccagccacgttccctttcctcctctccctcctgtggattctcccatcagccatctggttctcctcttaaggccagttgaagatggtcccttacagcttcccaagttaggttagtgatgtgaaatgctcctgtccctggccctacctccttccctgtccccacccctgcataaggcagttgttggttttcttccccaattcttttccaagtaggttttgtttaccctactccccaaatccctgagccagaagtggggtgcttatactcccaaaccttgagtgtccagccttcccctgttgtttttagtctcttgtgctgtgcctagtggcacctgggctggggaggacactgccccgtctaggtttttataaatgtcttactcaagttcaaacctccagcctgtgaatcaactgtgtctcttttttgacttggtaagcaagtattaggctttggggtggggggaggtctgtaatgtgaaacaacttcttgtctttttttctcccactgttgtaaataacttttaatggccaaaccccagatttgtactttttttttttttctaactgctaaaaccattctcttccacctggttttactgtaacatttggaaaaggaataaatgtcgtcccttta

SEQ ID NO: 331508 - DNA, 1642 bp, Homo sapiens
  misc_feature (1545)..(1545): n is a, c, g, or t
  misc_feature (1552)..(1552): n is a, c, g, or t
  misc_feature (1555)..(1556): n is a, c, g, or t
  misc_feature (1558)..(1559): n is a, c, g, or t
  misc_feature (1562)..(1562): n is a, c, g, or t
  misc_feature (1571)..(1571): n is a, c, g, or t
  misc_feature (1578)..(1578): n is a, c, g, or t
gcggagcggagcggcggcgggcgcagctagcgggtcggccgcggagcggaggtgcagctcggcttcccccggcacccctccccctcgggcgccagccccacccctccgccggccgggccgaccccgccgtactatcccctgcggcgcgagcccggggcggctccaagcgccccccagcagacccccatcatgggcagccagagctccaaggctccccggggcgacgtgaccgccgaggaggcagcaggcgcttcccccgcgaaggccaacggccaggagaatggccacgtgaaaagcaatggagacttatcccccaagggtgaaggggagtcgccccctgtgaacggaacagatgaggcagccggggccactggcgatgccatcgagccagcaccccctagccagggtgctgaggccaagggggaggtcccccccaaggagacccccaagaagaagaagaaattctctttcaagaagcctttcaaattgagcggcctgtccttcaagagaaatcggaaggagggtgggggtgattcttctgcctcctcacccacagaggaagagcaggagcagggggagatcggtgcctgcagcgacgagggcactgctcaggaagggaaggccgcagccacccctgagagccaggaaccccaggccaagggggcagaggctagtgcagcctcagaagaagaggcagggccccaggctacagagccatccactccctcggggccggagagtggccctacaccagccagcgctgagcagaatgagtagctaggtaggggcaggtgggtgatctctaagctgcaaaaactgtgctgtccttgtgaggtcactgcctggacctggtgccctggctgccttcctgtgcccagaaaggaaggggctattgcctcctcccagccacgttccctttcctcctctccctcctgtggattctcccatcagccatctggttctcctcttaaggccagttgaagatggtcccttacagcttcccaagttaggttagtgatgtgaaatgctcctgtccctggccctacctccttccctgtccccacccctgcataaggcagttgttggttttcttccccaattcttttccaagtaggttttgtttaccctactccccaaatccctgagccagaagtggggtgcttatactcccaaaccttgagtgtccagccttcccctgttgtttttagtctcttgtgctgtgcctagtggcacctgggctggggaggacactgccccgtctaggtttttataaatgtcttactcaagttcaaacctccagcctgtgaatcaactgtgtctcttttttgacttggtaagcaagtattaggctttggggtggggggaggtctgtaatgtgaaacaacttcttgtctttttttctcccactgttgtaaataacttttaatggccaaaccccagatttgtactttttttttttttctaactgctaaaaccattctcttccacctggttttactgtaacatttggaaaaggaataaatgtcgtccctttaaaaaaataanaattcantgnncnncgntttacaacntctgaantgggaaaacccttgggcatacccaacttaaatcccttggcatttccccttttctcctgtgcgtt

SEQ ID NO: 331509 - DNA, 1426 bp, Homo sapiens
gcggagcggagcggcggcgggcgcagctagcgggtcggccgcggagcggaggtgcagctcggcttcccccggcacccctccccctcgggcgccagccccacccctccgccggccgggccgaccccgccgtactatcccctgcggcgcgagcccggggcggctccaagcgccccccagcagacccccatcatgggcagccagagctccaaggctccccggggcgacgtgaccgccgaggaggcagcaggcgcttcccccgcgaaggccaacggccaggagaatggccacgtgaaaagcaatggagacttatcccccaagggtgaaggggagtcgccccctgtgaacggaacagatgaggcagccggggccactggcgatgccatcgagccagcaccccctagccagggtgctgaggccaagggggaggtcccccccaaggagacccccaagaagaagaagaaattctctttcaagaagcctttcaaattgagcggcctgtccttcaagagaaatcggaaggagggtgggggtgattcttctgcctcctcacccacagaggaagagcaggagcagggggagatcggtgcctgcagcgacgagggcactgctcaggaagggaaggccgcagccacccctgagagccaggaaccccaggccaagggggcagaggctagtgcagcctcagaagaagaggcagggccccaggctacagagccatccactccctcggggccggagagtggccctacaccagccagcgctgagcagaatgagtagctaggtaggggcaggtgggtgatctctaagctgcaaaaactgtgctgtccttgtgaggtcactgcctggacctggtgccctggctgccttcctgtgcccagaaaggaaggggctattgcctcctcccagccacgttccctttcctcctctccctcctgtggattctcccatcagccatctggttctcctcttaaggccagttgaagatggtcccttacagcttcccaagttaggttagtgatgtgaaatgctcctgtccctggccctacctccttccctgtccccacccctgcataaggcagttgttggttttcttccccaattcttttccaagtaggttttgtttaccctactccccaaatccctgagccagaagtggggtgcttatactcccaaaccttgagtgtccagccttcccctgttgtttttagtctcttttttgacttggtaagcaagtattaggctttggggtggggggaggtctgtaatgtgaaacaacttcttgtctttttttctcccactgttgtaaataacttttaatggccaaaccccagatttgtactttttttttttttctaactgctaaaaccattctcttccacctggttttactgtaacatttggaaaaggaataaatgtcgtcccttta

SEQ ID NO: 331510 - DNA, 740 bp, Homo sapiens
gagcgcaggaaaagtatgacataatgtgcgtgtctgggcggtcgtgcaagaccggatgccgtgtatagccttcctgtgcccagaaaggaaggggctattgcctcctcccagccacgttccctttcctcctctccctcctgtggattctcccatcagccatctggttctcctcttaaggccagttgaagatggtcccttacagcttcccaagttaggttagtgatgtgaaatgctcctgtccctggccctacctccttccctgtccccacccctgcataaggcagttgttggttttcttccccaattcttttccaagtaggttttgtttaccctactccccaaatccctgagccagaagtggggtgcttatactcccaaaccttgagtgtccagccttcccctgttgtttttagtctcttgtgctgtgcctagtggcacctgggctggggaggacactgccccgtctaggtttttataaatgtcttactcaagttcaaacctccagcctgtgaatcaactgtgtctcttttttgacttggtaagcaagtattaggctttggggtggggggaggtctgtaatgtgaaacaacttcttgtctttttttctcccactgttgtaaataacttttaatggccaaaccccagatttgtactttttttttttttctaactgctaaaaccattctcttccacctggttttactgtaacatttggaaaaggaataaatgtcgtcccttta

SEQ ID NO: 331511 - DNA, 1237 bp, Homo sapiens
gcggagcggagcggcggcgggcgcagctagcgggtcggccgcggagcggaggtgcagctcggcttcccccggcacccctccccctcgggcgccagccccacccctccgccggccgggccgaccccgccgtactatcccctgcggcgcgagcccggggcggctccaagcgccccccagcagacccccatcatgggcagccagagctccaaggctccccggggcgacgtgaccgccgaggaggcagcaggcgcttcccccgcgaaggccaacggccaggagaatggccacgtgaaaagcaatggagacttatcccccaagggtgaaggggagtcgccccctgtgaacggaacagatgaggcagccggggccactggcgatgccatcgagccagcaccccctagccagggtgctgaggccaagggggaggtcccccccaaggagacccccaagaagaagaagaaattctctttcaagaagcctttcaaattgagcggcctgtccttcaagagaaatcggaaggagggtgggggtgattcttctgcctcctcacccacagaggaagagcaggagcagggggagatcggtgcctgcagcgacgagggcactgctcaggaagggaaggccgcagccacccctgagagccaggaaccccaggccaagggggcagaggctagtgcagcctcagaagaagaggcagggccccaggctacagagccatccactccctcggggccggagagtggccctacaccagccagcgctgagcagaatgagtagctaggtaggggcaggtgggtgatctctaagctgcaaaaactgtgctgtccttgtgaggtcactgcctggacctggtgccctggctgccttcctgtgcccagaaaggaaggggctattgcctcctcccagccacgttccctttcctcctctccctcctgtggattctcccatcagccatctggttctcctcttaaggccagttgaagatggtcccttacagcttcccaagttaggttagtgatgtgaaatgctcctgtccctggccctacctccttccctgtccccacccctgcataaggcagttgttggttttcttccccaattcttttccaagtaggttttgtttaccctactccccaaatccgatttgtactttttttttttttctaactgctaaaaccattctcttccacctggttttactgtaacatttggaaaaggaataaatgtcgtcccttta

SEQ ID NO: 331512 - DNA, 703 bp, Homo sapiens
cttcctgcttgtgcccgtcaccaagaccctgcttgtaacctacctgttcttatgaattcgaacagcataggctcgattcagtcacgaccaactcatacacctcctagtgaaaaaacttccataccactcaccaagacccctggcagaagcaggaagcccttacagcttcccaagttaggttagtgatgtgaaatgctcctgtccctggccctacctccttccctgtccccacccctgcataaggcagttgttggttttcttccccaattcttttccaagtaggttttgtttaccctactccccaaatccctgagccagaagtggggtgcttatactcccaaaccttgagtgtccagccttcccctgttgtttttagtctcttgtgctgtgcctagtggcacctgggctggggaggacactgccccgtctaggtttttataaatgtcttactcaagttcaaacctccagcctgtgaatcaactgtgtctcttttttgacttggtaagcaagtattaggctttggggtggggggaggtctgtaatgtgaaacaacttcttgtctttttttctcccactgttgtaaataacttttaatggccaaaccccagatttgtactttttttttttttctaactgctaaaaccattctcttccacctggttttactgtaacatttggaaaaggaataaatgtcgtcccttta

SEQ ID NO: 331513 - DNA, 1097 bp, Homo sapiens
gcggagcggagcggcggcgggcgcagctagcgggtcggccgcggagcggaggtgcagctcggcttcccccggcacccctccccctcgggcgccagccccacccctccgccggccgggccgaccccgccgtactatcccctgcggcgcgagcccggggcggctccaagcgccccccagcagacccccatcatgggcagccagagctccaaggctccccggggcgacgtgaccgccgaggaggcagcaggcgcttcccccgcgaaggccaacggccaggagaatggccacgtgaaaagcaatggagacttatcccccaagggtgaaggggagtcgccccctgtgaacggaacagatgaggcagccggggccactggcgatgccatcgagccagcaccccctagccagggtgctgaggccaagggggaggtcccccccaaggagacccccaagaagaagaagaaattctctttcaagaagcctttcaaattgagcggcctgtccttcaagagaaatcggaaggagggtgggggtgattcttctgcctcctcacccacagaggaagagcaggagcagggggagatcggtgcctgcagcgacgagggcactgctcaggaagggaaggccgcagccacccctgagagccaggaaccccaggccaagggggcagaggctagtgcagcctcagaagaagaggcagggccccaggctacagagccatccactccctcggggccggagagtggccctacaccagccagcgctgagcagaatgagtagctaggtaggggcaggtgggtgatctctaagctgcaaaaactgtgctgtccttgtgaggtcactgcctggacctggtgccctggctgccttcctgtgcccagaaaggaaggggctattgcctcctcccagccacgttccctttcctcctctccctcctgtggattctcccatcagccatctggttctcctcttaaggccagttgaagatggtcccttacagcttcccaagttaggttagtgatgatccacaggagggagaggaggaaagggaacgtggctgggaggaggcaatagccccttcctttctgggcacaggaagg

SEQ ID NO: 331514 - DNA, 1535 bp, Homo sapiens
gcggagcggagcggcggcgggcgcagctagcgggtcggccgcggagcggaggtgcagctcggcttcccccggcacccctccccctcgggcgccagccccacccctccgccggccgggccgaccccgccgtactatcccctgcggcgcgagcccggggcggctccaagcgccccccagcagacccccatcatgggcagccagagctccaaggctccccggggcgacgtgaccgccgaggaggcagcaggcgcttcccccgcgaaggccaacggccaggagaatggccacgtgaaaagcaatggagacttatcccccaagggtgaaggggagtcgccccctgtgaacggaacagatgaggcagccggggccactggcgatgccatcgagccagcaccccctagccagggtgctgaggccaagggggaggtcccccccaaggagacccccaagaagaagaagaaattctctttcaagaagcctttcaaattgagcggcctgtccttcaagagaaatcggaaggagggtgggggtgattcttctgcctcctcacccacagaggaagagcaggagcagggggagatcggtgcctgcagcgacgagggcactgctcaggaagggaaggccgcagccacccctgagagccaggaaccccaggccaagggggcagaggctagtgcagcctcagaagaagaggcagggccccaggctacagagccatccactccctcggggccggagagtggccctacaccagccagcgctgagcagaatgagtagctaggtaggggcaggtgggtgatctctaagctgcaaaaactgtgctgtccttgtgaggtcactgcctggacctggtgccctggctgccttcctgtgcccagaaaggaaggggctattgcctcctcccagccacgttccctttcctcctctccctcctgtggattctcccatcagccatctggttctcctcttaaggccagttgaagatggtcccttacagcttcccaagttaggttagtgatgtgaaatgctcctgtccctggccctacctccttccctgtccccacccctgcataaggcagttgttggttttcttccccaattcttttccaagtaggttttgtttaccctactccccaaatccctgagccagaagtggggtgcttatactcccaaaccttgagtgtccagccttcccctgttgtttttagtctcttgtgctgtgcctagtggcacctgggctggggaggacactgccccgtctaggtttttataaatgtcttactcaagttcaaacctccagcctgtgaatcaactgtgtctcttttttgacttggtaagcaagtattaggctttggggtggggggaggtctgtaatgtgaaacaacttcttgtctttttttctcccactgttgtaaataacttttaatggccaaaccccagatttgtactttttttttttttctaactgctaaaaccattctcttccacctggttttactgtaacatttggaaaaggaataaatgtcgtcccttta

SEQ ID NO: 331515 - DNA, 687 bp, Homo sapiens
gcggagcggagcggcggcgggcgcagctagcgggtcggccgcggagcggaggtgcagctcggcttcccccggcacccctccccctcggggcagcacctccgcggcgcgacccgccgatatcccctgggggccggcggctccagagcgccccaccagcgagaacaccacatccagtgggcaagtccagaagctgccagagggtctccaccaggggccggactgtagacctgcctgaggtgagagcagaaaaggcagctatcccccgcgcgagagggccaacagagccagggaagacatgggcccatcgtcgaacaatcgtcaagtgcggagggactctattcgccgccaagagggcgtggcacaggcggcacgtcagcccacagctggtgcaagcgagacagcaggactcgaaggccaggcacaggagggccacacagtaggcgaatgaccagatcggaaggcccaggcagtctcccttagcccaggggttgctagacgggcccaacggcgggcaggttcccccccacaaagggtagaacgccccgaaggaaagaagaccgcgaaaattgccctttgcaagaaagccttttccaaacacttgaggcgcgcctgttcctttcagggaggacactcgcgaaggaagcgctgcgggggctggatactatacatggcgcttcggttaacaca

SEQ ID NO: 331516 - DNA, 1434 bp, Homo sapiens
cggcgcgtgcccggggcggttccacgctgccccccgagcgagacccccgatcgatgcctcagctgatgctcgatggctctccgtggcgacttgagctgtcgatggaggcggtcagcgcgccgttccctctcgtcgcatatgcgctcgatggcgctcagtgagaagttggccatggtttgagtgtgcgcttggtgaggagctcagtcgcggcatagggatgtaccgggagtcgccccctgtgaacggaacagatgaggcagccggggccactggcgatgccatcgagccagcaccccctagccagggtgctgaggccaagggggaggtcccccccaaggagacccccaagaagaagaagaaattctctttcaagaagcctttcaaattgagcggcctgtccttcaagagaaatcggaaggagggtgggggtgattcttctgcctcctcacccacagaggaagagcaggagcagggggagatcggtgcctgcagcgacgagggcactgctcaggaagggaaggccgcagccacccctgagagccaggaaccccaggccaagggggcagaggctagtgcagcctcagaagaagaggcagggccccaggctacagagccatccactccctcggggccggagagtggccctacaccagccagcgctgagcagaatgagtagctaggtaggggcaggtgggtgatctctaagctgcaaaaactgtgctgtccttgtgaggtcactgcctggacctggtgccctggctgccttcctgtgcccagaaaggaaggggctattgcctcctcccagccacgttccctttcctcctctccctcctgtggattctcccatcagccatctggttctcctcttaaggccagttgaagatggtcccttacagcttcccaagttaggttagtgatgtgaaatgctcctgtccctggccctacctccttccctgtccccacccctgcataaggcagttgttggttttcttccccaattcttttccaagtaggttttgtttaccctactccccaaatccctgagccagaagtggggtgcttatactcccaaaccttgagtgtccagccttcccctgttgtttttagtctcttgtgctgtgcctagtggcacctgggctggggaggacactgccccgtctaggtttttataaatgtcttactcaagttcaaacctccagcctgtgaatcaactgtgtctcttttttgacttggtaagcaagtattaggctttggggtggggggaggtctgtaatgtgaaacaacttcttgtctttttttctcccactgttgtaaataacttttaatggccaaaccccagatttgtactttttttttttttctaactgctaaaaccattctcttccacctggttttactgtaacatttggaaaaggaataaatgtcgtcccttta

SEQ ID NO: 331517 - DNA, 890 bp, Homo sapiens
acagaggaggtggacagcacagaggaggtggacagcacagaggaggtggacagctggacagcacagaggaggtggacagctggacagcacagaggaggtggacagctggacagcacagaggaggtggacagcaaggggtggggcaggtgggtgatctctaagctgcaaaaactgtgctgtccttgtgaggtcactgcctggacctggtgccctggctgccttcctgtgcccagaaaggaaggggctattgcctcctcccagccacgttccctttcctcctctccctcctgtggattctcccatcagccatctggttctcctcttaaggccagttgaagatggtcccttacagcttcccaagttaggttagtgatgtgaaatgctcctgtccctggccctacctccttccctgtccccacccctgcataaggcagttgttggttttcttccccaattcttttccaagtaggttttgtttaccctactccccaaatccctgagccagaagtggggtgcttatactcccaaaccttgagtgtccagccttcccctgttgtttttagtctcttgtgctgtgcctagtggcacctgggctggggaggacactgccccgtctaggtttttataaatgtcttactcaagttcaaacctccagcctgtgaatcaactgtgtctcttttttgacttggtaagcaagtattaggctttggggtggggggaggtctgtaatgtgaaacaacttcttgtctttttttctcccactgttgtaaataacttttaatggccaaaccccagatttgtactttttttttttttctaactgctaaaaccattctcttccacctggttttactgtaacatttggaaaaggaataaatgtcgtcccttta

SEQ ID NO: 331518 - DNA, 1170 bp, Homo sapiens
gcggagcggagcggcggcgggcgcagctagcgggtcggccgcggagcggaggtgcagctcggcttcccccggcacccctccccctcgggcgccagccccacccctccgccggccgggccgaccccgccgtactatcccctgcggcgcgagcccggggcggctccaagcgccccccagcagacccccatcatgggcagccagagctccaaggctccccggggcgacgtgaccgccgaggaggcagcaggcgcttcccccgcgaaggccaacggccaggagaatggccacgtgaaaagcaatggagacttatcccccaagggtgaaggggagtcgccccctgtgaacggaacagatgaggcagccggggccactggcgatgccatcgagccagcaccccctagccagggtgctgaggccaagggggaggtcccccccaaggagacccccaagaagaagaagaaattctctttcaagaagcctttcaaattgagcggcctgtccttcaagagaaatcggaaggagggtgggggtgattcttctgcctcctcacccacagaggaagagcaggagcagggggagatcggtgcctgcagcgacgagggcactgctcaggaagggaaggccgcagccacccctgagagccaggaaccccaggccaagggggcagaggctagtgcagcctcagaagaagaggcagggccccaggctacagagccatccactccctcggggccggagagtggccctacaccagccagcgctgagcagaatgagtagctaggtaggggcaggtgggtgatctctaagctgcaaaaactgtgctgtccttgtgaggtcactgcctggacctggtgccctggctgccttcctgtgcccagaaaggaaggggctattgcctcctcccagccacgttccctttcctcctctccctcctgtggattctcccatcagccatctggttctcctcttaaggccagttgaagatggtcccttacagcttcccaagttaggttagtgatgtgaaatgctcctgtccctggccctacctccttccctgtccccacccctgcataaggcagttgttggttttcttccccaattcttttccaagtaggttttgtttaccctactccccaaatccagatatgggagacatcaaggagatcaact

SEQ ID NO: 331519 - DNA, 488 bp, Homo sapiens
gggtttcaccgtgttagccagggtggtctcgatctcctgacctcatgatccgcccgcctcggcctcccaaagtgctgggattacaggcgtgagccaccgcgcccggcccagaaatgtcttttatagatggctttaaaaaatccaggacccatgcaaggttcccataaggtatttaaacttttaaaatatttatactgaatagatgcacaggtcctataatgctaacaagaggcaaaagacaaggaaagatttctctcacaattctactaccacagtttcaaaccaatttctttttcatctctctgttctttaaaaatgaagctttggacagattttctttagttcactttcctaaccatccatgagacaaaaaaagaacactgatcaagactgtggtgctgtttgactgcataagcacaaattgtggtctttgaaagttcttgctgagagatttggagttttattaagaataccaggaagccagcggc

SEQ ID NO: 331520 - DNA, 460 bp, Homo sapiens
gactgattccacaggtgggtagggagcatctgttgccagaaagcaagaaagcacttaaagaatgatgtggacatgtcaaagggacacagaagccagcctggatgagatcccactggccctaactgtccacaaggacaatttgagcaaggatgtcaacaatttaagagcagattataaaccactgaataaaacagaaaaatacaaagaattgaaacggacattgatggcagacaggatattaacataattttaaagtatctctccaaggaatgcttctgaatgatgaaggggaaaagaataactgtacagtggaaaagcctggtaaaacccaccttagtgaccaaagtgaatgtcaccatagtgggacaaaaggaaatcaagtgccaccttatgggattcaacgaggacgcagcatcccttgggtgatgttccagccaaatacacgtgcccggtggaatca

SEQ ID NO: 331521 - DNA, 284 bp, Homo sapiens
gcggccgcctactactactactgctcgaattcaagcttctaacgatgtacggggacatgtgaagttatactgtggctatgcaacagctctcacctacgcgagtcttactttgagttagtgccataacagaccactgtatgtttacttctcaccatttgagttgcccatcttgtttcacactagtcacattcttgttttaagtgcctttagttttaacagttcactttttacagtgctatttactgaagttatttattaaatatgcctaaaatacttaaatcgga

SEQ ID NO: 331522 - DNA, 3300 bp, Homo sapiens
  misc_feature (11)..(11): n is a, c, g, or t
ggacctgatcnagtttcaagtttttgctggtgtggtttggctccaaaacagaaatgaaaatagatgtttaaaagcaaatgccaaatcatgtggagaatgtatacaagcagggccaaattgtgggtggtgcacaaattcaacatttttacaggaaggaatgcctacttctgcacgatgtgatgatttagaagccttaaaaaagaagggttgccctccagatgacatagaaaatcccagaggctccaaagatataaagaaaaataaaaatgtaaccaaccgtagcaaaggaacagcagagaagctcaagccagaggatattactcagatccaaccacagcagttggttttgcgattaagatcaggggagccacagacatttacattaaaattcaagagagctgaagactatcccattgacctctactaccttatggacctgtcttactcaatgaaagacgatttggagaatgtaaaaagtcttggaacagatctgatgaatgaaatgaggaggattacttcggacttcagaattggatttggctcatttgtggaaaagactgtgatgccttacattagcacaacaccagctaagctcaggaacccttgcacaagtgaacagaactgcaccagcccatttagctacaaaaatgtgctcagtcttactaataaaggagaagtatttaatgaacttgtccagaaactgagtgaaaataatattcagacaatttttgcagttactgaagaatttcagcctgtttacaaggagctgaaaaacttgatccctaagtcagcagtaggaacattatctgcaaattctagcaatgtaattcagttgatcattgatgcatacaattccctttcctcagaagtcattttggaaaacggcaaattgtcagaaggagtaacaataagttacaaatcttactgcaagaacggggtgaatggaacaggggaaaatggaagaaaatgttccaatatttccattggagatgaggttcaatttgaaattagcataacttcaaataagtgtccaaaaaaggattctgacagctttaaaattaggcctctgggctttacggaggaagtagaggttattcttcagtacatctgtgaatgtgaatgccaaagcgaaggcatccctgaaagtcccaagtgtcatgaaggaaatgggacatttgagtgtggcgcgtgcaggtgcaatgaagggcgtgttggtagacattgtgaatgcagcacagatgaagttaacagtgaagacatggatgcttactgcaggaaagaaaacagttcagaaatctgcagtaacaatggagagtgcgtctgcggacagtgtgtttgtaggaagagggataatacaaatgaaatttattctggcaaattctgcgagtgtgataatttcaactgtgatagatccaatggcttaatttgtggaggaaatggtgtttgcaagtgtcgtgtgtgtgagtgcaaccccaactacactggcagtgcatgtgactgttctttggatactagtacttgtgaagccagcaacggacagatctgcaatggccggggcatctgcgagtgtggtgtctgtaagtgtacagatccgaagtttcaagggcaaacgtgtgagatgtgtcagacctgccttggtgtctgtgctgagcataaagaatgtgttcagtgcagagccttcaataaaggagaaaagaaagacacatgcacacaggaatgttcctattttaacattaccaaggtagaaagtcgggacaaattaccccagccggtccaacctgatcctgtgtcccattgtaaggagaaggatgttgacgactgttggttctattttacgtattcagtgaatgggaacaacgaggtcatggttcatgttgtggagaatccagagtgtcccactggtccagacatcattccaattgtagctggtgtggttgctggaattgttcttattggccttgcattactgctgatatggaagcttttaatgataattcatgacagaagggagtttgctaaatttgaaaaggagaaaatgaatgccaaatgggacacgggtgaaaatcctatttataagagtgccgtaacaactgtggtcaatccgaagtatgagggaaaatgagtactgcccgtgcaaatcccacaacactgaatgcaaagtagcaatttccatagtcacagttaggtagctttagggcaatattgccatggttttactcatgtgcaggttttgaaaatgtacaatatgtataatttttaaaatgttttattattttgaaaataatgttgtaattcatgccagggactgacaaaagacttgagacaggatggttattcttgtcagctaaggtcacattgtgcctttttgaccttttcttcctggactattgaaatcaagcttattggattaagtgatatttctatagcgattgaaagggcaatagttaaagtaatgagcatgatgagagtttctgttaatcatgtattaaaactgatttttagctttacaaatatgtcagtttgcagttatgcagaatccaaagtaaatgtcctgctagctagttaaggattgttttaaatctgttattttgctatttgcctgttagacatgactgatgacatatctgaaagacaagtatgttgagagttgctggtgtaaaatacgtttgaaatagttgatctacaaaggccatgggaaaaattcagagagttaggaaggaaaaaccaatagctttaaaacctgtgtgccattttaagagttacttaatgtttggtaacttttatgccttcactttacaaattcaagccttagataaaagaaccgagcaattttctgctaaaaagtccttgatttagcactatttacatacaggccatactttacaaagtatttgctgaatggggaccttttgagttgaatttattttattatttttattttgtttaatgtctggtgctttctatcacctcttctaatcttttaatgtatttgtttgcaattttggggtaagactttttttatgagtactttttctttgaagttttagcggtcaatttgcctttttaatgaacatgtgaagttatactgtggctatgcaacagctctcacctacgcgagtcttactttgagttagtgccataacagaccactgtatgtttacttctcaccatttgagttgcccatcttgtttcacactagtcacattcttgttttaagtgcctttagttttaacagttcactttttacagtgctatttactgaagttatttattaaatatgcctaaaatacttaaatcgga

SEQ ID NO: 331523 - DNA, 3507 bp, Homo sapiens
  misc_feature (11)..(11): n is a, c, g, or t
ggacctgatcnagtttcaagtttttgctggtgtggtttggctccaaaacagaaatgaaaatagatgtttaaaagcaaatgccaaatcatgtggagaatgtatacaagcagggccaaattgtgggtggtgcacaaattcaacatttttacaggaaggaatgcctacttctgcacgatgtgatgatttagaagccttaaaaaagaagggttgccctccagatgacatagaaaatcccagaggctccaaagatataaagaaaaataaaaatgtaaccaaccgtagcaaaggaacagcagagaagctcaagccagaggatattactcagatccaaccacagcagttggttttgcgattaagatcaggggagccacagacatttacattaaaattcaagagagctgaagactatcccattgacctctactaccttatggacctgtcttactcaatgaaagacgatttggagaatgtaaaaagtcttggaacagatctgatgaatgaaatgaggaggattacttcggacttcagaattggatttggctcatttgtggaaaagactgtgatgccttacattagcacaacaccagctaagctcaggaacccttgcacaagtgaacagaactgcaccagcccatttagctacaaaaatgtgctcagtcttactaataaaggagaagtatttaatgaacttgttggaaaacagcgcatatctggaaatttggattctccagaaggtggtttcgatgccatcatgcaagttgcagtttgtggatcactgattggctggaggaatgttacacggctgctggtgttttccacagatgccgggtttcactttgctggagatgggaaacttggtggcattgttttaccaaatgatggacaatgtcacctggaaaataatatgtacacaatgagccattattatgattatccttctattgctcaccttgtccagaaactgagtgaaaataatattcagacaatttttgcagttactgaagaatttcagcctgtttacaaggagctgaaaaacttgatccctaagtcagcagtaggaacattatctgcaaattctagcaatgtaattcagttgatcattgatgcatacaattccctttcctcagaagtcattttggaaaacggcaaattgtcagaaggagtaacaataagttacaaatcttactgcaagaacggggtgaatggaacaggggaaaatggaagaaaatgttccaatatttccattggagatgaggttcaatttgaaattagcataacttcaaataagtgtccaaaaaaggattctgacagctttaaaattaggcctctgggctttacggaggaagtagaggttattcttcagtacatctgtgaatgtgaatgccaaagcgaaggcatccctgaaagtcccaagtgtcatgaaggaaatgggacatttgagtgtggcgcgtgcaggtgcaatgaagggcgtgttggtagacattgtgaatgcagcacagatgaagttaacagtgaagacatggatgcttactgcaggaaagaaaacagttcagaaatctgcagtaacaatggagagtgcgtctgcggacagtgtgtttgtaggaagagggataatacaaatgaaatttattctggcaaattctgcgagtgtgataatttcaactgtgatagatccaatggcttaatttgtggaggaaatggtgtttgcaagtgtcgtgtgtgtgagtgcaaccccaactacactggcagtgcatgtgactgttctttggatactagtacttgtgaagccagcaacggacagatctgcaatggccggggcatctgcgagtgtggtgtctgtaagtgtacagatccgaagtttcaagggcaaacgtgtgagatgtgtcagacctgccttggtgtctgtgctgagcataaagaatgtgttcagtgcagagccttcaataaaggagaaagtcgggacaaattaccccagccggtccaacctgatcctgtgtcccattgtaaggagaaggatgttgacgactgttggttctattttacgtattcagtgaatgggaacaacgaggtcatggttcatgttgtggagaatccagagtgtcccactggtccagacatcattccaattgtagctggtgtggttgctggaattgttcttattggccttgcattactgctgatatggaagcttttaatgataattcatgacagaagggagtttgctaaatttgaaaaggagaaaatgaatgccaaatgggacacgggtgaaaatcctatttataagagtgccgtaacaactgtggtcaatccgaagtatgagggaaaatgagtactgcccgtgcaaatcccacaacactgaatgcaaagtagcaatttccatagtcacagttaggtagctttagggcaatattgccatggttttactcatgtgcaggttttgaaaatgtacaatatgtataatttttaaaatgttttattattttgaaaataatgttgtaattcatgccagggactgacaaaagacttgagacaggatggttattcttgtcagctaaggtcacattgtgcctttttgaccttttcttcctggactattgaaatcaagcttattggattaagtgatatttctatagcgattgaaagggcaatagttaaagtaatgagcatgatgagagtttctgttaatcatgtattaaaactgatttttagctttacaaatatgtcagtttgcagttatgcagaatccaaagtaaatgtcctgctagctagttaaggattgttttaaatctgttattttgctatttgcctgttagacatgactgatgacatatctgaaagacaagtatgttgagagttgctggtgtaaaatacgtttgaaatagttgatctacaaaggccatgggaaaaattcagagagttaggaaggaaaaaccaatagctttaaaacctgtgtgccattttaagagttacttaatgtttggtaacttttatgccttcactttacaaattcaagccttagataaaagaaccgagcaattttctgctaaaaagtccttgatttagcactatttacatacaggccatactttacaaagtatttgctgaatggggaccttttgagttgaatttattttattatttttattttgtttaatgtctggtgctttctatcacctcttctaatcttttaatgtatttgtttgcaattttggggtaagactttttttatgagtactttttctttgaagttttagcggtcaatttgcctttttaatgaacatgtgaagttatactgtggctatgcaacagctctcacctacgcgagtcttactttgagttagtgccataacagaccactgtatgtttacttctcaccatttgagttgcccatcttgtttcacactagtcacattcttgttttaagtgcctttagttttaacagttcactttttacagtgctatttactgaagttatttattaaatatgcctaaaatacttaaatcgga

SEQ ID NO: 331524 - DNA, 2813 bp, Homo sapiens
  misc_feature (11)..(11): n is a, c, g, or t
ggacctgatcnagtttcaagtttttgctggtgtggtttggctccaaaacagaaatgaaaatagatgtttaaaagcaaatgccaaatcatgtggagaatgtatacaagcagggccaaattgtgggtggtgcacaaattcaacatttttacaggaaggaatgcctacttctgcacgatgtgatgatttagaagccttaaaaaagaagggttgccctccagatgacatagaaaatcccagaggctccaaagatataaagaaaaataaaaatgtaaccaaccgtagcaaaggaacagcagagaagctcaagccagaggatattactcagatccaaccacagcagttggttttgcgattaagatcaggggagccacagacatttacattaaaattcaagagagctgaagactatcccattgacctctactaccttatggacctgtcttactcaatgaaagacgatttggagaatgtaaaaagtcttggaacagatctgatgaatgaaatgaggttcaatttgaaattagcataacttcaaataagtgtccaaaaaaggattctgacagctttaaaattaggcctctgggctttacggaggaagtagaggttattcttcagtacatctgtgaatgtgaatgccaaagcgaaggcatccctgaaagtcccaagtgtcatgaaggaaatgggacatttgagtgtggcgcgtgcaggtgcaatgaagggcgtgttggtagacattgtgaatgcagcacagatgaagttaacagtgaagacatggatgcttactgcaggaaagaaaacagttcagaaatctgcagtaacaatggagagtgcgtctgcggacagtgtgtttgtaggaagagggataatacaaatgaaatttattctggcaaattctgcgagtgtgataatttcaactgtgatagatccaatggcttaatttgtggaggaaatggtgtttgcaagtgtcgtgtgtgtgagtgcaaccccaactacactggcagtgcatgtgactgttctttggatactagtacttgtgaagccagcaacggacagatctgcaatggccggggcatctgcgagtgtggtgtctgtaagtgtacagatccgaagtttcaagggcaaacgtgtgagatgtgtcagacctgccttggtgtctgtgctgagcataaagaatgtgttcagtgcagagccttcaataaaggagaaaagaaagacacatgcacacaggaatgttcctattttaacattaccaaggtagaaagtcgggacaaattaccccagccggtccaacctgatcctgtgtcccattgtaaggagaaggatgttgacgactgttggttctattttacgtattcagtgaatgggaacaacgaggtcatggttcatgttgtggagaatccagagtgtcccactggtccagacatcattccaattgtagctggtgtggttgctggaattgttcttattggccttgcattactgctgatatggaagcttttaatgataattcatgacagaagggagtttgctaaatttgaaaaggagaaaatgaatgccaaatgggacacgggtgaaaatcctatttataagagtgccgtaacaactgtggtcaatccgaagtatgagggaaaatgagtactgcccgtgcaaatcccacaacactgaatgcaaagtagcaatttccatagtcacagttaggtagctttagggcaatattgccatggttttactcatgtgcaggttttgaaaatgtacaatatgtataatttttaaaatgttttattattttgaaaataatgttgtaattcatgccagggactgacaaaagacttgagacaggatggttattcttgtcagctaaggtcacattgtgcctttttgaccttttcttcctggactattgaaatcaagcttattggattaagtgatatttctatagcgattgaaagggcaatagttaaagtaatgagcatgatgagagtttctgttaatcatgtattaaaactgatttttagctttacaaatatgtcagtttgcagttatgcagaatccaaagtaaatgtcctgctagctagttaaggattgttttaaatctgttattttgctatttgcctgttagacatgactgatgacatatctgaaagacaagtatgttgagagttgctggtgtaaaatacgtttgaaatagttgatctacaaaggccatgggaaaaattcagagagttaggaaggaaaaaccaatagctttaaaacctgtgtgccattttaagagttacttaatgtttggtaacttttatgccttcactttacaaattcaagccttagataaaagaaccgagcaattttctgctaaaaagtccttgatttagcactatttacatacaggccatactttacaaagtatttgctgaatggggaccttttgagttgaatttattttattatttttattttgtttaatgtctggtgctttctatcacctcttctaatcttttaatgtatttgtttgcaattttggggtaagactttttttatgagtactttttctttgaagttttagcggtcaatttgcctttttaatgaacatgtgaagttatactgtggctatgcaacagctctcacctacgcgagtcttactttgagttagtgccataacagaccactgtatgtttacttctcaccatttgagttgcccatcttgtttcacactagtcacattcttgttttaagtgcctttagttttaacagttcactttttacagtgctatttactgaagttatttattaaatatgcctaaaatacttaaatcgga

SEQ ID NO: 331525 - DNA, 4865 bp, Homo sapiens
  misc_feature (11)..(11): n is a, c, g, or t
  misc_feature (2541)..(2542): n is a, c, g, or t
  misc_feature (2550)..(2551): n is a, c, g, or t
  misc_feature (2570)..(2571): n is a, c, g, or t
  misc_feature (2708)..(2708): n is a, c, g, or t
  misc_feature (2909)..(2909): n is a, c, g, or t
ggacctgatcnagtttcaagtttttgctggtgtggtttggctccaaaacagaaatgaaaatagatgtttaaaagcaaatgccaaatcatgtggagaatgtatacaagcagggccaaattgtgggtggtgcacaaattcaacatttttacaggaaggaatgcctacttctgcacgatgtgatgatttagaagccttaaaaaagaagggttgccctccagatgacatagaaaatcccagaggctccaaagatataaagaaaaataaaaatgtaaccaaccgtagcaaaggaacagcagagaagctcaagccagaggatattactcagatccaaccacagcagttggttttgcgattaagatcaggggagccacagacatttacattaaaattcaagagagctgaagactatcccattgacctctactaccttatggacctgtcttactcaatgaaagacgatttggagaatgtaaaaagtcttggaacagatctgatgaatgaaatgaggaggattacttcggacttcagaattggatttggctcatttgtggaaaagactgtgatgccttacattagcacaacaccagctaagctcaggaacccttgcacaagtgaacagaactgcaccagcccatttagctacaaaaatgtgctcagtcttactaataaaggagaagtatttaatgaacttgttggaaaacagcgcatatctggaaatttggattctccagaaggtggtttcgatgccatcatgcaagttgcagtttgtggatcactgattggctggaggaatgttacacggctgctggtgttttccacagatgccgggtttcactttgctggagatgggaaacttggtggcattgttttaccaaatgatggacaatgtcacctggaaaataatatgtacacaatgagccattattatgattatccttctattgctcaccttgtccagaaactgagtgaaaataatattcagacaatttttgcagttactgaagaatttcagcctgtttacaaggagctgaaaaacttgatccctaagtcagcagtaggaacattatctgcaaattctagcaatgtaattcagttgatcattgatgcatacaattccctttcctcagaagtcattttggaaaacggcaaattgtcagaaggagtaacaataagttacaaatcttactgcaagaacggggtgaatggaacaggggaaaatggaagaaaatgttccaatatttccattggagatgaggttcaatttgaaattagcataacttcaaataagtgtccaaaaaaggattctgacagctttaaaattaggcctctgggctttacggaggaagtagaggttattcttcagtacatctgtgaatgtgaatgccaaagcgaaggcatccctgaaagtcccaagtgtcatgaaggaaatgggacatttgagtgtggcgcgtgcaggtgcaatgaagggcgtgttggtagacattgtgaatgcagcacagatgaagttaacagtgaagacatggatgcttactgcaggaaagaaaacagttcagaaatctgcagtaacaatggagagtgcgtctgcggacagtgtgtttgtaggaagagggataatacaaatgaaatttattctggcaaattctgcgagtgtgataatttcaactgtgatagatccaatggcttaatttgtggaggaaatggtgtttgcaagtgtcgtgtgtgtgagtgcaaccccaactacactggcagtgcatgtgactgttctttggatactagtacttgtgaagccagcaacggacagatctgcaatggccggggcatctgcgagtgtggtgtctgtaagtgtacagatccgaagtttcaagggcaaacgtgtgagatgtgtcagacctgccttggtgtctgtgctgagcataaagaatgtgttcagtgcagagccttcaataaaggagaaaagaaagacacatgcacacaggaatgttcctattttaacattaccaaggtagaaagtcgggacaaattaccccagccggtccaacctgatcctgtgtcccattgtaaggagaaggatgttgacgactgttggttctattttacgtattcagtgaatgggaacaacgaggtcatggttcatgttgtggagaatccagagtgtcccactggtccagacatcattccaattgtagctggtgtggttgctggaattgttcttattggccttgcattactgctgatatggaagcttttaatgataattcatgacagaagggagtttgctaaatttgaaaaggagaaaatgaatgccaaatgggacacggtaagttacaaaacatccaaaaagcaaagtggcttataaagtaaatgtaatactcctaagacttatgtattagctgtcaggctgattattaaagtcctttctaagtattttattcccccaaaagtttcttactcaaggaatttgcatttagtgaaaaacagaaagcatcctaaatatatcccattgaaacaaaacattgattataagcatgtatattctggttnntgtggccnntatttttatttctttaatnnttttgatcctaaatctgccttttcatctaatgtgaagtagaatcctaaataatgttatctgtgtagcaagctattcaatggaaagctgcttctttctttaaaacaaacaaacaaaaaaaaccttcagtgaaagccanattcaaaaggttatataccaagcttgtccaactcgcagctcgtcggccaggacatgcagcccagaatagctttgaatgtggccccaacacaaatttgtaaactttcttagaaattgtaattattattattatttttttttggtaactttttttaaagctcatcagctatcgttagtgtattttatgtgtggcccaagacanttcttcttcttccagtgtggcccagggaagccaaaagattggacacccctgctatatactatatgattccatttagaggacattctggaaaagcaaaactgtaggggcaaaaatcagtggttgctaggggctggaatgggggaaagtgttgaccacagaggggcgtaagggatcttccttgggatgatcttgattgtgggtggatttatgtatttgaaaactcacagaactatgtactttaaaaagatgtatgttcctctatgaaaattatatctcagtaaactttggcttataaaaatcttaaaagccctaagtgaccgaaaggttatgttagcattgagtgctttgaaatatggagtcagagggtggggtaaccaaatgttggcctttgtgtattcatcttttgatacaagaaagcaatgccaatcttcagtatttttaaattgtaaatgaattttgtagttagttgcactttactacaatttgcttgggtttttaaaaattatcaattttttaaattacaaatttcagaagggtagaaataaaaaaaaagacatttatagtgttcaaacactataaagggattttttttttctgatgaaatcattagaaactatttcttttactttagcaagaaaatccgatttacaagagtcctattaataatttcaagaatccaaactacggacgtaaagctggtctctaaattgccggtgaaaatcctatttataagagtgccgtaacaactgtggtcaatccgaagtatgagggaaaatgagtactgcccgtgcaaatcccacaacactgaatgcaaagtagcaatttccatagtcacagttaggtagctttagggcaatattgccatggttttactcatgtgcaggttttgaaaatgtacaatatgtataatttttaaaatgttttattattttgaaaataatgttgtaattcatgccagggactgacaaaagacttgagacaggatggttattcttgtcagctaaggtcacattgtgcctttttgaccttttcttcctggactattgaaatcaagcttattggattaagtgatatttctatagcgattgaaagggcaatagttaaagtaatgagcatgatgagagtttctgttaatcatgtattaaaactgatttttagctttacaaatatgtcagtttgcagttatgcagaatccaaagtaaatgtcctgctagctagttaaggattgttttaaatctgttattttgctatttgcctgttagacatgactgatgacatatctgaaagacaagtatgttgagagttgctggtgtaaaatacgtttgaaatagttgatctacaaaggccatgggaaaaattcagagagttaggaaggaaaaaccaatagctttaaaacctgtgtgccattttaagagttacttaatgtttggtaacttttatgccttcactttacaaattcaagccttagataaaagaaccgagcaattttctgctaaaaagtccttgatttagcactatttacatacaggccatactttacaaagtatttgctgaatggggaccttttgagttgaatttattttattatttttattttgtttaatgtctggtgctttctatcacctcttctaatcttttaatgtatttgtttgcaattttggggtaagactttttttatgagtactttttctttgaagttttagcggtcaatttgcctttttaatgaacatgtgaagttatactgtggctatgcaacagctctcacctacgcgagtcttactttgagttagtgccataacagaccactgtatgtttacttctcaccatttgagttgcccatcttgtttcacactagtcacattcttgttttaagtgcctttagttttaacagttcactttttacagtgctatttactgaagttatttattaaatatgcctaaaatacttaaatcgga

SEQ ID NO: 331526 - DNA, 3258 bp, Homo sapiens
  misc_feature (11)..(11): n is a, c, g, or t
ggacctgatcnagtttcaagtttttgctggtgtggtttggctccaaaacagaaatgaaaatagatgtttaaaagcaaatgccaaatcatgtggagaatgtatacaagcagggccaaattgtgggtggtgcacaaattcaacatttttacaggaaggaatgcctacttctgcacgatgtgatgatttagaagccttaaaaaagaagggttgccctccagatgacatagaaaatcccagaggctccaaagatataaagaaaaataaaaatgtaaccaaccgtagcaaaggaacagcagagaagctcaagccagaggatattactcagatccaaccacagcagttggttttgcgattaagatcaggggagccacagacatttacattaaaattcaagagagctgaagactatcccattgacctctactaccttatggacctgtcttactcaatgaaagacgatttggagaatgtaaaaagtcttggaacagatctgatgaatgaaatgaggaggattacttcggacttcagaattggatttggctcatttgtggaaaagactgtgatgccttacattagcacaacaccagctaagctcaggaacccttgcacaagtgaacagaactgcaccagcccatttagctacaaaaatgtgctcagtcttactaataaaggagaagtatttaatgaacttgttggaaaacagcgcatatctggaaatttggattctccagaaggtggtttcgatgccatcatgcaagttgcagtttgtggatcactgattggctggaggaatgttacacggctgctggtgttttccacagatgccgggtttcactttgctggagatgggaaacttggtggcattgttttaccaaatgatggacaatgtcacctggaaaataatatgtacacaatgagccattattatgattatccttctattgctcaccttgtccagaaactgagtgaaaataatattcagacaatttttgcagttactgaagaatttcagcctgtttacaaggagctgaaaaacttgatccctaagtcagcagtaggaacattatctgcaaattctagcaatgtaattcagttgatcattgatgcatacaattccctttcctcagaagtcattttggaaaacggcaaattgtcagaaggagtaacaataagttacaaatcttactgcaagaacggggtgaatggaacaggggaaaatggaagaaaatgttccaatatttccattggagatgaggttcaatttgaaattagcataacttcaaataagtgtccaaaaaaggattctgacagctttaaaattaggcctctgggctttacggaggaagtagaggttattcttcagtacatctgtgaatgtgaatgccaaagcgaaggcatccctgaaagtcccaagtgtcatgaaggaaatgggacatttgagtgtggcgcgtgcaggtgcaatgaagggcgtgttggtagacattgtgaatgcagcacagatgaagttaacagtgaagacatggatgcttactgcaggaaagaaaacagttcagaaatctgcagtaacaatggagagtgcgtctgcggacagtgtgtttgtaggaagagggataaagaatgtgttcagtgcagagccttcaataaaggagaaaagaaagacacatgcacacaggaatgttcctattttaacattaccaaggtagaaagtcgggacaaattaccccagccggtccaacctgatcctgtgtcccattgtaaggagaaggatgttgacgactgttggttctattttacgtattcagtgaatgggaacaacgaggtcatggttcatgttgtggagaatccagagtgtcccactggtccagacatcattccaattgtagctggtgtggttgctggaattgttcttattggccttgcattactgctgatatggaagcttttaatgataattcatgacagaagggagtttgctaaatttgaaaaggagaaaatgaatgccaaatgggacacgggtgaaaatcctatttataagagtgccgtaacaactgtggtcaatccgaagtatgagggaaaatgagtactgcccgtgcaaatcccacaacactgaatgcaaagtagcaatttccatagtcacagttaggtagctttagggcaatattgccatggttttactcatgtgcaggttttgaaaatgtacaatatgtataatttttaaaatgttttattattttgaaaataatgttgtaattcatgccagggactgacaaaagacttgagacaggatggttattcttgtcagctaaggtcacattgtgcctttttgaccttttcttcctggactattgaaatcaagcttattggattaagtgatatttctatagcgattgaaagggcaatagttaaagtaatgagcatgatgagagtttctgttaatcatgtattaaaactgatttttagctttacaaatatgtcagtttgcagttatgcagaatccaaagtaaatgtcctgctagctagttaaggattgttttaaatctgttattttgctatttgcctgttagacatgactgatgacatatctgaaagacaagtatgttgagagttgctggtgtaaaatacgtttgaaatagttgatctacaaaggccatgggaaaaattcagagagttaggaaggaaaaaccaatagctttaaaacctgtgtgccattttaagagttacttaatgtttggtaacttttatgccttcactttacaaattcaagccttagataaaagaaccgagcaattttctgctaaaaagtccttgatttagcactatttacatacaggccatactttacaaagtatttgctgaatggggaccttttgagttgaatttattttattatttttattttgtttaatgtctggtgctttctatcacctcttctaatcttttaatgtatttgtttgcaattttggggtaagactttttttatgagtactttttctttgaagttttagcggtcaatttgcctttttaatgaacatgtgaagttatactgtggctatgcaacagctctcacctacgcgagtcttactttgagttagtgccataacagaccactgtatgtttacttctcaccatttgagttgcccatcttgtttcacactagtcacattcttgttttaagtgcctttagttttaacagttcactttttacagtgctatttactgaagttatttattaaatatgcctaaaatacttaaatcgga

SEQ ID NO: 331527 - DNA, 3659 bp, Homo sapiens
  misc_feature (11)..(11): n is a, c, g, or t
ggacctgatcnagtttcaagtttttgctggtgtggtttggctccaaaacagaaatgaaaatagatgtttaaaagcaaatgccaaatcatgtggagaatgtatacaagcagggccaaattgtgggtggtgcacaaattcaacatttttacaggaaggaatgcctacttctgcacgatgtgatgatttagaagccttaaaaaagaagggttgccctccagatgacatagaaaatcccagaggctccaaagatataaagaaaaataaaaatgtaaccaaccgtagcaaaggaacagcagagaagctcaagccagaggatattactcagatccaaccacagcagttggttttgcgattaagatcaggggagccacagacatttacattaaaattcaagagagctgaagactatcccattgacctctactaccttatggacctgtcttactcaatgaaagacgatttggagaatgtaaaaagtcttggaacagatctgatgaatgaaatgaggaggattacttcggacttcagaattggatttggctcatttgtggaaaagactgtgatgccttacattagcacaacaccagctaagctcaggaacccttgcacaagtgaacagaactgcaccagcccatttagctacaaaaatgtgctcagtcttactaataaaggagaagtatttaatgaacttgttggaaaacagcgcatatctggaaatttggattctccagaaggtggtttcgatgccatcatgcaagttgcagtttgtggatcactgattggctggaggaatgttacacggctgctggtgttttccacagatgccgggtttcactttgctggagatgggaaacttggtggcattgttttaccaaatgatggacaatgtcacctggaaaataatatgtacacaatgagccattattatgattatccttctattgctcaccttgtccagaaactgagtgaaaataatattcagacaatttttgcagttactgaagaatttcagcctgtttacaaggagctgaaaaacttgatccctaagtcagcagtaggaacattatctgcaaattctagcaatgtaattcagttgatcattgatgcatacaattccctttcctcagaagtcattttggaaaacggcaaattgtcagaaggagtaacaataagttacaaatcttactgcaagaacggggtgaatggaacaggggaaaatggaagaaaatgttccaatatttccattggagatgaggttcaatttgaaattagcataacttcaaataagtgtccaaaaaaggattctgacagctttaaaattaggcctctgggctttacggaggaagtagaggttattcttcagtacatctgtgaatgtgaatgccaaagcgaaggcatccctgaaagtcccaagtgtcatgaaggaaatgggacatttgagtgtggcgcgtgcaggtgcaatgaagggcgtgttggtagacattgtgaatgcagcacagatgaagttaacagtgaagacatggatgcttactgcaggaaagaaaacagttcagaaatctgcagtaacaatggagagtgcgtctgcggacagtgtgtttgtaggaagagggataatacaaatgaaatttattctggcaaattctgcgagtgtgataatttcaactgtgatagatccaatggcttaatttgtggaggaaatggtgtttgcaagtgtcgtgtgtgtgagtgcaaccccaactacactggcagtgcatgtgactgttctttggatactagtacttgtgaagccagcaacggacagatctgcaatggccggggcatctgcgagtgtggtgtctgtaagtgtacagatccgaagtttcaagggcaaacgtgtgagatgtgtcagacctgccttggtgtctgtgctgagcataaagaatgtgttcagtgcagagccttcaataaaggagaaaagaaagacacatgcacacaggaatgttcctattttaacattaccaaggtagaaagtcgggacaaattaccccagccggtccaacctgatcctgtgtcccattgtaaggagaaggatgttgacgactgttggttctattttacgtattcagtgaatgggaacaacgaggtcatggttcatgttgtggagaatccagagtgtcccactggtccagacatcattccaattgtagctggtgtggttgctggaattgttcttattggccttgcattactgctgatatggaagcttttaatgataattcatgacagaagggagtttgctaaatttgaaaaggagaaaatgaatgccaaatgggacacgcctggagtgcagtggtgtgatatcagctcactgcaacctctgacttccagattccagcaattctcctgcctcagcctcccgagtacctgggattacagggtgaaaatcctatttataagagtgccgtaacaactgtggtcaatccgaagtatgagggaaaatgagtactgcccgtgcaaatcccacaacactgaatgcaaagtagcaatttccatagtcacagttaggtagctttagggcaatattgccatggttttactcatgtgcaggttttgaaaatgtacaatatgtataatttttaaaatgttttattattttgaaaataatgttgtaattcatgccagggactgacaaaagacttgagacaggatggttattcttgtcagctaaggtcacattgtgcctttttgaccttttcttcctggactattgaaatcaagcttattggattaagtgatatttctatagcgattgaaagggcaatagttaaagtaatgagcatgatgagagtttctgttaatcatgtattaaaactgatttttagctttacaaatatgtcagtttgcagttatgcagaatccaaagtaaatgtcctgctagctagttaaggattgttttaaatctgttattttgctatttgcctgttagacatgactgatgacatatctgaaagacaagtatgttgagagttgctggtgtaaaatacgtttgaaatagttgatctacaaaggccatgggaaaaattcagagagttaggaaggaaaaaccaatagctttaaaacctgtgtgccattttaagagttacttaatgtttggtaacttttatgccttcactttacaaattcaagccttagataaaagaaccgagcaattttctgctaaaaagtccttgatttagcactatttacatacaggccatactttacaaagtatttgctgaatggggaccttttgagttgaatttattttattatttttattttgtttaatgtctggtgctttctatcacctcttctaatcttttaatgtatttgtttgcaattttggggtaagactttttttatgagtactttttctttgaagttttagcggtcaatttgcctttttaatgaacatgtgaagttatactgtggctatgcaacagctctcacctacgcgagtcttactttgagttagtgccataacagaccactgtatgtttacttctcaccatttgagttgcccatcttgtttcacactagtcacattcttgttttaagtgcctttagttttaacagttcactttttacagtgctatttactgaagttatttattaaatatgcctaaaatacttaaatcgga

SEQ ID NO: 331528 - DNA, 3110 bp, Homo sapiens
  misc_feature (11)..(11): n is a, c, g, or t
ggacctgatcnagtttcaagtttttgctggtgtggtttggctccaaaacagaaatgaaaatagatgtttaaaagcaaatgccaaatcatgtggagaatgtatacaagcagggccaaattgtgggtggtgcacaaattcaacatttttacaggaaggaatgcctacttctgcacgatgtgatgatttagaagccttaaaaaagaagggttgccctccagatgacatagaaaatcccagaggctccaaagatataaagaaaaataaaaatgtaaccaaccgtagcaaaggaacagcagagaagctcaagccagaggatattactcagatccaaccacagcagttggttttgcgattaagatcaggggagccacagacatttacattaaaattcaagagagctgaagactatcccattgacctctactaccttatggacctgtcttactcaatgaaagacgatttggagaatgtaaaaagtcttggaacagatctgatgaatgaaatgaggaggattacttcggacttcagaattggatttggctcatttgtggaaaagactgtgatgccttacattagcacaacaccagctaagctcaggaacccttgcacaagtgaacagaactgcaccagcccatttagctacaaaaatgtgctcagtcttactaataaaggagaagtatttaatgaacttgttggaaaacagcgcatatctggaaatttggattctccagaaggtggtttcgatgccatcatgcaagttgcagtttgtggatcactgattggctggaggaatgttacacggctgctggtgttttccacagatgccgggtttcactttgctggagatgggaaacttggtggcattgttttaccaaatgatggacaatgtcacctggaaaataatatgtacacaatgagccattattatgattatccttctattgctcaccttgtccagaaactgagtgaaaataatattcagacaatttttgcagttactgaagaatttcagcctgtttacaaggagctgaaaaacttgatccctaagtcagcagtaggaacattatctgcaaattctagcaatgtaattcagttgatcattgatgcatacaattccctttcctcagaagtcattttggaaaacggcaaattgtcagaaggagtaacaataagttacaaatcttactgcaagaacggggtgaatggaacaggggaaaatggaagaaaatgttccaatatttccattggagatgaggttcaatttgaaattagcataacttcaaataagtgtccaaaaaaggattctgacagctttaaaattaggcctctgggctttacggaggaagtagaggttattcttcagtacatctgtgaatgtgaatgccaaagcgaaggcatccctgaaagtcccaagtgtcatgaaggaaatgggacatttgagtgtggcgcgtgcaggtgcaatgaagggcgtgttggtagacattgtgaatgcagcacagatgaagttaacagtgaagacatggatgcttactgcaggaaagaaaacagttcagaaatctgcagtaacaatggagagtgcgtctgcggacagtgtgtttgtaggaagagggataatacaaatgaaatttattctggcaaattctgcgagtgtgataatttcaactgtgatagatccaatggcttaatttgtggaggaaatggtgtttgcaagtgtcgtgtgtgtgagtgcaaccccaactacactggcagtgcatgtgactgttctttggatactagtacttgtgaagccagcaacggacagatctgcaatggccggggcatctgcgagtgtggtgtctgtaagtgtacagatccgaagtttcaagggcaaacgtgtgagatgtgtcagacctgccttggtgtctgtgctgagcataaagaatgtgttcagtgcagagccttcaataaaggagaaaagaaagacacatgcacacaggaatgttcctattttaacattaccaaggtagaaagtcgggacaaattaccccagccggtccaacctgatcctgtgtcccattgtaaggagaaggatgttgacgactgttggttctattttacgtattcagtgaatgggaacaacgaggtcatggttcatgttgtggagaatccagagtgtcccactggtccagacatcattccaattgtagctggtgtggttgctggaattgttcttattggccttgcattactgctgatatggaagcttttaatgataattcatgacagaagggagtttgctaaatttgaaaaggagaaaatgaatgccaaatgggacacgggtgaaaatcctatttataagagtgccgtaacaactgtggtcaatccgaagtatgagggaaaatgagtactgcccgtgcaaatcccacaacactgaatgcaaagtatgatgacatatctgaaagacaagtatgttgagagttgctggtgtaaaatacgtttgaaatagttgatctacaaaggccatgggaaaaattcagagagttaggaaggaaaaaccaatagctttaaaacctgtgtgccattttaagagttacttaatgtttggtaacttttatgccttcactttacaaattcaagccttagataaaagaaccgagcaattttctgctaaaaagtccttgatttagcactatttacatacaggccatactttacaaagtatttgctgaatggggaccttttgagttgaatttattttattatttttattttgtttaatgtctggtgctttctatcacctcttctaatcttttaatgtatttgtttgcaattttggggtaagactttttttatgagtactttttctttgaagttttagcggtcaatttgcctttttaatgaacatgtgaagttatactgtggctatgcaacagctctcacctacgcgagtcttactttgagttagtgccataacagaccactgtatgtttacttctcaccatttgagttgcccatcttgtttcacactagtcacattcttgttttaagtgcctttagttttaacagttcactttttacagtgctatttactgaagttatttattaaatatgcctaaaatacttaaatcgga

SEQ ID NO: 331529 - DNA, 3834 bp, Homo sapiens
  misc_feature (11)..(11): n is a, c, g, or t
  misc_feature (3817)..(3817): n is a, c, g, or t
ggacctgatcnagtttcaagtttttgctggtgtggtttggctccaaaacagaaatgaaaatagatgtttaaaagcaaatgccaaatcatgtggagaatgtatacaagcagggccaaattgtgggtggtgcacaaattcaacatttttacaggaaggaatgcctacttctgcacgatgtgatgatttagaagccttaaaaaagaagggttgccctccagatgacatagaaaatcccagaggctccaaagatataaagaaaaataaaaatgtaaccaaccgtagcaaaggaacagcagagaagctcaagccagaggatattactcagatccaaccacagcagttggttttgcgattaagatcaggggagccacagacatttacattaaaattcaagagagctgaagactatcccattgacctctactaccttatggacctgtcttactcaatgaaagacgatttggagaatgtaaaaagtcttggaacagatctgatgaatgaaatgaggaggattacttcggacttcagaattggatttggctcatttgtggaaaagactgtgatgccttacattagcacaacaccagctaagctcaggaacccttgcacaagtgaacagaactgcaccagcccatttagctacaaaaatgtgctcagtcttactaataaaggagaagtatttaatgaacttgttggaaaacagcgcatatctggaaatttggattctccagaaggtggtttcgatgccatcatgcaagttgcagtttgtggatcactgattggctggaggaatgttacacggctgctggtgttttccacagatgccgggtttcactttgctggagatgggaaacttggtggcattgttttaccaaatgatggacaatgtcacctggaaaataatatgtacacaatgagccattattatgattatccttctattgctcaccttgtccagaaactgagtgaaaataatattcagacaatttttgcagttactgaagaatttcagcctgtttacaaggagctgaaaaacttgatccctaagtcagcagtaggaacattatctgcaaattctagcaatgtaattcagttgatcattgatgcatacaattccctttcctcagaagtcattttggaaaacggcaaattgtcagaaggagtaacaataagttacaaatcttactgcaagaacggggtgaatggaacaggggaaaatggaagaaaatgttccaatatttccattggagatgaggttcaatttgaaattagcataacttcaaataagtgtccaaaaaaggattctgacagctttaaaattaggcctctgggctttacggaggaagtagaggttattcttcagtacatctgtgaatgtgaatgccaaagcgaaggcatccctgaaagtcccaagtgtcatgaaggaaatgggacatttgagtgtggcgcgtgcaggtgcaatgaagggcgtgttggtagacattgtgaatgcagcacagatgaagttaacagtgaagacatggatgcttactgcaggaaagaaaacagttcagaaatctgcagtaacaatggagagtgcgtctgcggacagtgtgtttgtaggaagagggataatacaaatgaaatttattctggcaaattctgcgagtgtgataatttcaactgtgatagatccaatggcttaatttgtggaggaaatggtgtttgcaagtgtcgtgtgtgtgagtgcaaccccaactacactggcagtgcatgtgactgttctttggatactagtacttgtgaagccagcaacggacagatctgcaatggccggggcatctgcgagtgtggtgtctgtaagtgtacagatccgaagtttcaagggcaaacgtgtgagatgtgtcagacctgccttggtgtctgtgctgagcataaagaatgtgttcagtgcagagccttcaataaaggagaaaagaaagacacatgcacacaggaatgttcctattttaacattaccaaggtagaaagtcgggacaaattaccccagccggtccaacctgatcctgtgtcccattgtaaggagaaggatgttgacgactgttggttctattttacgtattcagtgaatgggaacaacgaggtcatggttcatgttgtggagaatccagagtgtcccactggtccagacatcattccaattgtagctggtgtggttgctggaattgttcttattggccttgcattactgctgatatggaagcttttaatgataattcatgacagaagggagtttgctaaatttgaaaaggagaaaatgaatgccaaatgggacacgggtgaaaatcctatttataagagtgccgtaacaactgtggtcaatccgaagtatgagggaaaatgagtactgcccgtgcaaatcccacaacactgaatgcaaagtagcaatttccatagtcacagttaggtagctttagggcaatattgccatggttttactcatgtgcaggttttgaaaatgtacaatatgtataatttttaaaatgttttattattttgaaaataatgttgtaattcatgccagggactgacaaaagacttgagacaggatggttattcttgtcagctaaggtcacattgtgcctttttgaccttttcttcctggactattgaaatcaagcttattggattaagtgatatttctatagcgattgaaagggcaatagttaaagtaatgagcatgatgagagtttctgttaatcatgtattaaaactgatttttagctttacaaatatgtcagtttgcagttatgcagaatccaaagtaaatgtcctgctagctagttaaggattgttttaaatctgttattttgctatttgcctgttagacatgactgatgacatatctgaaagacaagtatgttgagagttgctggtgtaaaatacgtttgaaatagttgatctacaaaggccatgggaaaaattcagagagttaggaaggaaaaaccaatagctttaaaacctgtgtgccattttaagagttacttaatgtttggtaacttttatgccttcactttacaaattcaagccttagataaaagaaccgagcaattttctgctaaaaagtccttgatttagcactatttacatacaggccatactttacaaagtatttgctgaatggggaccttttgagttgaatttattttattatttttattttgtttaatgtctggtgctttctatcacctcttctaatcttttaatgtatttgtttgcaattttggggtaagactttttttatgagtactttttctttgaagttttagcggtcaatttgcctttttaatgaacatgtgaagttatactgtggctatgcaacagctctcacctacgcgagtcttactttgagttagtgccataacagaccactgtatgtttacttctcaccatttgagttgcccatcttgtttcacactagtcacattcttgttttaagtgcctttagttttaacagttcactttttacagtgctatttactgaagttatttattaaatatgcctaaaatacttaaatcggaaatcggatgtcttgactctgatgtattttatcaggttgtgtgcatgaaatttttatagattaaagaagttgaggaaaagcaaaaaaaaaaaggggggggctaagatcctgggggcaagttacgtcccgttttgtacagggccaagggcgatataaaagggcggggttaaccccggggaagggtggttcgaggcccttgggcatgggacccccaaagccggaacaggttggccgccgtgtgattaattacataaccngcttatacttacaccac

SEQ ID NO: 331530 - DNA, 4349 bp, Homo sapiens
  misc_feature (11)..(11): n is a, c, g, or t
ggacctgatcnagtttcaagtttttgctggtgtggtttggctccaaaacagaaatgaaaatagatgtttaaaagcaaatgccaaatcatgtggagaatgtatacaagcagggccaaattgtgggtggtgcacaaattcaacatttttacaggaaggaatgcctacttctgcacgatgtgatgatttagaagccttaaaaaagaagggttgccctccagatgacatagaaaatcccagaggctccaaagatataaagaaaaataaaaatgtaaccaaccgtagcaaaggaacagcagagaagctcaagccagaggatattactcagatccaaccacagcagttggttttgcgattaagatcaggggagccacagacatttacattaaaattcaagagagctgaagactatcccattgacctctactaccttatggacctgtcttactcaatgaaagacgatttggagaatgtaaaaagtcttggaacagatctgatgaatgaaatgaggaggattacttcggacttcagaattggatttggctcatttgtggaaaagactgtgatgccttacattagcacaacaccagctaagctcaggaacccttgcacaagtgaacagaactgcaccagcccatttagctacaaaaatgtgctcagtcttactaataaaggagaagtatttaatgaacttgttggaaaacagcgcatatctggaaatttggattctccagaaggtggtttcgatgccatcatgcaagttgcagtttgtggatcactgattggctggaggaatgttacacggctgctggtgttttccacagatgccgggtttcactttgctggagatgggaaacttggtggcattgttttaccaaatgatggacaatgtcacctggaaaataatatgtacacaatgagccattattatgattatccttctattgctcaccttgtccagaaactgagtgaaaataatattcagacaatttttgcagttactgaagaatttcagcctgtttacaaggagctgaaaaacttgatccctaagtcagcagtaggaacattatctgcaaattctagcaatgtaattcagttgatcattgatgcatacaattccctttcctcagaagtcattttggaaaacggcaaattgtcagaaggagtaacaataagttacaaatcttactgcaagaacggggtgaatggaacaggggaaaatggaagaaaatgttccaatatttccattggagatgaggttcaatttgaaattagcataacttcaaataagtgtccaaaaaaggattctgacagctttaaaattaggcctctgggctttacggaggaagtagaggttattcttcagtacatctgtgaatgtgaatgccaaagcgaaggcatccctgaaagtcccaagtgtcatgaaggaaatgggacatttgagtgtggcgcgtgcaggtgcaatgaagggcgtgttggtagacattgtgaatgcagcacagatgaagttaacagtgaagacatggatgcttactgcaggaaagaaaacagttcagaaatctgcagtaacaatggagagtgcgtctgcggacagtgtgtttgtaggaagagggataatacaaatgaaatttattctggcaaattctgcgagtgtgataatttcaactgtgatagatccaatggcttaatttgtggaggaaatggtgtttgcaagtgtcgtgtgtgtgagtgcaaccccaactacactggcagtgcatgtgactgttctttggatactagtacttgtgaagccagcaacggacagatctgcaatggccggggcatctgcgagtgtggtgtctgtaagtgtacagatccgaagtttcaagggcaaacgtgtgagatgtgtcagacctgccttggtgtctgtgctgagcataaagaatgtgttcagtgcagagccttcaataaaggagaaaagaaagacacatgcacacaggaatgttcctattttaacattaccaaggtagaaagtcgggacaaattaccccagccggtccaacctgatcctgtgtcccattgtaaggagaaggatgttgacgactgttggttctattttacgtattcagtgaatgggaacaacgaggtcatggttcatgttgtggagaatccagagtgtcccactggtccagacatcattccaattgtagctggtgtggttgctggaattgttcttattggccttgcattactgctgatatggaagcttttaatgataattcatgacagaagggagtttgctaaatttgaaaaggagaaaatgaatgccaaatgggacacgggtgaaaatcctatttataagagtgccgtaacaactgtggtcaatccgaagtatgagggaaaatgagtactgcccgtgcaaatcccacaacactgaatgcaaagtagcaatttccatagtcacagttaggtagctttagggcaatattgccatggttttactcatgtgcaggttttgaaaatgtacaatatgtataatttttaaaatgttttattattttgaaaataatgttgtaattcatgccagggactgacaaaagacttgagacaggatggttattcttgtcagctaaggtcacattgtgcctttttgaccttttcttcctggactattgaaatcaagcttattggattaagtgatatttctatagcgattgaaagggcaatagttaaagtaatgagcatgatgagagtttctgttaatcatgtattaaaactgatttttagctttacaaatatgtcagtttgcagttatgcagaatccaaagtaaatgtcctgctagctagttaaggattgttttaaatctgttattttgctatttgcctgttagacatgactgatgacatatctgaaagacaagtatgttgagagttgctggtgtaaaatacgtttgaaatagttgatctacaaaggccatgggaaaaattcagagagttaggaaggaaaaaccaatagctttaaaacctgtgtgccattttaagagttacttaatgtttggtaacttttatgccttcactttacaaattcaagccttagataaaagaaccgagcaattttctgctaaaaagtccttgatttagcactatttacatacaggccatactttacaaagtatttgctgaatggggaccttttgagttgaatttattttattatttttattttgtttaatgtctggtgctttctatcacctcttctaatcttttaatgtatttgtttgcaattttggggtaagactttttttatgagtactttttctttgaagttttagcggtcaatttgcctttttaatgaacatgtgaagttatactgtggctatgcaacagctctcacctacgcgagtcttactttgagttagtgccataacagaccactgtatgtttacttctcaccatttgagttgcccatcttgtttcacactagtcacattcttgttttaagtgcctttagttttaacagttcactttttacagtgctatttactgaagttatttattaaatatgcctaaaatacttaaatcggaaatcggatgtcttgactctgatgtattttatcaggttgtgtgcatgaaatttttatagattaaagaagttgaggaaaagcaaaaaaaaaaaaaaaaaaaaaaaaaaaaaaaaaaaaaaaaaaaaaaaaaaaaaaaaaaaaaaaagaaaaaaaaaaaaaaagagaggagagagagacaaaaaaagaagaggagtgaggaaaggaggggcgagcaacatcacttacggggaagcaccaaatatcggaggaacagcggggggccactatataatggagagagaggggtacatatatatataacgggagggcgaggggagaccgcgccgtaaacaaacggagtcgagagaaggggaaaaaaaaggttgcaacaaaagggggacacacctgggagacagaggagacaccaaaaacacgcggagagagggggcaggcgcacccctatatgtgtgggccgagccacacgacaaaacacaggaggagacaaaatataacaagcccccacggaggggagggacaaatccacaccgaccctgccggaagcgtcgcctaacaacacgggcacgaaacacggatcaccacagcacagaagcatcagcacgaagacagctagatgaaaaaaagagagtggagcacataaggaggaacatcgctggcagcccgcgagacaactaatatctacgcgaggaggaaccagcagtcataacaagcgagcgacgcagagccgcgcaggaacgaaacaccagcagaaaaaacagaccaacgagacccaaagacgagagaagagagaat

SEQ ID NO: 331531 - DNA, 3740 bp, Homo sapiens
  misc_feature (11)..(11): n is a, c, g, or t
ggacctgatcnagtttcaagtttttgctggtgtggtttggctccaaaacagaaatgaaaatagatgtttaaaagcaaatgccaaatcatgtggagaatgtatacaagcagggccaaattgtgggtggtgcacaaattcaacatttttacaggaaggaatgcctacttctgcacgatgtgatgatttagaagccttaaaaaagaagggttgccctccagatgacatagaaaatcccagaggctccaaagatataaagaaaaataaaaatgtaaccaaccgtagcaaaggaacagcagagaagctcaagccagaggatattactcagatccaaccacagcagttggttttgcgattaagatcaggggagccacagacatttacattaaaattcaagagagctgaagactatcccattgacctctactaccttatggacctgtcttactcaatgaaagacgatttggagaatgtaaaaagtcttggaacagatctgatgaatgaaatgaggaggattacttcggacttcagaattggatttggctcatttgtggaaaagactgtgatgccttacattagcacaacaccagctaagctcaggaacccttgcacaagtgaacagaactgcaccagcccatttagctacaaaaatgtgctcagtcttactaataaaggagaagtatttaatgaacttgttggaaaacagcgcatatctggaaatttggattctccagaaggtggtttcgatgccatcatgcaagttgcagtttgtggatcactgattggctggaggaatgttacacggctgctggtgttttccacagatgccgggtttcactttgctggagatgggaaacttggtggcattgttttaccaaatgatggacaatgtcacctggaaaataatatgtacacaatgagccattattatgattatccttctattgctcaccttgtccagaaactgagtgaaaataatattcagacaatttttgcagttactgaagaatttcagcctgtttacaaggagctgaaaaacttgatccctaagtcagcagtaggaacattatctgcaaattctagcaatgtaattcagttgatcattgatgcatacaattccctttcctcagaagtcattttggaaaacggcaaattgtcagaaggagtaacaataagttacaaatcttactgcaagaacggggtgaatggaacaggggaaaatggaagaaaatgttccaatatttccattggagatgaggttcaatttgaaattagcataacttcaaataagtgtccaaaaaaggattctgacagctttaaaattaggcctctgggctttacggaggaagtagaggttattcttcagtacatctgtgaatgtgaatgccaaagcgaaggcatccctgaaagtcccaagtgtcatgaaggaaatgggacatttgagtgtggcgcgtgcaggtgcaatgaagggcgtgttggtagacattgtgaatgcagcacagatgaagttaacagtgaagacatggatgcttactgcaggaaagaaaacagttcagaaatctgcagtaacaatggagagtgcgtctgcggacagtgtgtttgtaggaagagggataatacaaatgaaatttattctggcaaattctgcgagtgtgataatttcaactgtgatagatccaatggcttaatttgtggaggaaatggtgtttgcaagtgtcgtgtgtgtgagtgcaaccccaactacactggcagtgcatgtgactgttctttggatactagtacttgtgaagccagcaacggacagatctgcaatggccggggcatctgcgagtgtggtgtctgtaagtgtacagatccgaagtttcaagggcaaacgtgtgagatgtgtcagacctgccttggtgtctgtgctgagcataaagaatgtgttcagtgcagagccttcaataaaggagaaaagaaagacacatgcacacaggaatgttcctattttaacattaccaaggtagaaagtcgggacaaattaccccagccggtccaacctgatcctgtgtcccattgtaaggagaaggatgttgacgactgttggttctattttacgtattcagtgaatgggaacaacgaggtcatggttcatgttgtggagaatccagagtgtcccactggtccagacatcattccaattgtagctggtgtggttgctggaattgttcttattggccttgcattactgctgatatggaagcttttaatgataattcatgacagaagggagtttgctaaatttgaaaaggagaaaatgaatgccaaatgggacacgggtgaaaatcctatttataagagtgccgtaacaactgtggtcaatccgaagtatgagggaaaatgagtactgcccgtgcaaatcccacaacactgaatgcaaagtagcaatttccatagtcacagttaggtagctttagggcaatattgccatggttttactcatgtgcaggttttgaaaatgtacaatatgtataatttttaaaatgttttattattttgaaaataatgttgtaattcatgccagggactgacaaaagacttgagacaggatggttattcttgtcagctaaggtcacattgtgcctttttgaccttttcttcctggactattgaaatcaagcttattggattaagtgatatttctatagcgattgaaagggcaatagttaaagtaatgagcatgatgagagtttctgttaatcatgtattaaaactgatttttagctttacaaatatgtcagtttgcagttatgcagaatccaaagtaaatgtcctgctagctagttaaggattgttttaaatctgttattttgctatttgcctgttagacatgactgatgacatatctgaaagacaagtatgttgagagttgctggtgtaaaatacgtttgaaatagttgatctacaaaggccatgggaaaaattcagagagttaggaaggaaaaaccaatagctttaaaacctgtgtgccattttaagagttacttaatgtttggtaacttttatgccttcactttacaaattcaagccttagataaaagaaccgagcaattttctgctaaaaagtccttgatttagcactatttacatacaggccatactttacaaagtatttgctgaatggggaccttttgagttgaatttattttattatttttattttgtttaatgtctggtgctttctatcacctcttctaatcttttaatgtatttgtttgcaattttggggtaagactttttttatgagtactttttctttgaagttttagcggtcaatttgcctttttaatgaacatgtgaagttatactgtggctatgcaacagctctcacctacgcgagtcttactttgagttagtgccataacagaccactgtatgtttacttctcaccatttgagttgcccatcttgtttcacactagtcacattcttgttttaagtgcctttagttttaacagttcactttttacagtgctatttactgaagttatttattaaatatgcctaaaatacttaaatcggaaaaaaaaaaaaccaacacaaacacacaccacacacaccaccacacacgcgcacaaacacacaacaaacacaaccggagaaacgccaccaccgagccacccacaccacgacgaccaagccgcgcacacaaacacacacagccgcacacacacacacacgccgccgccagaaccaccagca

SEQ ID NO: 331532 - DNA, 3511 bp, Homo sapiens
  misc_feature (11)..(11): n is a, c, g, or t
ggacctgatcnagtttcaagtttttgctggtgtggtttggctccaaaacagaaatgaaaatagatgtttaaaagcaaatgccaaatcatgtggagaatgtatacaagcagggccaaattgtgggtggtgcacaaattcaacatttttacaggaaggaatgcctacttctgcacgatgtgatgatttagaagccttaaaaaagaagggttgccctccagatgacatagaaaatcccagaggctccaaagatataaagaaaaataaaaatgtaaccaaccgtagcaaaggaacagcagagaagctcaagccagaggatattactcagatccaaccacagcagttggttttgcgattaagatcaggggagccacagacatttacattaaaattcaagagagctgaagactatcccattgacctctactaccttatggacctgtcttactcaatgaaagacgatttggagaatgtaaaaagtcttggaacagatctgatgaatgaaatgaggaggattacttcggacttcagaattggatttggctcatttgtggaaaagactgtgatgccttacattagcacaacaccagctaagctcaggaacccttgcacaagtgaacagaactgcaccagcccatttagctacaaaaatgtgctcagtcttactaataaaggagaagtatttaatgaacttgttggaaaacagcgcatatctggaaatttggattctccagaaggtggtttcgatgccatcatgcaagttgcagtttgtggatcactgattggctggaggaatgttacacggctgctggtgttttccacagatgccgggtttcactttgctggagatgggaaacttggtggcattgttttaccaaatgatggacaatgtcacctggaaaataatatgtacacaatgagccattattatgattatccttctattgctcaccttgtccagaaactgagtgaaaataatattcagacaatttttgcagttactgaagaatttcagcctgtttacaaggagctgaaaaacttgatccctaagtcagcagtaggaacattatctgcaaattctagcaatgtaattcagttgatcattgatgcatacaattccctttcctcagaagtcattttggaaaacggcaaattgtcagaaggagtaacaataagttacaaatcttactgcaagaacggggtgaatggaacaggggaaaatggaagaaaatgttccaatatttccattggagatgaggttcaatttgaaattagcataacttcaaataagtgtccaaaaaaggattctgacagctttaaaattaggcctctgggctttacggaggaagtagaggttattcttcagtacatctgtgaatgtgaatgccaaagcgaaggcatccctgaaagtcccaagtgtcatgaaggaaatgggacatttgagtgtggcgcgtgcaggtgcaatgaagggcgtgttggtagacattgtgaatgcagcacagatgaagttaacagtgaagacatggatgcttactgcaggaaagaaaacagttcagaaatctgcagtaacaatggagagtgcgtctgcggacagtgtgtttgtaggaagagggataatacaaatgaaatttattctggcaaattctgcgagtgtgataatttcaactgtgatagatccaatggcttaatttgtggaggaaatggtgtttgcaagtgtcgtgtgtgtgagtgcaaccccaactacactggcagtgcatgtgactgttctttggatactagtacttgtgaagccagcaacggacagatctgcaatggccggggcatctgcgagtgtggtgtctgtaagtgtacagatccgaagtttcaagggcaaacgtgtgagatgtgtcagacctgccttggtgtctgtgctgagcataaagaatgtgttcagtgcagagccttcaataaaggagaaaagaaagacacatgcacacaggaatgttcctattttaacattaccaaggtagaaagtcgggacaaattaccccagccggtccaacctgatcctgtgtcccattgtaaggagaaggatgttgacgactgttggttctattttacgtattcagtgaatgggaacaacgaggtcatggttcatgttgtggagaatccagagtgtcccactggtccagacatcattccaattgtagctggtgtggttgctggaattgttcttattggccttgcattactgctgatatggaagcttttaatgataattcatgacagaagggagtttgctaaatttgaaaaggagaaaatgaatgccaaatgggacacgggtgaaaatcctatttataagagtgccgtaacaactgtggtcaatccgaagtatgagggaaaatgagtactgcccgtgcaaatcccacaacactgaatgcaaagtagcaatttccatagtcacagttaggtagctttagggcaatattgccatggttttactcatgtgcaggttttgaaaatgtacaatatgtataatttttaaaatgttttattattttgaaaataatgttgtaattcatgccagggactgacaaaagacttgagacaggatggttattcttgtcagctaaggtcacattgtgcctttttgaccttttcttcctggactattgaaatcaagcttattggattaagtgatatttctatagcgattgaaagggcaatagttaaagtaatgagcatgatgagagtttctgttaatcatgtattaaaactgatttttagctttacaaatatgtcagtttgcagttatgcagaatccaaagtaaatgtcctgctagctagttaaggattgttttaaatctgttattttgctatttgcctgttagacatgactgatgacatatctgaaagacaagtatgttgagagttgctggtgtaaaatacgtttgaaatagttgatctacaaaggccatgggaaaaattcagagagttaggaaggaaaaaccaatagctttaaaacctgtgtgccattttaagagttacttaatgtttggtaacttttatgccttcactttacaaattcaagccttagataaaagaaccgagcaattttctgctaaaaagctgaatggggaccttttgagttgaatttattttattatttttattttgtttaatgtctggtgctttctatcacctcttctaatcttttaatgtatttgtttgcaattttggggtaagactttttttatgagtactttttctttgaagttttagcggtcaatttgcctttttaatgaacatgtgaagttatactgtggctatgcaacagctctcacctacgcgagtcttactttgagttagtgccataacagaccactgtatgtttacttctcaccatttgagttgcccatcttgtttcacactagtcacattcttgttttaagtgcctttagttttaacagttcactttttacagtgctatttactgaagttatttattaaatatgcctaaaatacttaaatcgga

SEQ ID NO: 331533 - DNA, 3466 bp, Homo sapiens
  misc_feature (11)..(11): n is a, c, g, or t
ggacctgatcnagtttcaagtttttgctggtgtggtttggctccaaaacagaaatgaaaatagatgtttaaaagcaaatgccaaatcatgtggagaatgtatacaagcagggccaaattgtgggtggtgcacaaattcaacatttttacaggaaggaatgcctacttctgcacgatgtgatgatttagaagccttaaaaaagaagggttgccctccagatgacatagaaaatcccagaggctccaaagatataaagaaaaataaaaatgtaaccaaccgtagcaaaggaacagcagagaagctcaagccagaggatattactcagatccaaccacagcagttggttttgcgattaagatcaggggagccacagacatttacattaaaattcaagagagctgaagactatcccattgacctctactaccttatggacctgtcttactcaatgaaagacgatttggagaatgtaaaaagtcttggaacagatctgatgaatgaaatgaggaggattacttcggacttcagaattggatttggctcatttgtggaaaagactgtgatgccttacattagcacaacaccagctaagctcaggaacccttgcacaagtgaacagaactgcaccagcccatttagctacaaaaatgtgctcagtcttactaataaaggagaagtatttaatgaacttgttggaaaacagcgcatatctggaaatttggattctccagaaggtggtttcgatgccatcatgcaagttgcagtttgtggatcactgattggctggaggaatgttacacggctgctggtgttttccacagatgccgggtttcactttgctggagatgggaaacttggtggcattgttttaccaaatgatggacaatgtcacctggaaaataatatgtacacaatgagccattattatgattatccttctattgctcaccttgtccagaaactgagtgaaaataatattcagacaatttttgcagttactgaagaatttcagcctgtttacaaggagctgaaaaacttgatccctaagtcagcagtaggaacattatctgcaaattctagcaatgtaattcagttgatcattgatgcatacaattccctttcctcagaagtcattttggaaaacggcaaattgtcagaaggagtaacaataagttacaaatcttactgcaagaacggggtgaatggaacaggggaaaatggaagaaaatgttccaatatttccattggagatgaggttcaatttgaaattagcataacttcaaataagtgtccaaaaaaggattctgacagctttaaaattaggcctctgggctttacggaggaagtagaggttattcttcagtacatctgtgaatgtgaatgccaaagcgaaggcatccctgaaagtcccaagtgtcatgaaggaaatgggacatttgagtgtggcgcgtgcaggtgcaatgaagggcgtgttggtagacattgtgaatgcagcacagatgaagttaacagtgaagacatggatgcttactgcaggaaagaaaacagttcagaaatctgcagtaacaatggagagtgcgtctgcggacagtgtgtttgtaggaagagggataatacaaatgaaatttattctggcaaattctgcgagtgtgataatttcaactgtgatagatccaatggcttaatttgtggaggaaatggtgtttgcaagtgtcgtgtgtgtgagtgcaaccccaactacactggcagtgcatgtgactgttctttggatactagtacttgtgaagccagcaacggacagatctgcaatggccggggcatctgcgagtgtggtgtctgtaagtgtacagatccgaagtttcaagggcaaacgtgtgagatgtgtcagacctgccttggtgtctgtgctgagcataaagaatgtgttcagtgcagagccttcaataaaggagaaaagaaagacacatgcacacaggaatgttcctattttaacattaccaaggtagaaagtcgggacaaattaccccagccggtccaacctgatcctgtgtcccattgtaaggagaaggatgttgacgactgttggttctattttacgtattcagtgaatgggaacaacgaggtcatggttcatgttgtggagaatccagagtgtcccactggtccagacatcattccaattgtagctggtgtggttgctggaattgttcttattggccttgcattactgctgatatggaagcttttaatgataattcatgacagaagggagtttgctaaatttgaaaaggagaaaatgaatgccaaatgggacacgggtgaaaatcctatttataagagtgccgtaacaactgtggtcaatccgaagtatgagggaaaatgagtactgcccgtgcaaatcccacaacactgaatgcaaagtagcaatttccatagtcacagttaggtagctttagggcaatattgccatggttttactcatgtgcaggttttgaaaatgtacaatatgtataatttttaaaatgttttattattttgaaaataatgttgtaattcatgccagggactgacaaaagacttgagacaggatggttattcttgtcagctaaggtcacattgtgcctttttgaccttttcttcctggactattgaaatcaagcttattggattaagtgatatttctatagcgattgaaagggcaatagttaaagtaatgagcatgatgagagtttctgttaatcatgtattaaaactgatttttagctttacaaatatgtcagtttgcagttatgcagaatccaaagtaaatgtcctgctagctagttaaggattgttttaaatctgttattttgctatttgcctgttagacatgactgatgacatatctgaaagacaagtatgttgagagttgctggtgtaaaatacgtttgaaatagttgatctacaaaggccatgggaaaaattcagagagttaggaaggaaaaaccaatagctttaaaacctgtgtgccattttaagagttacttaatgtttggtaacttttatgccttcactttacaaattcaagccttagataaaagaaccgagcaattttctgctaaaaagtccttgatttagcactatttacatacaggccatactttacaaagtatttgctgaatggggaccttttgagttgaatttattttattatttttattttgtttaatgtctggtgctttctatcacctcttctaatcttttaatgtatttgtttgcaattttggggtaagactttttttatgagtactttttctttgaagttttagcggtcaatttgcctttttaatgaacatgtgaagttatactgtggctatgcaacagctctcacctacgcgagtcttactttgagttagtgccataacagaccactgtatgtttacttctcaccatttgagttgcaaattcaaggggatcctcaagagcg

SEQ ID NO: 331534 - DNA, 3747 bp, Homo sapiens
  misc_feature (11)..(11): n is a, c, g, or t
  misc_feature (2541)..(2542): n is a, c, g, or t
  misc_feature (2550)..(2551): n is a, c, g, or t
  misc_feature (2570)..(2571): n is a, c, g, or t
  misc_feature (2708)..(2708): n is a, c, g, or t
  misc_feature (2909)..(2909): n is a, c, g, or t
ggacctgatcnagtttcaagtttttgctggtgtggtttggctccaaaacagaaatgaaaatagatgtttaaaagcaaatgccaaatcatgtggagaatgtatacaagcagggccaaattgtgggtggtgcacaaattcaacatttttacaggaaggaatgcctacttctgcacgatgtgatgatttagaagccttaaaaaagaagggttgccctccagatgacatagaaaatcccagaggctccaaagatataaagaaaaataaaaatgtaaccaaccgtagcaaaggaacagcagagaagctcaagccagaggatattactcagatccaaccacagcagttggttttgcgattaagatcaggggagccacagacatttacattaaaattcaagagagctgaagactatcccattgacctctactaccttatggacctgtcttactcaatgaaagacgatttggagaatgtaaaaagtcttggaacagatctgatgaatgaaatgaggaggattacttcggacttcagaattggatttggctcatttgtggaaaagactgtgatgccttacattagcacaacaccagctaagctcaggaacccttgcacaagtgaacagaactgcaccagcccatttagctacaaaaatgtgctcagtcttactaataaaggagaagtatttaatgaacttgttggaaaacagcgcatatctggaaatttggattctccagaaggtggtttcgatgccatcatgcaagttgcagtttgtggatcactgattggctggaggaatgttacacggctgctggtgttttccacagatgccgggtttcactttgctggagatgggaaacttggtggcattgttttaccaaatgatggacaatgtcacctggaaaataatatgtacacaatgagccattattatgattatccttctattgctcaccttgtccagaaactgagtgaaaataatattcagacaatttttgcagttactgaagaatttcagcctgtttacaaggagctgaaaaacttgatccctaagtcagcagtaggaacattatctgcaaattctagcaatgtaattcagttgatcattgatgcatacaattccctttcctcagaagtcattttggaaaacggcaaattgtcagaaggagtaacaataagttacaaatcttactgcaagaacggggtgaatggaacaggggaaaatggaagaaaatgttccaatatttccattggagatgaggttcaatttgaaattagcataacttcaaataagtgtccaaaaaaggattctgacagctttaaaattaggcctctgggctttacggaggaagtagaggttattcttcagtacatctgtgaatgtgaatgccaaagcgaaggcatccctgaaagtcccaagtgtcatgaaggaaatgggacatttgagtgtggcgcgtgcaggtgcaatgaagggcgtgttggtagacattgtgaatgcagcacagatgaagttaacagtgaagacatggatgcttactgcaggaaagaaaacagttcagaaatctgcagtaacaatggagagtgcgtctgcggacagtgtgtttgtaggaagagggataatacaaatgaaatttattctggcaaattctgcgagtgtgataatttcaactgtgatagatccaatggcttaatttgtggaggaaatggtgtttgcaagtgtcgtgtgtgtgagtgcaaccccaactacactggcagtgcatgtgactgttctttggatactagtacttgtgaagccagcaacggacagatctgcaatggccggggcatctgcgagtgtggtgtctgtaagtgtacagatccgaagtttcaagggcaaacgtgtgagatgtgtcagacctgccttggtgtctgtgctgagcataaagaatgtgttcagtgcagagccttcaataaaggagaaaagaaagacacatgcacacaggaatgttcctattttaacattaccaaggtagaaagtcgggacaaattaccccagccggtccaacctgatcctgtgtcccattgtaaggagaaggatgttgacgactgttggttctattttacgtattcagtgaatgggaacaacgaggtcatggttcatgttgtggagaatccagagtgtcccactggtccagacatcattccaattgtagctggtgtggttgctggaattgttcttattggccttgcattactgctgatatggaagcttttaatgataattcatgacagaagggagtttgctaaatttgaaaaggagaaaatgaatgccaaatgggacacggtaagttacaaaacatccaaaaagcaaagtggcttataaagtaaatgtaatactcctaagacttatgtattagctgtcaggctgattattaaagtcctttctaagtattttattcccccaaaagtttcttactcaaggaatttgcatttagtgaaaaacagaaagcatcctaaatatatcccattgaaacaaaacattgattataagcatgtatattctggttnntgtggccnntatttttatttctttaatnnttttgatcctaaatctgccttttcatctaatgtgaagtagaatcctaaataatgttatctgtgtagcaagctattcaatggaaagctgcttctttctttaaaacaaacaaacaaaaaaaaccttcagtgaaagccanattcaaaaggttatataccaagcttgtccaactcgcagctcgtcggccaggacatgcagcccagaatagctttgaatgtggccccaacacaaatttgtaaactttcttagaaattgtaattattattattatttttttttggtaactttttttaaagctcatcagctatcgttagtgtattttatgtgtggcccaagacanttcttcttcttccagtgtggcccagggaagccaaaagattggacacccctgctatatactatatgattccatttagaggacattctggaaaagcaaaactgtaggggcaaaaatcagtggttgctaggggctggaatgggggaaagtgttgaccacagaggggcgtaagggatcttccttgggatgatcttgattgtgggtggatttatgtatttgaaaactcacagaactatgtactttaaaaagatgtatgttcctctatgaaaattatatctcagtaaactttggcttataaaaatcttaaaagccctaagtgaccgaaaggttatgttagcattgagtgctttgaaatatggagtcagagggtggggtaaccaaatgttggcctttgtgtattcatcttttgatacaagaaagcaatgccaatcttcagtatttttaaattgtaaatgaattttgtagttagttgcactttactacaatttgcttgggtttttaaaaattatcaattttttaaattacaaatttcagaagggtagaaataaaaaaaaagacatttatagtgttcaaacactataaagggattttttttttctgatgaaatcattagaaactatttcttttactttagcaagaaaatccgatttacaagagtcctattaataatttcaagaatccaaactacggacgtaaagctggtctctaaattgccgttcgtattttgtttcactttctgcctttgcatgtgaacttctatcttttttactgcactgtgtgtcctttatcactattgctgttctttttttaagtctggctttaaatatcgctattgtggctt

SEQ ID NO: 331535 - DNA, 1796 bp, Homo sapiens
  misc_feature (11)..(11): n is a, c, g, or t
  misc_feature (1750)..(1750): n is a, c, g, or t
  misc_feature (1788)..(1788): n is a, c, g, or t
  misc_feature (1795)..(1795): n is a, c, g, or t
ggacctgatcnagtttcaagtttttgctggtgtggtttggctccaaaacagaaatgaaaatagatgtttaaaagcaaatgccaaatcatgtggagaatgtatacaagcagggccaaattgtgggtggtgcacaaattcaacatttttacaggaaggaatgcctacttctgcacgatgtgatgatttagaagccttaaaaaagaagggttgccctccagatgacatagaaaatcccagaggctccaaagatataaagaaaaataaaaatgtaaccaaccgtagcaaaggaacagcagagaagctcaagccagaggatattactcagatccaaccacagcagttggttttgcgattaagatcaggggagccacagacatttacattaaaattcaagagagctgaagactatcccattgacctctactaccttatggacctgtcttactcaatgaaagacgatttggagaatgtaaaaagtcttggaacagatctgatgaatgaaatgaggaggattacttcggacttcagaattggatttggctcatttgtggaaaagactgtgatgccttacattagcacaacaccagctaagctcaggaacccttgcacaagtgaacagaactgcaccagcccatttagctacaaaaatgtgctcagtcttactaataaaggagaagtatttaatgaacttgttggaaaacagcgcatatctggaaatttggattctccagaaggtggtttcgatgccatcatgcaagttgcagtttgtggatcactgattggctggaggaatgttacacggctgctggtgttttccacagatgccgggtttcactttgctggagatgggaaacttggtggcattgttttaccaaatgatggacaatgtcacctggaaaataatatgtacacaatgagccattattatgattatccttctattgctcaccttgtccagaaactgagtgaaaataatattcagacaatttttgcagttactgaagaatttcagcctgtttacaaggagctgaaaaacttgatccctaagtcagcagtaggaacattatctgcaaattctagcaatgtaattcagttgatcattgatgcatacaattccctttcctcagaagtcattttggaaaacggcaaattgtcagaaggagtaacaataagttacaaatcttactgcaagaacggggtgaatggaacaggggaaaatggaagaaaatgttccaatatttccattggagatgaggttcaatttgaaattagcataacttcaaataagtgtccaaaaaaggattctgacagctttaaaattaggcctctgggctttacggaggaagtagaggttattcttcagtacatctgtgaatgtgaatgccaaagcgaaggcatccctgaaagtcccaagtgtcatgaaggaaatgggacatttgagtgtggcgcgtgcaggtgcaatgaagggcgtgttggtagacattgtgaatgcagcacagatgaagttaacagtgaagacatggatgcttactgcaggaaagaaaacagttcagaaatctgcagtaacaatggagagtgcgtctgcggacagtgtgtttgtaggaagagggataatacaaatgaaatttattctggcaaattctgcgagtgtgataatttcaactgtgatagatccaatggcttaatttgtggagggaaatggggttttgcaaagtgtccctgtgtggtgaagtgcaaacccccaaactanaactgggcaaatgcaatggttgactggttcctttgggntaaccang

SEQ ID NO: 331536 - DNA, 1052 bp, Homo sapiens
  misc_feature (11)..(11): n is a, c, g, or t
ggacctgatcnagtttcaagtttttgctggtgtggtttggctccaaaacagaaatgaaaatagatgtttaaaagcaaatgccaaatcatgtggagaatgtatacaagcagggccaaattgtgggtggtgcacaaattcaacatttttacaggaaggaatgcctacttctgcacgatgtgatgatttagaagccttaaaaaagaagggttgccctccagatgacatagaaaatcccagaggctccaaagatataaagaaaaataaaaatgtaaccaaccgtagcaaaggaacagcagagaagctcaagccagaggatattactcagatccaaccacagcagttggttttgcgattaagatcaggggagccacagacatttacattaaaattcaagagagctgaagactatcccattgacctctactaccttatggacctgtcttactcaatgaaagacgatttggagaatgtaaaaagtcttggaacagatctgatgaatgaaatgaggaggattacttcggacttcagaattggatttggctcatttgtggaaaagactgtgatgccttacattagcacaacaccagctaagctcaggaacccttgcacaagtgaacagaactgcaccagcccatttagctacaaaaatgtgctcagtcttactaataaaggagaagtatttaatgaacttgttggaaaacagcgcatatctggaaatttggattctccagaaggtggtttcgatgccatcatgcaagttgcagtttgtggatcactgattggctggaggaatgttacacggctgctggtgttttccacagatgccgggtttcactttgctggagatgggaaacttggtggcattgttttaccaaatgatggacaatgtcacctggaaaataatatgtacacaatgagccattattatgtaagtgcctggttccttacatagtgaatgtgtttatgttggattttaatgtttaatactaagagcttgtggagtcggatcacgcgtcgacgcggccgcgaatttagtagtagtaggcggccgc

SEQ ID NO: 331537 - DNA, 997 bp, Homo sapiens
  misc_feature (11)..(11): n is a, c, g, or t
  misc_feature (920)..(920): n is a, c, g, or t
  misc_feature (938)..(938): n is a, c, g, or t
  misc_feature (951)..(951): n is a, c, g, or t
  misc_feature (989)..(989): n is a, c, g, or t
  misc_feature (992)..(992): n is a, c, g, or t
ggacctgatcnagtttcaagtttttgctggtgtggtttggctccaaaacagaaatgaaaatagatgtttaaaagcaaatgccaaatcatgtggagaatgtatacaagcagggccaaattgtgggtggtgcacaaattcaacatttttacaggaaggaatgcctacttctgcacgatgtgatgatttagaagccttaaaaaagaagggttgccctccagatgacatagaaaatcccagaggctccaaagatataaagaaaaataaaaatgtaaccaaccgtagcaaaggaacagcagagaagctcaagccagaggatattactcagatccaaccacagcagttggttttgcgattaagatcaggggagccacagacatttacattaaaattcaagagagctgaagactatcccattgacctctactaccttatggacctgtcttactcaatgaaagacgatttggagaatgtaaaaagtcttggaacagatctgatgaatgaaatgaggaggattacttcggacttcagaattggatttggctcatttgtggaaaagactgtgatgccttacattagcacaacaccagctaagctcaggaacccttgcacaagtgaacagaactgcaccagcccatttagctacaaaaatgtgctcagtcttactaataaaggagaagtatttaatgaacttgttggaaaacagcgcatatctggaaatttggattctccagaaggtggtttcgatgccatcatgcaagttgcagtttgtggatcactgattggctggaggaatgttacacggctgctggtgttttccacagatgccgggtttcactttgctggagatgggaaacttggtggcattgttttaccaaatgatggacaatgtcacctggaaaattatttttttcccattgaancccttatttttgaataanccctcctttggcnccccctgttcccaaaacctggaatttaaatttattttnccnaacca

SEQ ID NO: 331538 - DNA, 841 bp, Homo sapiens
  misc_feature (11)..(11): n is a, c, g, or t
ggacctgatcnagtttcaagtttttgctggtgtggtttggctccaaaacagaaatgaaaatagatgtttaaaagcaaatgccaaatcatgtggagaatgtatacaagcagggccaaattgtgggtggtgcacaaattcaacatttttacaggaaggaatgcctacttctgcacgatgtgatgatttagaagccttaaaaaagaagggttgccctccagatgacatagaaaatcccagaggctccaaagatataaagaaaaataaaaatgtaaccaaccgtagcaaaggaacagcagagaagctcaagccagaggatattactcagatccaaccacagcagttggttttgcgattaagatcaggggagccacagacatttacattaaaattcaagagagctgaagactatcccattgacctctactaccttatggacctgtcttactcaatgaaagacgatttggagaatgtaaaaagtcttggaacagatctgatgaatgaaatgaggaggattacttcggacttcagaattggatttggctcatttgtggaaaagactgtgatgccttacattagcacaacaccagctaagctcaggaacccacgctctgcaaggaacccatgcgcgtgggttccttgcagaggcaggaggacgaggaggataaacccaggcaggtggaggtgcatcaagagcccggggcagcggtgcccagaggccaggaggcccctgaaggcaagggcagggagacgggggagaatcgtgctcccctggctttggaccctgtgctcagagctcctgggggtcggcctggtccatcccaggagcttaaccagcgctccc

SEQ ID NO: 331539 - DNA, 237 bp, Homo sapiens
caaccaaaaccgttcccaacttctttcctcctcacagggaaaggcaaaaaagtccgcaggcatagagagtggaaagaaggaacagcatactaggctggtttgaaaaacaatcaattgctaggtaataatgtcttaccttttgagtggaaggaggagctgggaagaattaagttcgggcaggttttttgctcattttggatcagcccttcatattatggcttaatagctttgtttata

SEQ ID NO: 331540 - DNA, 494 bp, Homo sapiens
gtccacctaccttggcctcccaaagtgctgggattacaggtgtgagctaccacacccggcctattccacatttttaagactcctcctaattagtaacagccctctgcactgtgtgatcctgagtattttaactcagtgattaaaacaggaatactcttttcaattgtgtattttattttaaagatttgatccttattaattaaaacctgtttctctggcctctgtgttttctagttactcaattggatttggcttgtagatactttattgaaatatatttttttctgagcagtttatccattggttttatgcattcaagtagcattttgtttgacttttcctgtgtataattaggcattcttttagtccctttcctcagaagtcattttggaaaacggcaaattgtcagaaggagtaacaataagttacaaatcttactgcaagaacggggtgaatggaacaggggaaaatggaagaaaatgttccaatatttc

SEQ ID NO: 331541 - DNA, 3561 bp, Homo sapiens
  misc_feature (11)..(11): n is a, c, g, or t
ggacctgatcnagtttcaagtttttgctggtgtggtttggctccaaaacagaaatgaaaatagatgtttaaaagcaaatgccaaatcatgtggagaatgtatacaagcagggccaaattgtgggtggtgcacaaattcaacatttttacaggaaggaatgcctacttctgcacgatgtgatgatttagaagccttaaaaaagaagggttgccctccagatgacatagaaaatcccagaggctccaaagatataaagaaaaataaaaatgtaaccaaccgtagcaaaggaacagcagagaagctcaagccagaggatattactcagatccaaccacagcagttggttttgcgattaagatcaggggagccacagacatttacattaaaattcaagagagctgaagactatcccattgacctctactaccttatggacctgtcttactcaatgaaagacgatttggagaatgtaaaaagtcttggaacagatctgatgaatgaaatgaggaggattacttcggacttcagaattggatttggctcatttgtggaaaagactgtgatgccttacattagcacaacaccagctaagctcaggaacccttgcacaagtgaacagaactgcaccagcccatttagctacaaaaatgtgctcagtcttactaataaaggagaagtatttaatgaacttgttggaaaacagcgcatatctggaaatttggattctccagaaggtggtttcgatgccatcatgcaagttgcagtttgtggatcactgattggctggaggaatgttacacggctgctggtgttttccacagatgccgggtttcactttgctggagatgggaaacttggtggcattgttttaccaaatgatggacaatgtcacctggaaaataatatgtacacaatgagccattattatgattatccttctattgctcaccttgtccagaaactgagtgaaaataatattcagacaatttttgcagttactgaagaatttcagcctgtttacaaggagctgaaaaacttgatccctaagtcagcagtaggaacattatctgcaaattctagcaatgtaattcagttgatcattgatgcatacaattccctttcctcagaagtcattttggaaaacggcaaattgtcagaaggagtaacaataagttacaaatcttactgcaagaacggggtgaatggaacaggggaaaatggaagaaaatgttccaatatttccattggagatgaggttcaatttgaaattagcataacttcaaataagtgtccaaaaaaggattctgacagctttaaaattaggcctctgggctttacggaggaagtagaggttattcttcagtacatctgtgaatgtgaatgccaaagcgaaggcatccctgaaagtcccaagtgtcatgaaggaaatgggacatttgagtgtggcgcgtgcaggtgcaatgaagggcgtgttggtagacattgtgaatgcagcacagatgaagttaacagtgaagacatggatgcttactgcaggaaagaaaacagttcagaaatctgcagtaacaatggagagtgcgtctgcggacagtgtgtttgtaggaagagggataatacaaatgaaatttattctggcaaattctgcgagtgtgataatttcaactgtgatagatccaatggcttaatttgtggaggaaatggtgtttgcaagtgtcgtgtgtgtgagtgcaaccccaactacactggcagtgcatgtgactgttctttggatactagtacttgtgaagccagcaacggacagatctgcaatggccggggcatctgcgagtgtggtgtctgtaagtgtacagatccgaagtttcaagggcaaacgtgtgagatgtgtcagacctgccttggtgtctgtgctgagcataaagaatgtgttcagtgcagagccttcaataaaggagaaaagaaagacacatgcacacaggaatgttcctattttaacattaccaaggtagaaagtcgggacaaattaccccagccggtccaacctgatcctgtgtcccattgtaaggagaaggatgttgacgactgttggttctattttacgtattcagtgaatgggaacaacgaggtcatggttcatgttgtggagaatccagagtgtcccactggtccagacatcattccaattgtagctggtgtggttgctggaattgttcttattggccttgcattactgctgatatggaagcttttaatgataattcatgacagaagggagtttgctaaatttgaaaaggagaaaatgaatgccaaatgggacacgggtgaaaatcctatttataagagtgccgtaacaactgtggtcaatccgaagtatgagggaaaatgagtactgcccgtgcaaatcccacaacactgaatgcaaagtagcaatttccatagtcacagttaggtagctttagggcaatattgccatggttttactcatgtgcaggttttgaaaatgtacaatatgtataatttttaaaatgttttattattttgaaaataatgttgtaattcatgccagggactgacaaaagacttgagacaggatggttattcttgtcagctaaggtcacattgtgcctttttgaccttttcttcctggactattgaaatcaagcttattggattaagtgatatttctatagcgattgaaagggcaatagttaaagtaatgagcatgatgagagtttctgttaatcatgtattaaaactgatttttagctttacaaatatgtcagtttgcagttatgcagaatccaaagtaaatgtcctgctagctagttaaggattgttttaaatctgttattttgctatttgcctgttagacatgactgatgacatatctgaaagacaagtatgttgagagttgctggtgtaaaatacgtttgaaatagttgatctacaaaggccatgggaaaaattcagagagttaggaaggaaaaaccaatagctttaaaacctgtgtgccattttaagagttacttaatgtttggtaacttttatgccttcactttacaaattcaagccttagataaaagaaccgagcaattttctgctaaaaagtccttgatttagcactatttacatacaggccatactttacaaagtatttgctgaatggggaccttttgagttgaatttattttattatttttattttgtttaatgtctggtgctttctatcacctcttctaatcttttaatgtatttgtttgcaattttggggtaagactttttttatgagtactttttctttgaagttttagcggtcaatttgcctttttaatgaacatgtgaagttatactgtggctatgcaacagctctcacctacgcgagtcttactttgagttagtgccataacagaccactgtatgtttacttctcaccatttgagttgcccatcttgtttcacactagtcacattcttgttttaagtgcctttagttttaacagttcactttttacagtgctatttactgaagttatttattaaatatgcctaaaatacttaaatcgga

SEQ ID NO: 331542 - DNA, 3456 bp, Homo sapiens
gcacgagcaacccttcttttttaaggcttctaaatcatcacatcgtgcagaagtaggcattccttcctgtaaaaatgttgaatttgtgcaccacccacaatttggccctccagatgacatagaaaatcccagaggctccaaagatataaagaaaaataaaaatgtaaccaaccgtagcaaaggaacagcagagaagctcaagccagaggatattactcagatccaaccacagcagttggttttgcgattaagatcaggggagccacagacatttacattaaaattcaagagagctgaagactatcccattgacctctactaccttatggacctgtcttactcaatgaaagacgatttggagaatgtaaaaagtcttggaacagatctgatgaatgaaatgaggaggattacttcggacttcagaattggatttggctcatttgtggaaaagactgtgatgccttacattagcacaacaccagctaagctcaggaacccttgcacaagtgaacagaactgcaccagcccatttagctacaaaaatgtgctcagtcttactaataaaggagaagtatttaatgaacttgttggaaaacagcgcatatctggaaatttggattctccagaaggtggtttcgatgccatcatgcaagttgcagtttgtggatcactgattggctggaggaatgttacacggctgctggtgttttccacagatgccgggtttcactttgctggagatgggaaacttggtggcattgttttaccaaatgatggacaatgtcacctggaaaataatatgtacacaatgagccattattatgattatccttctattgctcaccttgtccagaaactgagtgaaaataatattcagacaatttttgcagttactgaagaatttcagcctgtttacaaggagctgaaaaacttgatccctaagtcagcagtaggaacattatctgcaaattctagcaatgtaattcagttgatcattgatgcatacaattccctttcctcagaagtcattttggaaaacggcaaattgtcagaaggagtaacaataagttacaaatcttactgcaagaacggggtgaatggaacaggggaaaatggaagaaaatgttccaatatttccattggagatgaggttcaatttgaaattagcataacttcaaataagtgtccaaaaaaggattctgacagctttaaaattaggcctctgggctttacggaggaagtagaggttattcttcagtacatctgtgaatgtgaatgccaaagcgaaggcatccctgaaagtcccaagtgtcatgaaggaaatgggacatttgagtgtggcgcgtgcaggtgcaatgaagggcgtgttggtagacattgtgaatgcagcacagatgaagttaacagtgaagacatggatgcttactgcaggaaagaaaacagttcagaaatctgcagtaacaatggagagtgcgtctgcggacagtgtgtttgtaggaagagggataatacaaatgaaatttattctggcaaattctgcgagtgtgataatttcaactgtgatagatccaatggcttaatttgtggaggaaatggtgtttgcaagtgtcgtgtgtgtgagtgcaaccccaactacactggcagtgcatgtgactgttctttggatactagtacttgtgaagccagcaacggacagatctgcaatggccggggcatctgcgagtgtggtgtctgtaagtgtacagatccgaagtttcaagggcaaacgtgtgagatgtgtcagacctgccttggtgtctgtgctgagcataaagaatgtgttcagtgcagagccttcaataaaggagaaaagaaagacacatgcacacaggaatgttcctattttaacattaccaaggtagaaagtcgggacaaattaccccagccggtccaacctgatcctgtgtcccattgtaaggagaaggatgttgacgactgttggttctattttacgtattcagtgaatgggaacaacgaggtcatggttcatgttgtggagaatccagagtgtcccactggtccagacatcattccaattgtagctggtgtggttgctggaattgttcttattggccttgcattactgctgatatggaagcttttaatgataattcatgacagaagggagtttgctaaatttgaaaaggagaaaatgaatgccaaatgggacacgggtgaaaatcctatttataagagtgccgtaacaactgtggtcaatccgaagtatgagggaaaatgagtactgcccgtgcaaatcccacaacactgaatgcaaagtagcaatttccatagtcacagttaggtagctttagggcaatattgccatggttttactcatgtgcaggttttgaaaatgtacaatatgtataatttttaaaatgttttattattttgaaaataatgttgtaattcatgccagggactgacaaaagacttgagacaggatggttattcttgtcagctaaggtcacattgtgcctttttgaccttttcttcctggactattgaaatcaagcttattggattaagtgatatttctatagcgattgaaagggcaatagttaaagtaatgagcatgatgagagtttctgttaatcatgtattaaaactgatttttagctttacaaatatgtcagtttgcagttatgcagaatccaaagtaaatgtcctgctagctagttaaggattgttttaaatctgttattttgctatttgcctgttagacatgactgatgacatatctgaaagacaagtatgttgagagttgctggtgtaaaatacgtttgaaatagttgatctacaaaggccatgggaaaaattcagagagttaggaaggaaaaaccaatagctttaaaacctgtgtgccattttaagagttacttaatgtttggtaacttttatgccttcactttacaaattcaagccttagataaaagaaccgagcaattttctgctaaaaagtccttgatttagcactatttacatacaggccatactttacaaagtatttgctgaatggggaccttttgagttgaatttattttattatttttattttgtttaatgtctggtgctttctatcacctcttctaatcttttaatgtatttgtttgcaattttggggtaagactttttttatgagtactttttctttgaagttttagcggtcaatttgcctttttaatgaacatgtgaagttatactgtggctatgcaacagctctcacctacgcgagtcttactttgagttagtgccataacagaccactgtatgtttacttctcaccatttgagttgcccatcttgtttcacactagtcacattcttgttttaagtgcctttagttttaacagttcactttttacagtgctatttactgaagttatttattaaatatgcctaaaatacttaaatcgga

SEQ ID NO: 331543 - DNA, 3507 bp, Homo sapiens
  misc_feature (11)..(11): n is a, c, g, or t
ggacctgatcnagtttcaagtttttgctggtgtggtttggctccaaaacagaaatgaaaatagatgtttaaaagcaaatgccaaatcatgtggagaatgtatacaagcagggccaaattgtgggtggtgcacaaattcaacatttttacaggaaggaatgcctacttctgcacgatgtgatgatttagaagccttaaaaaagaagggttgccctccagatgacatagaaaatcccagaggctccaaagatataaagaaaaataaaaatgtaaccaaccgtagcaaaggaacagcagagaagctcaagccagaggatattactcagatccaaccacagcagttggttttgcgattaagatcaggggagccacagacatttacattaaaattcaagagagctgaagactatcccattgacctctactaccttatggacctgtcttactcaatgaaagacgatttggagaatgtaaaaagtcttggaacagatctgatgaatgaaatgaggaggattacttcggacttcagaattggatttggctcatttgtggaaaagactgtgatgccttacattagcacaacaccagctaagctcaggaacccttgcacaagtgaacagaactgcaccagcccatttagctacaaaaatgtgctcagtcttactaataaaggagaagtatttaatgaacttgttggaaaacagcgcatatctggaaatttggattctccagaaggtggtttcgatgccatcatgcaagttgcagtttgtggatcactgattggctggaggaatgttacacggctgctggtgttttccacagatgccgggtttcactttgctggagatgggaaacttggtggcattgttttaccaaatgatggacaatgtcacctggaaaataatatgtacacaatgagccattattatgattatccttctattgctcaccttgtccagaaactgagtgaaaataatattcagacaatttttgcagttactgaagaatttcagcctgtttacaaggagctgaaaaacttgatccctaagtcagcagtaggaacattatctgcaaattctagcaatgtaattcagttgatcattgatgcatacaattccctttcctcagaagtcattttggaaaacggcaaattgtcagaaggagtaacaataagttacaaatcttactgcaagaacggggtgaatggaacaggggaaaatggaagaaaatgttccaatatttccattggagatgaggttcaatttgaaattagcataacttcaaataagtgtccaaaaaaggattctgacagctttaaaattaggcctctgggctttacggaggaagtagaggttattcttcagtacatctgtgaatgtgaatgccaaagcgaaggcatccctgaaagtcccaagtgtcatgaaggaaatgggacatttgagtgtggcgcgtgcaggtgcaatgaagggcgtgttggtagacattgtgaatgcagcacagatgaagttaacagtgaagacatggatgcttactgcaggaaagtttgtaggaagagggataatacaaatgaaatttattctggcaaattctgcgagtgtgataatttcaactgtgatagatccaatggcttaatttgtggaggaaatggtgtttgcaagtgtcgtgtgtgtgagtgcaaccccaactacactggcagtgcatgtgactgttctttggatactagtacttgtgaagccagcaacggacagatctgcaatggccggggcatctgcgagtgtggtgtctgtaagtgtacagatccgaagtttcaagggcaaacgtgtgagatgtgtcagacctgccttggtgtctgtgctgagcataaagaatgtgttcagtgcagagccttcaataaaggagaaaagaaagacacatgcacacaggaatgttcctattttaacattaccaaggtagaaagtcgggacaaattaccccagccggtccaacctgatcctgtgtcccattgtaaggagaaggatgttgacgactgttggttctattttacgtattcagtgaatgggaacaacgaggtcatggttcatgttgtggagaatccagagtgtcccactggtccagacatcattccaattgtagctggtgtggttgctggaattgttcttattggccttgcattactgctgatatggaagcttttaatgataattcatgacagaagggagtttgctaaatttgaaaaggagaaaatgaatgccaaatgggacacgggtgaaaatcctatttataagagtgccgtaacaactgtggtcaatccgaagtatgagggaaaatgagtactgcccgtgcaaatcccacaacactgaatgcaaagtagcaatttccatagtcacagttaggtagctttagggcaatattgccatggttttactcatgtgcaggttttgaaaatgtacaatatgtataatttttaaaatgttttattattttgaaaataatgttgtaattcatgccagggactgacaaaagacttgagacaggatggttattcttgtcagctaaggtcacattgtgcctttttgaccttttcttcctggactattgaaatcaagcttattggattaagtgatatttctatagcgattgaaagggcaatagttaaagtaatgagcatgatgagagtttctgttaatcatgtattaaaactgatttttagctttacaaatatgtcagtttgcagttatgcagaatccaaagtaaatgtcctgctagctagttaaggattgttttaaatctgttattttgctatttgcctgttagacatgactgatgacatatctgaaagacaagtatgttgagagttgctggtgtaaaatacgtttgaaatagttgatctacaaaggccatgggaaaaattcagagagttaggaaggaaaaaccaatagctttaaaacctgtgtgccattttaagagttacttaatgtttggtaacttttatgccttcactttacaaattcaagccttagataaaagaaccgagcaattttctgctaaaaagtccttgatttagcactatttacatacaggccatactttacaaagtatttgctgaatggggaccttttgagttgaatttattttattatttttattttgtttaatgtctggtgctttctatcacctcttctaatcttttaatgtatttgtttgcaattttggggtaagactttttttatgagtactttttctttgaagttttagcggtcaatttgcctttttaatgaacatgtgaagttatactgtggctatgcaacagctctcacctacgcgagtcttactttgagttagtgccataacagaccactgtatgtttacttctcaccatttgagttgcccatcttgtttcacactagtcacattcttgttttaagtgcctttagttttaacagttcactttttacagtgctatttactgaagttatttattaaatatgcctaaaatacttaaatcgga

SEQ ID NO: 331544 - DNA, 3507 bp, Homo sapiens
  misc_feature (11)..(11): n is a, c, g, or t
ggacctgatcnagtttcaagtttttgctggtgtggtttggctccaaaacagaaatgaaaatagatgtttaaaagcaaatgccaaatcatgtggagaatgtatacaagcagggccaaattgtgggtggtgcacaaattcaacatttttacaggaaggaatgcctacttctgcacgatgtgatgatttagaagccttaaaaaagaagggttgccctccagatgacatagaaaatcccagaggctccaaagatataaagaaaaataaaaatgtaaccaaccgtagcaaaggaacagcagagaagctcaagccagaggatattactcagatccaaccacagcagttggttttgcgattaagatcaggggagccacagacatttacattaaaattcaagagagctgaagactatcccattgacctctactaccttatggacctgtcttactcaatgaaagacgatttggagaatgtaaaaagtcttggaacagatctgatgaatgaaatgaggaggattacttcggacttcagaattggatttggctcatttgtggaaaagactgtgatgccttacattagcacaacaccagctaagctcaggaacccttgcacaagtgaacagaactgcaccagcccatttagctacaaaaatgtgctcagtcttactaataaaggagaagtatttaatgaacttgttggaaaacagcgcatatctggaaatttggattctccagaaggtggtttcgatgccatcatgcaagttgcagtttgtggatcactgattggctggaggaatgttacacggctgctggtgttttccacagatgccgggtttcactttgctggagatgggaaacttggtggcattgttttaccaaatgatggacaatgtcacctggaaaataatatgtacacaatgagccattattatgattatccttctattgctcaccttgtccagaaactgagtgaaaataatattcagacaatttttgcagttactgaagaatttcagcctgtttacaaggagctgaaaaacttgatccctaagtcagcagtaggaacattatctgcaaattctagcaatgtaattcagttgatcattgatgcatacaattccctttcctcagaagtcattttggaaaacggcaaattgtcagaaggagtaacaataagttacaaatcttactgcaagaacggggtgaatggaacaggggaaaatggaagaaaatgttccaatatttccattggagatgaggttcaatttgaaattagcataacttcaaataagtgtccaaaaaaggattctgacagctttaaaattaggcctctgggctttacggaggaagtagaggttattcttcagtacatctgtgaatgtgaatgccaaagcgaaggcatccctgaaagtcccaagtgtcatgaaggaaatgggacatttgagtgtggcgcgtgcaggtgcaatgaagggcgtgttggtagacattgtgaatgcagcacagatgaagttaacagtgaagacatggatgcttactgcaggaaagaaaacagttcagaaatctgcagtaacaatggagagtgcgtctgcggacagtgtgtttgtaggaagagggataatacaaatgaaatttattctggcaaattctgcgagtgtgataatttcaactgtgatagatccaatggcttaatttgtggaggaaatggtgtttgcaagtgtcgtgtgtgtgagtgcaaccccaactacactggcagtgcatgtgactgttctttggatactagtacttgtgaagccagcaacggacagatctgcaatggccggggcatctgcgagtgtggtgtctgtaagtgtacagatccgaagtttcaagggcaaacgtgtgagatgtgtcagacctgccttggtgtctgtgctgagcataaagaatgtgttcagtgcagagccttcaataaaggagaaaagaaagacacatgcacacaggaatgttcctattttaacattaccaaggtagaaagtcgggacaaattaccccagccggtccaacctgatcctgtgtcccattgtaaggagaaggatgttgacgactgttggttctattttacgtattcagtgaatgggaacaacgaggtcatggttcatgttgtggagaatccagagtgtcccactggtccagacatcattccaattgtagctggtgtggttgctggaattgttcttattggccttgcattactgctgatatggaagcttttaatgataattcatgacagaagggagtttgctaaatttgaaaaggagaaaatgaatgccaaatgggacacgggtgaaaatcctatttataagagtgccgtaacaactgtggtcaatccgaagtatgagggaaaatgagtactgcccgtgcaaatcccacaacactgaatgcaaagtagcaatttccatagtcacagttaggtagctttagggcaatattgccatggttttactcatgtgcaggttttgaaaatgtacaatatgtataatttttaaaatgttttattattttgaaaataatgttgtaattcatgccagggactgactttgaccttttcttcctggactattgaaatcaagcttattggattaagtgatatttctatagcgattgaaagggcaatagttaaagtaatgagcatgatgagagtttctgttaatcatgtattaaaactgatttttagctttacaaatatgtcagtttgcagttatgcagaatccaaagtaaatgtcctgctagctagttaaggattgttttaaatctgttattttgctatttgcctgttagacatgactgatgacatatctgaaagacaagtatgttgagagttgctggtgtaaaatacgtttgaaatagttgatctacaaaggccatgggaaaaattcagagagttaggaaggaaaaaccaatagctttaaaacctgtgtgccattttaagagttacttaatgtttggtaacttttatgccttcactttacaaattcaagccttagataaaagaaccgagcaattttctgctaaaaagtccttgatttagcactatttacatacaggccatactttacaaagtatttgctgaatggggaccttttgagttgaatttattttattatttttattttgtttaatgtctggtgctttctatcacctcttctaatcttttaatgtatttgtttgcaattttggggtaagactttttttatgagtactttttctttgaagttttagcggtcaatttgcctttttaatgaacatgtgaagttatactgtggctatgcaacagctctcacctacgcgagtcttactttgagttagtgccataacagaccactgtatgtttacttctcaccatttgagttgcccatcttgtttcacactagtcacattcttgttttaagtgcctttagttttaacagttcactttttacagtgctatttactgaagttatttattaaatatgcctaaaatacttaaatcgga

SEQ ID NO: 331545 - DNA, 3642 bp, Homo sapiens
  misc_feature (11)..(11): n is a, c, g, or t
ggacctgatcnagtttcaagtttttgctggtgtggtttggctccaaaacagaaatgaaaatagatgtttaaaagcaaatgccaaatcatgtggagaatgtatacaagcagggccaaattgtgggtggtgcacaaattcaacatttttacaggaaggaatgcctacttctgcacgatgtgatgatttagaagccttaaaaaagaagggttgccctccagatgacatagaaaatcccagaggctccaaagatataaagaaaaataaaaatgtaaccaaccgtagcaaaggaacagcagagaagctcaagccagaggatattactcagatccaaccacagcagttggttttgcgattaagatcaggggagccacagacatttacattaaaattcaagagagctgaagactatcccattgacctctactaccttatggacctgtcttactcaatgaaagacgatttggagaatgtaaaaagtcttggaacagatctgatgaatgaaatgaggaggattacttcggacttcagaattggatttggctcatttgtggaaaagactgtgatgccttacattagcacaacaccagctaagctcaggaacccttgcacaagtgaacagaactgcaccagcccatttagctacaaaaatgtgctcagtcttactaataaaggagaagtatttaatgaacttgttggaaaacagcgcatatctggaaatttggattctccagaaggtggtttcgatgccatcatgcaagttgcagtttgtggatcactgattggctggaggaatgttacacggctgctggtgttttccacagatgccgggtttcactttgctggagatgggaaacttggtggcattgttttaccaaatgatggacaatgtcacctggaaaataatatgtacacaatgagccattattatgattatccttctattgctcaccttgtccagaaactgagtgaaaataatattcagacaatttttgcagttactgaagaatttcagcctgtttacaaggagctgaaaaacttgatccctaagtcagcagtaggaacattatctgcaaattctagcaatgtaattcagttgatcattgatgcatacaattccctttcctcagaagtcattttggaaaacggcaaattgtcagaaggagtaacaataagttacaaatcttactgcaagaacggggtgaatggaacaggggaaaatggaagaaaatgttccaatatttccattggagatgaggttcaatttgaaattagcataacttcaaataagtgtccaaaaaaggattctgacagctttaaaattaggcctctgggctttacggaggaagtagaggttattcttcagtacatctgtgaatgtgaatgccaaagcgaaggcatccctgaaagtcccaagtgtcatgaaggaaatgggacatttgagtgtggcgcgtgcaggtgcaatgaagggcgtgttggtagacattgtgaatgcagcacagatgaagttaacagtgaagacatggatgcttactgcaggaaagaaaacagttcagaaatctgcagtaacaatggagagtgcgtctgcggacagtgtgtttgtaggaagagggataatacaaatgaaatttattctggcaaattctgcgagtgtgataatttcaactgtgatagatccaatggcttaatttgtggaggaaatggtgtttgcaagtgtcgtgtgtgtgagtgcaaccccaactacactggcagtgcatgtgactgttctttggatactagtacttgtgaagccagcaacggacagatctgcaatggccggggcatctgcgagtgtggtgtctgtaagtgtacagatccgaagtttcaagggcaaacgtgtgagatgtgtcagacctgccttggtgtctgtgctgagcataaagaatgtgttcagtgcagagccttcaataaaggagaaaagaaagacacatgcacacaggaatgttcctattttaacattaccaaggtagaaagtcgggacaaattaccccagccggtccaacctgatcctgtgtcccattgtaaggagaaggatgttgacgactgttggttctattttacgtattcagtgaatgggaacaacgaggtcatggttcatgttgtggagaatccagagtgtcccactggtccagacatcattccaattgtagctggtgtggttgctggaattgttcttattggccttgcattactgctgatatggaagcttttaatgataattcatgacagaagggagtttgctaaatttgaaaaggagaaaatgaatgccaaatgggacacgcaagaaaatccgatttacaagagtcctattaataatttcaagaatccaaactacggacgtaaagctggtctctaaattgccggtgaaaatcctatttataagagtgccgtaacaactgtggtcaatccgaagtatgagggaaaatgagtactgcccgtgcaaatcccacaacactgaatgcaaagtagcaatttccatagtcacagttaggtagctttagggcaatattgccatggttttactcatgtgcaggttttgaaaatgtacaatatgtataatttttaaaatgttttattattttgaaaataatgttgtaattcatgccagggactgacaaaagacttgagacaggatggttattcttgtcagctaaggtcacattgtgcctttttgaccttttcttcctggactattgaaatcaagcttattggattaagtgatatttctatagcgattgaaagggcaatagttaaagtaatgagcatgatgagagtttctgttaatcatgtattaaaactgatttttagctttacaaatatgtcagtttgcagttatgcagaatccaaagtaaatgtcctgctagctagttaaggattgttttaaatctgttattttgctatttgcctgttagacatgactgatgacatatctgaaagacaagtatgttgagagttgctggtgtaaaatacgtttgaaatagttgatctacaaaggccatgggaaaaattcagagagttaggaaggaaaaaccaatagctttaaaacctgtgtgccattttaagagttacttaatgtttggtaacttttatgccttcactttacaaattcaagccttagataaaagaaccgagcaattttctgctaaaaagtccttgatttagcactatttacatacaggccatactttacaaagtatttgctgaatggggaccttttgagttgaatttattttattatttttattttgtttaatgtctggtgctttctatcacctcttctaatcttttaatgtatttgtttgcaattttggggtaagactttttttatgagtactttttctttgaagttttagcggtcaatttgcctttttaatgaacatgtgaagttatactgtggctatgcaacagctctcacctacgcgagtcttactttgagttagtgccataacagaccactgtatgtttacttctcaccatttgagttgcccatcttgtttcacactagtcacattcttgttttaagtgcctttagttttaacagttcactttttacagtgctatttactgaagttatttattaaatatgcctaaaatacttaaatcgga

SEQ ID NO: 331546 - DNA, 3642 bp, Homo sapiens
  misc_feature (11)..(11): n is a, c, g, or t
ggacctgatcnagtttcaagtttttgctggtgtggtttggctccaaaacagaaatgaaaatagatgtttaaaagcaaatgccaaatcatgtggagaatgtatacaagcagggccaaattgtgggtggtgcacaaattcaacatttttacaggaaggaatgcctacttctgcacgatgtgatgatttagaagccttaaaaaagaagggttgccctccagatgacatagaaaatcccagaggctccaaagatataaagaaaaataaaaatgtaaccaaccgtagcaaaggaacagcagagaagctcaagccagaggatattactcagatccaaccacagcagttggttttgcgattaagatcaggggagccacagacatttacattaaaattcaagagagctgaagactatcccattgacctctactaccttatggacctgtcttactcaatgaaagacgatttggagaatgtaaaaagtcttggaacagatctgatgaatgaaatgaggaggattacttcggacttcagaattggatttggctcatttgtggaaaagactgtgatgccttacattagcacaacaccagctaagctcaggaacccttgcacaagtgaacagaactgcaccagcccatttagctacaaaaatgtgctcagtcttactaataaaggagaagtatttaatgaacttgttggaaaacagcgcatatctggaaatttggattctccagaaggtggtttcgatgccatcatgcaagttgcagtttgtggatcactgattggctggaggaatgttacacggctgctggtgttttccacagatgccgggtttcactttgctggagatgggaaacttggtggcattgttttaccaaatgatggacaatgtcacctggaaaataatatgtacacaatgagccattattatgattatccttctattgctcaccttgtccagaaactgagtgaaaataatattcagacaatttttgcagttactgaagaatttcagcctgtttacaaggagctgaaaaacttgatccctaagtcagcagtaggaacattatctgcaaattctagcaatgtaattcagttgatcattgatgcatacaattccctttcctcagaagtcattttggaaaacggcaaattgtcagaaggagtaacaataagttacaaatcttactgcaagaacggggtgaatggaacaggggaaaatggaagaaaatgttccaatatttccattggagatgaggttcaatttgaaattagcataacttcaaataagtgtccaaaaaaggattctgacagctttaaaattaggcctctgggctttacggaggaagtagaggttattcttcagtacatctgtgaatgtgaatgccaaagcgaaggcatccctgaaagtcccaagtgtcatgaaggaaatgggacatttgagtgtggcgcgtgcaggtgcaatgaagggcgtgttggtagacattgtgaatgcagcacagatgaagttaacagtgaagacatggatgcttactgcaggaaagaaaacagttcagaaatctgcagtaacaatggagagtgcgtctgcggacagtgtgtttgtaggaagagggataatacaaatgaaatttattctggcaaattctgcgagtgtgataatttcaactgtgatagatccaatggcttaatttgtggaggaaatggtgtttgcaagtgtcgtgtgtgtgagtgcaaccccaactacactggcagtgcatgtgactgttctttggatactagtacttgtgaagccagcaacggacagatctgcaatggccggggcatctgcgagtgtggtgtctgtaagtgtacagatccgaagtttcaagggcaaacgtgtgagatgtgtcagacctgccttggtgtctgtgctgagcataaagaatgtgttcagtgcagagccttcaataaaggagaaaagaaagacacatgcacacaggaatgttcctattttaacattaccaaggtagaaagtcgggacaaattaccccagccggtccaacctgatcctgtgtcccattgtaaggagaaggatgttgacgactgttggttctattttacgtattcagtgaatgggaacaacgaggtcatggttcatgttgtggagaatccagagtgtcccactggtccagacatcattccaattgtagctggtgtggttgctggaattgttcttattggccttgcattactgctgatatggaagcttttaatgataattcatgacagaagggagtttgctaaatttgaaaaggagaaaatgaatgccaaatgggacacgggtgaaaatcctatttataagagtgccgtaacaactgtggtcaatccgaagtatgagggaaaatgagtactgcccgtgcaaatcccacaacactgaatgcaaagtagcaatttccatagtcacagttaggtagctttagggcaatattgccatggttttactcatgtgcaggttttgaaaatgtacaatatgtataatttttaaaatgttttattattttgaaaataatgttgtaattcatgccagggactgacaaaagacttgagacaggatggttattcttgtcagctaaggtcacattgtgcctttttgaccttttcttcctggactattgaaatcaagcttattggattaagtgatatttctatagcgattgaaagggcaatagttaaagtaatgagcatgatgagagtttctgttaatcatgtattaaaactgatttttagctttacaaatatgtcagtttgcagttatgcagaatccaaagtaaatgtcctgctagctagttaaggattgttttaaatctgttattttgctatttgcctgttagacatgactgatgacatatctgaaagacaagtatgttgagagttgctggtgtaaaatacgtttgaaatagttgatctacaaaggccatgggaaaaattcagagagttaggaaggaaaaaccaatagctttaaaacctgtgtgccattttaagagttacttaatgtttggtaacttttatgccttcactttacaaattcaagccttagataaaagaaccgagcaattttctgctaaaaagtccttgatttagcactatttacatacaggccatactttacaaagtatttgctgaatggggaccttttgagttgaatttattttattatttttattttgtttaatgtctggtgctttctatcacctcttctaatcttttaatgtatttgtttgcaattttggggtaagactttttttatgagtactttttctttgaagttttagcggtcaatttgcctttttaatgaacatgtgaagttatactgtggctatgcaacagctctcacctacgcgagtcttactttgagttagtgccataacagaccactgtatgtttacttctcaccatttgagttgcccatcttgtttcacactagtcacattcttgttttaagtgcctttagttttaacagttcactttttacagtgctatttactgaagttatttattaaatatgcctaaaatacttaaatcggaaatcggatgtcttgactctgatgtattttatcaggttgtgtgcatgaaatttttatagattaaagaagttgaggaaaagca

SEQ ID NO: 331547 - DNA, 4268 bp, Homo sapiens
  misc_feature (11)..(11): n is a, c, g, or t
ggacctgatcnagtttcaagtttttgctggtgtggtttggctccaaaacagaaatgaaaatagatgtttaaaagcaaatgccaaatcatgtggagaatgtatacaagcagggccaaattgtgggtggtgcacaaattcaacatttttacaggaaggaatgcctacttctgcacgatgtgatgatttagaagccttaaaaaagaagggttgccctccagatgacatagaaaatcccagaggctccaaagatataaagaaaaataaaaatgtaaccaaccgtagcaaaggaacagcagagaagctcaagccagaggatattactcagatccaaccacagcagttggttttgcgattaagatcaggggagccacagacatttacattaaaattcaagagagctgaagactatcccattgacctctactaccttatggacctgtcttactcaatgaaagacgatttggagaatgtaaaaagtcttggaacagatctgatgaatgaaatgaggaggattacttcggacttcagaattggatttggctcatttgtggaaaagactgtgatgccttacattagcacaacaccagctaagctcaggaacccttgcacaagtgaacagaactgcaccagcccatttagctacaaaaatgtgctcagtcttactaataaaggagaagtatttaatgaacttgttggaaaacagcgcatatctggaaatttggattctccagaaggtggtttcgatgccatcatgcaagttgcagtttgtggatcactgattggctggaggaatgttacacggctgctggtgttttccacagatgccgggtttcactttgctggagatgggaaacttggtggcattgttttaccaaatgatggacaatgtcacctggaaaataatatgtacacaatgagccattattatgattatccttctattgctcaccttgtccagaaactgagtgaaaataatattcagacaatttttgcagttactgaagaatttcagcctgtttacaaggagctgaaaaacttgatccctaagtcagcagtaggaacattatctgcaaattctagcaatgtaattcagttgatcattgatgcatacaattccctttcctcagaagtcattttggaaaacggcaaattgtcagaaggagtaacaataagttacaaatcttactgcaagaacggggtgaatggaacaggggaaaatggaagaaaatgttccaatatttccattggagatgaggttcaatttgaaattagcataacttcaaataagtgtccaaaaaaggattctgacagctttaaaattaggcctctgggctttacggaggaagtagaggttattcttcagtacatctgtgaatgtgaatgccaaagcgaaggcatccctgaaagtcccaagtgtcatgaaggaaatgggacatttgagtgtggcgcgtgcaggtgcaatgaagggcgtgttggtagacattgtgaatgcagcacagatgaagttaacagtgaagacatggatgcttactgcaggaaagaaaacagttcagaaatctgcagtaacaatggagagtgcgtctgcggacagtgtgtttgtaggaagagggataatacaaatgaaatttattctggcaaattctgcgagtgtgataatttcaactgtgatagatccaatggcttaatttgtggaggaaatggtgtttgcaagtgtcgtgtgtgtgagtgcaaccccaactacactggcagtgcatgtgactgttctttggatactagtacttgtgaagccagcaacggacagatctgcaatggccggggcatctgcgagtgtggtgtctgtaagtgtacagatccgaagtttcaagggcaaacgtgtgagatgtgtcagacctgccttggtgtctgtgctgagcataaagaatgtgttcagtgcagagccttcaataaaggagaaaagaaagacacatgcacacaggaatgttcctattttaacattaccaaggtagaaagtcgggacaaattaccccagccggtccaacctgatcctgtgtcccattgtaaggagaaggatgttgacgactgttggttctattttacgtattcagtgaatgggaacaacgaggtcatggttcatgttgtggagaatccagagtgtcccactggtccagacatcattccaattgtagctggtgtggttgctggaattgttcttattggccttgcattactgctgatatggaagcttttaatgataattcatgacagaagggagtttgctaaatttgaaaaggagaaaatgaatgccaaatgggacacgggtgaaaatcctatttataagagtgccgtaacaactgtggtcaatccgaagtatgagggaaaatgagtactgcccgtgcaaatcccacaacactgaatgcaaagtagcaatttccatagtcacagttaggtagctttagggcaatattgccatggttttactcatgtgcaggttttgaaaatgtacaatatgtataatttttaaaatgttttattattttgaaaataatgttgtaattcatgccagggactgacaaaagacttgagacaggatggttattcttgtcagctaaggtcacattgtgcctttttgaccttttcttcctggactattgaaatcaagcttattggattaagtgatatttctatagcgattgaaagggcaatagttaaagtaatgagcatgatgagagtttctgttaatcatgtattaaaactgatttttagctttacaaatatgtcagtttgcagttatgcagaatccaaagtaaatgtcctgctagctagttaaggattgttttaaatctgttattttgctatttgcctgttagacatgactgatgacatatctgaaagacaagtatgttgagagttgctggtgtaaaatacgtttgaaatagttgatctacaaaggccatgggaaaaattcagagagttaggaaggaaaaaccaatagctttaaaacctgtgtgccattttaagagttacttaatgtttggtaacttttatgccttcactttacaaattcaagccttagataaaagaaccgagcaattttctgctaaaaagtccttgatttagcactatttacatacaggccatactttacaaagtatttgctgaatggggaccttttgagttgaatttattttattatttttattttgtttaatgtctggtgctttctatcacctcttctaatcttttaatgtatttgtttgcaattttggggtaagactttttttatgagtactttttctttgaagttttagcggtcaatttgcctttttaatgaacatgtgaagttatactgtggctatgcaacagctctcacctacgcgagtcttactttgagttagtgccataacagaccactgtatgtttacttctcaccatttgagttgcccatcttgtttcacactagtcacattcttgttttaagtgcctttagttttaacagttcactttttacagtgctatttactgaagttatttattaaatatgcctaaaatacttaaatcggaaaaaaaaaaaaaaaaaaaaaaaaaaaaaaaaaaaaaaaaaaaaaaaaaaaaaaaaaaaaaaaagaaaaaaaaaaaaaaagagaggagagagagacaaaaaaagaagaggagtgaggaaaggaggggcgagcaacatcacttacggggaagcaccaaatatcggaggaacagcggggggccactatataatggagagagaggggtacatatatatataacgggagggcgaggggagaccgcgccgtaaacaaacggagtcgagagaaggggaaaaaaaaggttgcaacaaaagggggacacacctgggagacagaggagacaccaaaaacacgcggagagagggggcaggcgcacccctatatgtgtgggccgagccacacgacaaaacacaggaggagacaaaatataacaagcccccacggaggggagggacaaatccacaccgaccctgccggaagcgtcgcctaacaacacgggcacgaaacacggatcaccacagcacagaagcatcagcacgaagacagctagatgaaaaaaagagagtggagcacataaggaggaacatcgctggcagcccgcgagacaactaatatctacgcgaggaggaaccagcagtcataacaagcgagcgacgcagagccgcgcaggaacgaaacaccagcagaaaaaacagaccaacgagacccaaagacgagagaagagagaat

SEQ ID NO: 331548 - DNA, 4231 bp, Homo sapiens
  misc_feature (11)..(11): n is a, c, g, or t
ggacctgatcnagtttcaagtttttgctggtgtggtttggctccaaaacagaaatgaaaatagatgtttaaaagcaaatgccaaatcatgtggagaatgtatacaagcagggccaaattgtgggtggtgcacaaattcaacatttttacaggaaggaatgcctacttctgcacgatgtgatgatttagaagccttaaaaaagaagggttgccctccagatgacatagaaaatcccagaggctccaaagatataaagaaaaataaaaatgtaaccaaccgtagcaaaggaacagcagagaagctcaagccagaggatattactcagatccaaccacagcagttggttttgcgattaagatcaggggagccacagacatttacattaaaattcaagagagctgaagactatcccattgacctctactaccttatggacctgtcttactcaatgaaagacgatttggagaatgtaaaaagtcttggaacagatctgatgaatgaaatgaggaggattacttcggacttcagaattggatttggctcatttgtggaaaagactgtgatgccttacattagcacaacaccagctaagctcaggaacccttgcacaagtgaacagaactgcaccagcccatttagctacaaaaatgtgctcagtcttactaataaaggagaagtatttaatgaacttgttggaaaacagcgcatatctggaaatttggattctccagaaggtggtttcgatgccatcatgcaagttgcagtttgtggatcactgattggctggaggaatgttacacggctgctggtgttttccacagatgccgggtttcactttgctggagatgggaaacttggtggcattgttttaccaaatgatggacaatgtcacctggaaaataatatgtacacaatgagccattattatgattatccttctattgctcaccttgtccagaaactgagtgaaaataatattcagacaatttttgcagttactgaagaatttcagcctgtttacaaggagctgaaaaacttgatccctaagtcagcagtaggaacattatctgcaaattctagcaatgtaattcagttgatcattgatgcatacaattccctttcctcagaagtcattttggaaaacggcaaattgtcagaaggagtaacaataagttacaaatcttactgcaagaacggggtgaatggaacaggggaaaatggaagaaaatgttccaatatttccattggagatgaggttcaatttgaaattagcataacttcaaataagtgtccaaaaaaggattctgacagctttaaaattaggcctctgggctttacggaggaagtagaggttattcttcagtacatctgtgaatgtgaatgccaaagcgaaggcatccctgaaagtcccaagtgtcatgaaggaaatgggacatttgagtgtggcgcgtgcaggtgcaatgaagggcgtgttggtagacattgtgaatgcagcacagatgaagttaacagtgaagacatggatgcttactgcaggaaagaaaacagttcagaaatctgcagtaacaatggagagtgcgtctgcggacagtgtgtttgtaggaagagggataatacaaatgaaatttattctggcaaattctgcgagtgtgataatttcaactgtgatagatccaatggcttaatttgtggaggaaatggtgtttgcaagtgtcgtgtgtgtgagtgcaaccccaactacactggcagtgcatgtgactgttctttggatactagtacttgtgaagccagcaacggacagatctgcaatggccggggcatctgcgagtgtggtgtctgtaagtgtacagatccgaagtttcaagggcaaacgtgtgagatgtgtcagacctgccttggtgtctgtgctgagcataaagaatgtgttcagtgcagagccttcaataaaggagaaaagaaagacacatgcacacaggaatgttcctattttaacattaccaaggtagaaagtcgggacaaattaccccagccggtccaacctgatcctgtgtcccattgtaaggagaaggatgttgacgactgttggttctattttacgtattcagtgaatgggaacaacgaggtcatggttcatgttgtggagaatccagagtgtcccactggtccagacatcattccaattgtagctggtgtggttgctggaattgttcttattggccttgcattactgctgatatggaagcttttaatgataattcatgacagaagggagtttgctaaatttgaaaaggagaaaatgaatgccaaatgggacacgggtgaaaatcctatttataagagtgccgtaacaactgtggtcaatccgaagtatgagggaaaatgagtactgcccgtgcaaatcccacaacactgaatgcaaagtagcaatttccatagtcacagttaggtagctttagggcaatattgccatggttttactcatgtgcaggttttgaaaatgtacaatatgtataatttttaaaatgttttattattttgaaaataatgttgtaattcatgccagggactgacaaaagacttgagacaggatggttattcttgtcagctaaggtcacattgtgcctttttgaccttttcttcctggactattgaaatcaagcttattggattaagtgatatttctatagcgattgaaagggcaatagttaaagtaatgagcatgatgagagtttctgttaatcatgtattaaaactgatttttagctttacaaatatgtcagtttgcagttatgcagaatccaaagtaaatgtcctgctagctagttaaggattgttttaaatctgttattttgctatttgcctgttagacatgactgatgacatatctgaaagacaagtatgttgagagttgctggtgtaaaatacgtttgaaatagttgatctacaaaggccatgggaaaaattcagagagttaggaaggaaaaaccaatagctttaaaacctgtgtgccattttaagagttacttaatgtttggtaacttttatgccttcactttacaaattcaagccttagataaaagaaccgagcaattttctgctaaaaagtccttgatttagcactatttacatacaggccatactttacaaagtatttgctgaatggggaccttttgagttgaatttattttattatttttattttgtttaatgtctggtgctttctatcacctcttctaatcttttaatgtatttgtttgcaattttggggtaagactttttttatgagtactttttctttgaagttttagcggtcaatttgcctttttaatgaacatgtgaagttatactgtggctatgcaacagctctcacctacgcgagtcttactttgagttagtgccataacagaccactgtatgtttacttctcaccatttgagttgcccatcttgtttcacactagtcacattcttgttttaagtgcctttagttttaacagttcactttttacagtgctatttactgaagttatttattaaatatgcctaaaatacttaaatcggaaaaaaaaaaaaaaaaaaaaaaaaaaagaaaaaaaaaaaaaaagagaggagagagagacaaaaaaagaagaggagtgaggaaaggaggggcgagcaacatcacttacggggaagcaccaaatatcggaggaacagcggggggccactatataatggagagagaggggtacatatatatataacgggagggcgaggggagaccgcgccgtaaacaaacggagtcgagagaaggggaaaaaaaaggttgcaacaaaagggggacacacctgggagacagaggagacaccaaaaacacgcggagagagggggcaggcgcacccctatatgtgtgggccgagccacacgacaaaacacaggaggagacaaaatataacaagcccccacggaggggagggacaaatccacaccgaccctgccggaagcgtcgcctaacaacacgggcacgaaacacggatcaccacagcacagaagcatcagcacgaagacagctagatgaaaaaaagagagtggagcacataaggaggaacatcgctggcagcccgcgagacaactaatatctacgcgaggaggaaccagcagtcataacaagcgagcgacgcagagccgcgcaggaacgaaacaccagcagaaaaaacagaccaacgagacccaaagacgagagaagagagaat

SEQ ID NO: 331549 - DNA, 3271 bp, Homo sapiens
  misc_feature (11)..(11): n is a, c, g, or t
  misc_feature (3251)..(3251): n is a, c, g, or t
ggacctgatcnagtttcaagtttttgctggtgtggtttggctccaaaacagaaatgaaaatagatgtttaaaagcaaatgccaaatcatgtggagaatgtatacaagcagggccaaattgtgggtggtgcacaaattcaacatttttacaggaaggaatgcctacttctgcacgatgtgatgatttagaagccttaaaaaagaagggttgccctccagatgacatagaaaatcccagaggctccaaagatataaagaaaaataaaaatgtaaccaaccgtagcaaaggaacagcagagaagctcaagccagaggatattactcagatccaaccacagcagttggttttgcgattaagatcaggggagccacagacatttacattaaaattcaagagagctgaagactatcccattgacctctactaccttatggacctgtcttactcaatgaaagacgatttggagaatgtaaaaagtcttggaacagatctgatgaatgaaatgaggaggattacttcggacttcagaattggatttggctcatttgtggaaaagactgtgatgccttacattagcacaacaccagctaagctcaggaacccttgcacaagtgaacagaactgcaccagcccatttagctacaaaaatgtgctcagtcttactaataaaggagaagtatttaatgaacttgttggaaaacagcgcatatctggaaatttggattctccagaaggtggtttcgatgccatcatgcaagttgcagtttgtggatcactgattggctggaggaatgttacacggctgctggtgttttccacagatgccgggtttcactttgctggagatgggaaacttggtggcattgttttaccaaatgatggacaatgtcacctggaaaataatatgtacacaatgagccattattatgattatccttctattgctcaccttgtccagaaactgagtgaaaataatattcagacaatttttgcagttactgaagaatttcagcctgtttacaaggagctgaaaaacttgatccctaagtcagcagtaggaacattatctgcaaattctagcaatgtaattcagttgatcattgatgcatacaattccctttcctcagaagtcattttggaaaacggcaaattgtcagaaggagtaacaataagttacaaatcttactgcaagaacggggtgaatggaacaggggaaaatggaagaaaatgttccaatatttccattggagatgaggttcaatttgaaattagcataacttcaaataagtgtccaaaaaaggattctgacagctttaaaattaggcctctgggctttacggaggaagtagaggttattcttcagtacatctgtgaatgtgaatgccaaagcgaaggcatccctgaaagtcccaagtgtcatgaaggaaatgggacatttgagtgtggcgcgtgcaggtgcaatgaagggcgtgttggtagacattgtgaatgcagcacagatgaagttaacagtgaagacatggatgcttactgcaggaaagaaaacagttcagaaatctgcagtaacaatggagagtgcgtctgcggacagtgtgtttgtaggaagagggataatacaaatgaaatttattctggcaaattctgcgagtgtgataatttcaactgtgatagatccaatggcttaatttgtggaggaaatggtgtttgcaagtgtcgtgtgtgtgagtgcaaccccaactacactggcagtgcatgtgactgttctttggatactagtacttgtgaagccagcaacggacagatctgcaatggccggggcatctgcgagtgtggtgtctgtaagtgtacagatccgaagtttcaagggcaaacgtgtgagatgtgtcagacctgccttggtgtctgtgctgagcataaagaatgtgttcagtgcagagccttcaataaaggagaaaagaaagacacatgcacacaggaatgttcctattttaacattaccaaggtagaaagtcgggacaaattaccccagccggtccaacctgatcctgtgtcccattgtaaggagaaggatgttgacgactgttggttctattttacgtattcagtgaatgggaacaacgaggtcatggttcatgttgtggagaatccagagtgtcccactggtccagacatcattccaattgtagctggtgtggttgctggaattgttcttattggccttgcattactgctgatatggaagcttttaatgataattcatgacagaagggagtttgctaaatttgaaaaggagaaaatgaatgccaaatgggacacgggtgaaaatcctatttataagagtgccgtaacaactgtggtcaatccgaagtatgagggaaaatgagtactgcccgtgcaaatcccacaacactgaatgcaaagtagcaatttccatagtcacagttaggtagctttagggcaatattgccatggttttactcatgtgcaggttttgaaaatgtacaatatgtataatttttaaaatgttttattattttgaaaataatgttgtaattcatgccagggactgacaaaagacttgagacaggatggttattcttgtcagctaaggtcacattgtgcctttttgaccttttcttcctggactattgaaatcaagcttattggattaagtgatatttctatagcgattgaaagggcaatagttaaagtaatgagcatgatgagagtttctgttaatcatgtattaaaactgatttttagctttacaaatatgtcagtttgcagttatgcagaatccaaagtaaatgtcctgctagctagttaaggattgttttaaatctgttattttgctatttgcctgttagacatgactgatgacatatctgaaagacaagtatgttgagagttgctggtgtaaaatacgtttgaaatagttgatctacaaaggccatgggaaaaattcagagagttaggaaggaaaaaccaatagctttaaaacctgtgtgccattttaagagttacttaatgtttggtaacttttatgccttcactttacaaattcaagccttagataaaagaaccgagcaattttctgctaaaaagtccttgatttagcactatttacatacaggccatactttacaaagtatttgctgaatggggaccttttgagttgaatttattttattatttttattttgtttaatgtctggtgctttctatcacctcttctaatcttttaatataangaggggccgagctcgattca

SEQ ID NO: 331550 - DNA, 2429 bp, Homo sapiens
  misc_feature (11)..(11): n is a, c, g, or t
ggacctgatcnagtttcaagtttttgctggtgtggtttggctccaaaacagaaatgaaaatagatgtttaaaagcaaatgccaaatcatgtggagaatgtatacaagcagggccaaattgtgggtggtgcacaaattcaacatttttacaggaaggaatgcctacttctgcacgatgtgatgatttagaagccttaaaaaagaagggttgccctccagatgacatagaaaatcccagaggctccaaagatataaagaaaaataaaaatgtaaccaaccgtagcaaaggaacagcagagaagctcaagccagaggatattactcagatccaaccacagcagttggttttgcgattaagatcaggggagccacagacatttacattaaaattcaagagagctgaagactatcccattgacctctactaccttatggacctgtcttactcaatgaaagacgatttggagaatgtaaaaagtcttggaacagatctgatgaatgaaatgaggaggattacttcggacttcagaattggatttggctcatttgtggaaaagactgtgatgccttacattagcacaacaccagctaagctcaggaacccttgcacaagtgaacagaactgcaccagcccatttagctacaaaaatgtgctcagtcttactaataaaggagaagtatttaatgaacttgttggaaaacagcgcatatctggaaatttggattctccagaaggtggtttcgatgccatcatgcaagttgcagtttgtggatcactgattggctggaggaatgttacacggctgctggtgttttccacagatgccgggtttcactttgctggagatgggaaacttggtggcattgttttaccaaatgatggacaatgtcacctggaaaataatatgtacacaatgagccattattatgattatccttctattgctcaccttgtccagaaactgagtgaaaataatattcagacaatttttgcagttactgaagaatttcagcctgtttacaaggagctgaaaaacttgatccctaagtcagcagtaggaacattatctgcaaattctagcaatgtaattcagttgatcattgatgcatacaattccctttcctcagaagtcattttggaaaacggcaaattgtcagaaggagtaacaataagttacaaatcttactgcaagaacggggtgaatggaacaggggaaaatggaagaaaatgttccaatatttccattggagatgaggttcaatttgaaattagcataacttcaaataagtgtccaaaaaaggattctgacagctttaaaattaggcctctgggctttacggaggaagtagaggttattcttcagtacatctgtgaatgtgaatgccaaagcgaaggcatccctgaaagtcccaagtgtcatgaaggaaatgggacatttgagtgtggcgcgtgcaggtgcaatgaagggcgtgttggtagacattgtgaatgcagcacagatgaagttaacagtgaagacatggatgcttactgcaggaaagaaaacagttcagaaatctgcagtaacaatggagagtgcgtctgcggacagtgtgtttgtaggaagagggataatacaaatgaaatttattctggcaaattctgcgagtgtgataatttcaactgtgatagatccaatggcttaatttgtggaggaaatggtgtttgcaagtgtcgtgtgtgtgagtgcaaccccaactacactggcagtgcatgtgactgttctttggatactagtacttgtgaagccagcaacggacagatctgcaatggccggggcatctgcgagtgtggtgtctgtaagtgtacagatccgaagtttcaagggcaaacgtgtgagatgtgtcagacctgccttggtgtctgtgctgagcataaagaatgtgttcagtgcagagccttcaataaaggagaaaagaaagacacatgcacacaggaatgttcctattttaacattaccaaggtagaaagtcgggacaaattaccccagccggtccaacctgatcctgtgtcccattgtaaggagaaggatgttgacgactgttggttctattttacgtattcagtgaatgggaacaacgaggtcatggttcatgttgtggagaatccagagtgtcccactggtccagacatcattccaattgtagctggtgtggttgctggaattgttcttattggccttgcattactgctgatatggaagcttttaatgataattcatgacagaaggtggttcctaaataccttttagtttaaaaaaaaatgcagataaaggctacctctgaattctcaatagattcatcatgtttgctcttaagtgtagctgtccacactgaaaacagccaatatgttgcctgaataaactgaattgtgaacatctaaaaaaaaaa

SEQ ID NO: 331551 - DNA, 1388 bp, Homo sapiens
  misc_feature (11)..(11): n is a, c, g, or t
ggacctgatcnagtttcaagtttttgctggtgtggtttggctccaaaacagaaatgaaaatagatgtttaaaagcaaatgccaaatcatgtggagaatgtatacaagcagggccaaattgtgggtggtgcacaaattcaacatttttacaggaaggaatgcctacttctgcacgatgtgatgatttagaagccttaaaaaagaagggttgccctccagatgacatagaaaatcccagaggctccaaagatataaagaaaaataaaaatgtaaccaaccgtagcaaaggaacagcagagaagctcaagccagaggatattactcagatccaaccacagcagttggttttgcgattaagatcaggggagccacagacatttacattaaaattcaagagagctgaagactatcccattgacctctactaccttatggacctgtcttactcaatgaaagacgatttggagaatgtaaaaagtcttggaacagatctgatgaatgaaatgaggaggattacttcggacttcagaattggatttggctcatttgtggaaaagactgtgatgccttacattagcacaacaccagctaagctcaggaacccttgcacaagtgaacagaactgcaccagcccatttagctacaaaaatgtgctcagtcttactaataaaggagaagtatttaatgaacttgttggaaaacagcgcatatctggaaatttggattctccagaaggtggtttcgatgccatcatgcaagttgcagtttgtggatcactgattggctggaggaatgttacacggctgctggtgttttccacagatgccgggtttcactttgctggagatgggaaacttggtggcattgttttaccaaatgatggacaatgtcacctggaaaataatatgtacacaatgagccattattatgattatccttctattgctcaccttgtccagaaactgagtgaaaataatattcagacaatttttgcagttactgaagaatttcagcctgtttacaaggagctgaaaaacttgatccctaagtcagcagtaggaacattatctgcaaattctagcaatgtaattcagttgatcattgatgcatacaattccctttcctcagaagtcattttggaaaacggcaaattgtcagaaggagtaacaataagttacaaatcttactgcaagaacggggtgaatggaacaggggaaaatggaagaaaatgttccaatatttccattggagatgagtcaatttgaaatcagcataacctcaaatcaccgagccattacgacctatgaccagctttaaaattaggccctctgggctattaccggaggacagtacgaggcagaccggtcagagtagcaggcaaccggacag

SEQ ID NO: 331552 - DNA, 801 bp, Homo sapiens
  misc_feature (11)..(11): n is a, c, g, or t
ggacctgatcnagtttcaagtttttgctggtgtggtttggctccaaaacagaaatgaaaatagatgtttaaaagcaaatgccaaatcatgtggagaatgtatacaagcagggccaaattgtgggtggtgcacaaattcaacatttttacaggaaggaatgcctacttctgcacgatgtgatgatttagaagccttaaaaaagaagggttgccctccagatgacatagaaaatcccagaggctccaaagatataaagaaaaataaaaatgtaaccaaccgtagcaaaggaacagcagagaagctcaagccagaggatattactcagatccaaccacagcagttggttttgcgattaagatcaggggagccacagacatttacattaaaattcaagagagctgaagactatcccattgacctctactaccttatggacctgtcttactcaatgaaagacgatttggagaatgtaaaaagtcttggaacagatctgatgaatgaaatgaggaggattacttcggacttcagaattggatttggctcatttgtggaaaagactgtgatgccttacattagcacaacaccagctaagctcaggaacccttgcacaagtgaacagaactgcaccagcccatttagctacaaaaatgtgctcagtcttattctcaccatttgagttgcccatcttgtttcacactagtcacattcttgttttaagtgcctttagttttaacagttcactttttacagtgctatttactgaagttatttattaaatatgcctaaaatacttaaatcgga

SEQ ID NO: 331553 - DNA, 150 bp, Homo sapiens
caatgccattctctcaccattgcttcagtggtatcttggatcacacagccaggccaaagaggcaaaggttctctctttttttttaaaacaaaaccccaaagagcttctacagaagcctccagaagcccaactcccactgtggtcacagcc

SEQ ID NO: 331554 - DNA, 138 bp, Homo sapiens
tatgaaatcaataattatttcgagaaagaaaacattattcatatatgtgtaccgattttattttccatacttttagagtgctgtattgcctgtggactttaaatatttaaattcctagtctgttattaatactaattt

SEQ ID NO: 331555 - DNA, 147 bp, Homo sapiens
ggccaagtcactggaaaccaggctcttaagtttgagcctggaaaagaacacgtgggactctgaagaggcggtgccaggacctcagagtgacagggcagggtccctgcacacaggggccttgcagggaaaagcacacatcttctgttg

SEQ ID NO: 331556 - DNA, 375 bp, Homo sapiens
tggtacgatctcagctcactgcaacctctgcctcccaggctcaagcgattctcctacctcagcctcctgagtagctgggattacaggtgcctgccagcacgctcagctaattttttgtatttttagtagagatggggttcaccattgttggccaggctggtcttgaactcctgacctcaagttatccacccaggttggcctcccaaagtgctgggattacaggcatgagccactgtgttgggcccatacttgagaatctttgattggatgtcagacattgtgaattttaccatgttaggtgttcaatatttttgtgttcccatagccttttttgatctttattatgggatagagttaaattacttggatatagtt

SEQ ID NO: 331557 - DNA, 580 bp, Homo sapiens
cctcctccctaccacctaaacctagtgctccacactctgtcctgcatgaaatgtcacctgtcagtttataaaatggaagacaccttctatgcacatctcatgggttaattcagtgccaatccccttgagtgccagtctctgtgcactgtcattctttaaagggtcttgctatggccaggtggtggtccctttaaatagccatcttggcatccaggaagtttctgacactccctaatgtgacctctccctctatctggctcttttttgattcttttcacatcccatgagtttcccactatcctctactgcagtgggagcactctgctgctgtggcaacagccattccagcatcagttgataaaaccagtatgtgcagaatggttcctcgagtgattcctaaaaagagaaggacctgccctgtcacattatctccaaacccagccctgagcccctcccactcggccatttaccccttctctagaatgacaggcttcaaattgtcctctgaagagagattctaccatcaatgatcaatgaagaggttatgtgatgagggagaggcctggctgggcaggcagtg

SEQ ID NO: 331558 - DNA, 334 bp, Homo sapiens
cttttgggtataatttgttaaggcctctgtatgccatataacacgttcaatagctatttatggtacaaagacagaagctaagtgatcataccattggaatacagaacgtgtccagcaagactgtaagtgaaaaagcgttgctagtttggcagggtctgaattactcatcctcgtgcccaagcttaatctagggaacatcatcttaaccatcctgggggtaatcaaggccataagttaaagcaacatagccaatatgtcccatttactgctagccaattaatatctggtcactgtacccaataggtgtcatgccagtgccttgtaacgtaataat

SEQ ID NO: 331559 - DNA, 289 bp, Homo sapiens
aaatttgaaagaaaaatggtatttatcatcagaaaaaataaattattgaaaattacaaaagaataatatgtgcacctctatttggaaatatatgagactagagatatttttgaaacaaaattaaataatagaaagcagaaagtattaactgttcaataatactggaagaaataacaaaaatcagttaactttcccaaagattgcagagtcaaatggtcttaaagagtagttattttaagccattaagttactactatttccctcagtatattcaatttttgaaagtata

SEQ ID NO: 331560 - DNA, 1537 bp, Homo sapiens
aggtacatgagtgaagtttcttacacttttaaaattgcattggcaaattttcttttgctttatgaacccctgttttgtcattatgatttttcacttgttttaacagtttcagatgtcaccttggaatagcactgtttattttggcctttttatgattgctgatgataggtacagtctaaaggccaaaagttgccacttcattgtgataacattgttgcaacattcctaatatattagagaatgatgtaaaataagaatgttagagaacatagcacattctcattcagtttataaacaatatttgaaaatttccagtgagaattaaaaaaggactagtgatgatatagcaaacctggacctgaaatttgggggtggggggtggggggatatctgttttgcagagaaaatttaccagcctccagcaaaatctctgcatcttgtactcaatagcaaccattagtattgtcatttaaaaagaatgaatcaaaaattcatacgtaatggaatgaaaagaggaaaactttctattaaacactgtcaagaaagacccattgctatctatcacctatgaaattaaacctaaaaaaatttttttttattgtaaaagcgactgctcgttgatgtctggaagtgatccagactttgtttcactgtgatccaaaaagttagacattccttccatttctcaagatttggtaacaatttttttttaagtcagcatttcatataatacataaaattaagacaaattaacttactgatatgtggccaatatcaacccttctcacccaacccaaacatgttctggagatagaaggacttatcctcaattatattccagtaaatttatctccataatctgttttatcccctaatgtatgatatatctcaccaaatttttctagaattgaataaaagcagtttttgcttaacttgaatttccttccacaaatacaaccttcagctcttccctctctgtttcccttttgcccacattgcaaatagtcttcataatagaaccctcactgcaacttaaaagggtcccatttcttaactcagcatttcatataccaagaacacttgcaaagatttcttcataatgtgattttttaatttttcagttccagaagcatttcctacagttcgaacgttattttttctctcagattttcaacttgaagctttgatttgcactgaattaacttggataaaattttagtttctctcttcagctaacagatttggaagcaaattacagtatacttgaataattcaggtactacctgttgacctggaattttagtgattctgggaaagttttccagacaaagacaccaatagagtgaagggttttttccccaattactattttattgttttttaaaatgcctttttaaaacttgtgtgatgtggcaaaatagtcatatgttcaattaatttatattttattcattccttttcaattctggttattatgtaacctcaagtactttatctgttcttttaaagtattttataaaatgaacgttaactaaaa

SEQ ID NO: 331561 - DNA, 525 bp, Homo sapiens
cttcctatccatgtatccattaggatcttctttgatatccttcctcagagttttctaattttcttcatatagatcttgtaaatattgtttttaacacttcaaaatacacttttcaaaaagtcttaaacagtgaagatttttaaaacattacactgaaaaatagtatctaaacaacactactgacccaacgtactaatactatgtcccttttgaaactacctatcaactaagaataatttagtaaaattcccatattccttgtagcagtttgaaactgtgactccaaatttctttgacgctcctccctcccattaagagctgaagtctgtatcctgttctcctaaaatcggagctctgtgattccttgatcaatatgagaaagttaaactgaggttatgtgtgtttccagcatcagaccttaagaaactatctgttttcactccctgtctcttagaatattgtttcttaggatgtttcacttttggaacccagccaccaagttgtaaaaaagaccaagctgtccca

SEQ ID NO: 331562 - DNA, 453 bp, Homo sapiens
tgagagaggtggctaagcttattttttaagtcattgggcaggatttctgccatttgtacctgaaagggtttgatacgcaatctcaatgaaagcaggatgactgatactcaggatcagcttctggctatgttttccaaaggaaagctctgtcttgcatgctcttttttctacccaagagccacccaactaaacctggcatcagcacagggactaagctgaggacattccatcttcccccaaagtggaagtgctcagaggaatattaacagtggctttatctagtctaattggccaaggcttacagttcttcaagaattccttccttgagatggttggccttctagatctgtggtttttaagtactggtctgaagacccctggtaagccaagaagatccccaaataaggttagcaattacggtttctttctggccttcattccatgccacactgt

SEQ ID NO: 331563 - DNA, 229 bp, Homo sapiens
tgaccttcaccaatgtctctctgtgtctggattcttctctgcctgaagcaagtccagagacaagcccacgagaggggcaggtggatccacaggttaccggagatgccacagctgtagggtgggccacattgagctcctccttctgcaggcagaggtgtgtccccctcatcaccctccatcaggacccccctcaaactgttctctggccactttcaggcacacagctctc

SEQ ID NO: 331564 - DNA, 465 bp, Homo sapiens
aagcgaaaaaaggaaggagcatgtaggatgccatggacctggtctaaaaatgacacacagtactttctctaatattccactggctggatttcatcttaatgggtatacctaactgcagggaattcatacctaactgcagcgaattcatacctaactgcaaggaattcatacctaactgcaaggtaatgtttagtggttcatccaagaataaaaggaaaagggtctagtaaacagtggttagcctgtgccaaaaacttccatatatacatgcttgtaaacaataatatttttagtgtttctgcccatactcaaggaaaaatttaagagtatatacaacagtctttgctctctagaaggctacaggttactatggattatagatgttgggaggaggtggaagtagtctatttactcctactcttcttaaggtattatttttactttgtaatagataggggaggggag

SEQ ID NO: 331565 - DNA, 248 bp, Homo sapiens
gggggtccccaccgcatgaaggacaggaccaaaacccagcagggtaatcaacaccctgcctctgtcatccaggaatccataccctaacctttttacatctctcccaccccatccatcactcagtgctcccagaacacatagccccactgcatgccctccctgtggtgaacttcttttcatcatacaaagcccagctaaaaagtcacttcctcaatgagtcctttccccaaggcatctccatggccacc

SEQ ID NO: 331566 - DNA, 452 bp, Homo sapiens
tggggtgtgtggggaagggaaaaatggaggcaggggtcccccagagtgaccagcagagggcagccccactgcggggaagaagggcccccaaacaactccatggacaatgtggacttcaccgcacctccccctgaacgaccccacagagccacaggcctcaacgacacttccctggatcccctggaagcctggcttgtcagagttggaggtagtcccagggaaagctaacaccctcacaatactggtgaggcccaaagagggaagccactcagctaggaacaggggctggttccagatgccagccttttttcgtgttagattttccagctgggctaggttcccctcccacactttccttcctgggacctccacacacaatgtctgagctatcaatagcaggacttggttgattgtacgaagcccaaatcatgtgcccccccctccaggaaggt

SEQ ID NO: 331567 - DNA, 380 bp, Homo sapiens
tcagtcctgttttacagtgttctggcgcacatgggagagagagattggtgccatcttccccaggctaggattggcaaggagaatgcagcaatagaagttaggtgaagcaagggtatccacgagagcatcgctgcagtgattggtcaccaggtccacgctggcagagcagctgagaggctggaggcaactctgggccaggaaaataggaggaaccaacgaaccagagatcatgttgaggaagagcaagctcaggggtgacagattgagaaaagtgggaagacaggaaactgagtcaaagtctagggctcaaatatgttctaaatggtggtgagatccaagctgcaacctacctaaggttaggtaacattagggaggcaatg

SEQ ID NO: 331568 - DNA, 330 bp, Homo sapiens
ccccttcatggcaggaggactaggagggtccaataaggcagtttaaacattgatgatgtcatcatggccatactattaaattttgtaaaaagcaaacagcaaaggtttccaggaaaactgatttttaaatcctagcattaaacaaaatagtacaacctcgctttatactaatatcaaaacacacttcctcctgcccacggagggtccctcctgatggggacttcgtcttacctttctttgaatccccaacaaagcacctggctccatgagggttgtctccaggacaactgaatgatactctgaaggggggatggcaaagctaactggccc

SEQ ID NO: 331569 - DNA, 425 bp, Homo sapiens
aagatttgtgaagctgtgtgacctgcctccttgcaactgccagagctgctcaaagctccaagattccctgctgggcagccacatacctgccaaagcattgtgttcaaggctctcaagaaaccagccatgaaaagcttcccacttcaggaaaaatcccttgcttgacttattcagagatcatggaggccaatacaactgcagaccagagaaaaaaaatctggctttgttgctgttaaaactcaattcaaagactcaggctccttgagatccctgcagggtgattttactattttcccagaggtaacccaattggagtctatctgactgtgccagtccagatattcatattttgtctttttcctctgtcttatcactgggggaaacagcttggaatttaggttcatgaatacaacctccttactgtt

SEQ ID NO: 331570 - DNA, 393 bp, Homo sapiens
ctggctcgagcgtggtggctcacgcctgttatcccagcacactgggaggtagaggcaggcggatcacttgaggtgaaatcaagttatcaagtccctgtgataagtcaaggttatgttaatagtcagttaactgggctctccaacagtctcagcacagggccagtaacaggaaaaatcaagtgattagagggtatgaactttcagccccaccacccatagaccaattgctgaacacatgaaagtgctgggagggtagtacacccagacagggcatggaagctccacacaccacaccacctcccctcacctaatacctcaccattatcaatctattcacctgtatcctttataataaaatcagcaaatgtgtttccctgaattctttgagccatc

SEQ ID NO: 331571 - DNA, 596 bp, Homo sapiens
ccccatgtacctacccattctcagcttccccagttatcagctcagagttctctcacttttactttgacccattcctgctgagattattttgaatcaaattcaagataatttttttttgtaaacatatcagtaagtatctctgaaagttgaggcctttttcttaacttttaatatgaaaattttccaacaaaataaacacttgtataatttttacctagattcagcagttaacatttttgccttatttgctttatctctcctctgtatatacattttattctgaaatatgtttgaaaataagttacccacattataacactttacccctaaataacttggtatgaatttcttcagcataaggacatttacttacctaaccacaatacaattatcatgctaagaaaatgagcagtaatccacactgttacctaaatccgttgtactttaaagtttcccaaaatgagatggtgttttaaaataagaaataactaggatattagtggaggaggttgtggtgaggaactatagccacaaaatatgtatgtgtatatagtaatcttgtggctgagattgagccactgtactccagcctgggt

SEQ ID NO: 331572 - DNA, 222 bp, Homo sapiens
actatataggcaatactagggtaaatattttacatagattaccttatttagtagctcttagctgctaaaaaaaaaaaaaaagataaagatgtccagtctagagtctcataattgtatggtaaacactaaaatggtggtatgatccagttgccatggaaacacaggggcggggccctcagctcagtttaggaaggagcagattactgagtggtgtctttaact

SEQ ID NO: 331573 - DNA, 249 bp, Homo sapiens
gtgcattctttcatttgtctcacagtcatcttcagaaagaacttgtgattccattgtgcaaattgggaaacgaaggttcaaagatctgtcaacatgaccaaagcaacataaactagtatgtgacagagctggtattctaacctagatctcatctaatgaaaccataactgctgcaataaaactggtgctgcagctctgaaaaagggtaaaaatctgatctttccatttaaaagcaatttaaacgtatcg

SEQ ID NO: 331574 - DNA, 346 bp, Homo sapiens
ttccctttgattccaccattccagtccataaatcaagttcatttttatgtgttgttttttagttcttgatgatgtaacttatatctttttttcagttttgtgtttcccatttagcataaacattcttagtaacttcagctatacagttctcatttgcaaggatcacataacattctatcaggttgttttatcttaatttttaagtttcctatcatttttggacattcgagttgtttctaattgtttactgttgtaaagccgcagcgaatgtctttgcacacaagtatttaccgaggacacactcacatcagaaggctcaatactaagttagagggagcttgctctg

SEQ ID NO: 331575 - DNA, 520 bp, Homo sapiens
agaacaaccagatatatgaagcaaacattgatagaactgaaggggaaattaacaacaacaacaacaacaacaacaacaacaacaaaaacaagaccaaggaactttaatacttcactttcagttatgaatagaacaattagacaaaagatcaataaaggagcaggacttgaacaacactatagaccaattggacgtgacagatatatatacagaacgctccacctaacaacagaagaatacatacttttttctagtgcacatgaaacactctccaagatagatcacatagtaagtcttaatacacttaagaagactgaaatcatacaaagtatcttctctgaccacagtgaaataaataaataaatgataaatgagtcaagagaaaatgggactaaggtacaaacaggcgtttctcaggataggaaacccaaataggcgctgagcatatgagaaatgcttgcgcccattagtaatctacgaaatgtaagtggagccatatccttcaggtggggggagatgt

SEQ ID NO: 331576 - DNA, 381 bp, Homo sapiens
caccattggaattttagagcctaaaggatggtaaaggggggtttaggaagcagagctctgttcctggtttagccagtagccccatgtggcctcaggcactgcgccttccccagcttcagtttccctgctgtaaagtgggtgatctccatgtcctccagccctttgagttcccagacagagagagcatgaggaccccatgaggggctcagtggccaagtgaggggagttaatggagccctttctggagggagtggggaggcaactattgggggtaaatggtgtttccctactggaggtggtgacagatgggtggggcccagggtctaggttgtaaaggagggctgtggggcctctgggaaatctggaccagaaatgttggga

SEQ ID NO: 331577 - DNA, 358 bp, Homo sapiens
gctgggtggaagaaagttgtgcccactcagagcctgctggtctctctcttctccacacttcagtgctatttataatcctctttaaatgcctcgaattcctggtccagactcacctgaggggagttcctgatgtgggggggtggggtgttggaagggggcagcggggaagcctcccagtctccccagaggaagtgagctgcctttgaaatctctgctggaagggaatgagggcgtgtatttgcctcctccagtgatccaggcaccctcctcaccccacccaaggagcagtaggtactctcaaagctggcaattaaaattccagaaccctccctacctgaggccttgttctctgccccag

SEQ ID NO: 331578 - DNA, 3294 bp, Homo sapiens
gggcgggtcttccggccctctcgaaaatcatttccggcatgagccggaagaccgtcccggatggcctcggggacggccagtgtgtggaggtgagctccgggattgccggcattcccgcttctgctggttgcttcatgctgcaggctgcggccgtcagccctcgctcgcattggtggcgctgaggtgccggggcagcaagtgacatgtcgtcgggcctccgcgccgctgacttcccccgctggaagcgccacatctcggagcaactgaggcgccgggaccggctgcagagacaggcgttcgaggagatcatcctgcagtataacaaattgctggaaaagtcagatcttcattcagtgttggcccagaaactacaggctgaaaagcatgacgtaccaaacaggcacgagataagtcccggacatgatggcacatggaatgacaatcagctacaagaaatggcccaactgaggattaagcaccaagaggaactgactgaattacacaagaaacgtggggagttagctcaactggtgattgacctgaataaccaaatgcagcggaaggacagggagatgcagatgaatgaagcaaaaattgcagaatgtttgcagactatctctgacctggagacggagtgcctagacctgcgcactaagctttgtgaccttgaaagagccaaccagaccctgaaggatgaatatgatgccctgcagatcacttttactgccttggagggaaaactgaggaaaactacggaagagaaccaggagctggtcaccagatggatggctgagaaagcccaggaagccaatcggcttaatgcagagaatgaaaaagactccaggaggcggcaagcccggctgcagaaagagcttgcagaagcagcaaaggaacctctaccagtcgaacaggatgatgacattgaggtcattgtggatgaaacttctgatcacacagaagagacctctcctgtgcgagccatcagcagagcagccacgagacgctctgtctcttccttcccagtcccccaggacaatgtggatactcatcctggttctggtaaagaagtgagggtaccagctactgccttgtgtgtcttcgatgcacatgatggggaagtcaacgctgtgcagttcagtccaggttcccggttactggccactggaggcatggaccgcagggttaagctttgggaagtatttggagaaaaatgtgagttcaagggttccctatctggcagtaatgcaggaattacaagcattgaatttgatagtgctggatcttacctcttagcagcttcaaatgattttgcaagccgaatctggactgtggatgattatcgattacggcacacactcacgggacacagtgggaaagtgctgtctgctaagttcctgctggacaatgcgcggattgtctcaggaagtcacgaccggactctcaaactctgggatctacgcagcaaagtctgcataaagacagtgtttgcaggatccagttgcaatgatattgtctgcacagagcaatgtgtaatgagtggacattttgacaagaaaattcgtttctgggacattcgatcagagagcatagttcgagagatggagctgttgggaaagattactgccctggacttaaacccagaaaggactgagctcctgagctgctcccgtgatgacttgctaaaagttattgatctccgaacaaatgctatcaagcagacattcagtgcacctgggttcaagtgcggctctgactggaccagagttgtcttcagccctgatggcagttacgtggcggcaggctctgctgagggctctctgtatatctggagtgtgctcacagggaaagtggaaaaggttctttcaaagcagcacagctcatccatcaatgcggtggcgtggtcgccctctggctcgcacgttgtcagtgtggacaaaggatgcaaagctgtgctgtgggcacagtactgacggggctctcagggctgggaggaccccagtgccctcctcagaagaagcacatgggctcctgcagccctgtcctggcaggtgatgtgctgggtatagcatggacctcccagagaagctcaagctatgtggcactgtagctttgccgtgaatgggatttctgaagatttgactgaggtctctcttggcctggaagaataacactgaaaaaacctgacgctgcggtcacttagcagaggctcaggttcttgccttgggaaacactactagctctgaccttccatacctcacttgggggagcacagggccccgctgggcctcctcaccaacggcagtgccaaaatcagcccccacatcaaggtggtgttctctgtgctttctctcgtccttccaaagtcggttctggcctaacgcatgtcccaacaccttgggttcatttgcccggtgaactcactttaagcattggattaacggaaactcccgaactacagacccctccctggtgggttgcatgaatgtgtctcattactgctgaaatgtcctcacatctcttccactgttcttcagagctttctggctctctttcccccacaaaattcgacatatttaaaaatctccgtgtggctttaaaaaatggttttttgtttttttgtttttttgaggtgggagaggatgtgtgaaaatcttttccagggaaatgggttcgctgcagaggtaaggatgtgttcctgtatcgatctgcagacacccagaaggtgggtgcacactgcatgcttgggggtgccaagggattcgagacctccaacatacttgtctgaaggtggtgattctggccatggcccctctgccaagcctgtgtgcgatgcccttggtgctttagtgcaagaagcctaggctcagaagcacagcagcgccatctttccgtttcaggggttgtgatgaaggccaaggaaaaacatttatctttactattttacctacgtataaagttttagttcattgggtgtgcgaaacaccctttttatcacttttaaatttgcactttattttttttcttccatgcttgttctctggacatttggggatgtgagtgttagagctggtgagagaggagtcaggcggccttcccaccgatggtcctggcctccacctgccctctcttccctgcctgatcaccgctttccaatttgcccttcagagaacttaagtcaaggagagttgaaattcacaggccagggcacatcttttatttatttcattatgttggccaacagaacttgattgtaaataataataaagaaatctgttatatacttttcaaactcca

SEQ ID NO: 331579 - DNA, 3351 bp, Homo sapiens
gggcgggtcttccggccctctcgaaaatcatttccggcatgagccggaagaccgtcccggatggcctcggggacggccagtgtgtggaggtgagctccgggattgccggcattcccgcttctgctggttgcttcatgctgcaggctgcggccgtcagccctcgctcgcattggtggcgctgaggtgccggggcagcaagtgacatgtcgtcgggcctccgcgccgctgacttcccccgctggaagcgccacatctcggagcaactgaggcgccgggaccggctgcagagacaggcgttcgaggagatcatcctgcagtataacaaattgctggaaaagtcagatcttcattcagtgttggcccagaaactacaggctgaaaagcatgacgtaccaaacaggcacgagataagtcccggacatgatggcacatggaatgacaatcagctacaagaaatggcccaactgaggattaagcaccaagaggaactgactgaattacacaagaaacgtggggagttagctcaactggtgattgacctgaataaccaaatgcagcggaaggacagggagatgcagatgaatgaagcaaaaattgcagaatgtttgcagactatctctgacctggagacggagtgcctagacctgcgcactaagctttgtgaccttgaaagagccaaccagaccctgaaggatgaatatgatgccctgcagatcacttttactgccttggagggaaaactgaggaaaactacggaagagaaccaggagctggtcaccagatggatggctgagaaagcccaggaagccaatcggcttaatgcagagaatgaaaaagactccaggaggcggcaagcccggctgcagaaagagcttgcagaagcagcaaaggaacctctaccagtcgaacaggatgatgacattgaggtcattgtggatgaaacttctgatcacacagaagagacctctcctgtgcgagccatcagcagagcagccactaagcgactctcgcagcctgctggaggccttctggattctatcactaatatctttgggagacgctctgtctcttccttcccagtcccccaggacaatgtggatactcatcctggttctggtaaagaagtgagggtaccagctactgccttgtgtgtcttcgatgcacatgatggggaagtcaacgctgtgcagttcagtccaggttcccggttactggccactggaggcatggaccgcagggttaagctttgggaagtatttggagaaaaatgtgagttcaagggttccctatctggcagtaatgcaggaattacaagcattgaatttgatagtgctggatcttacctcttagcagcttcaaatgattttgcaagccgaatctggactgtggatgattatcgattacggcacacactcacgggacacagtgggaaagtgctgtctgctaagttcctgctggacaatgcgcggattgtctcaggaagtcacgaccggactctcaaactctgggatctacgcagcaaagtctgcataaagacagtgtttgcaggatccagttgcaatgatattgtctgcacagagcaatgtgtaatgagtggacattttgacaagaaaattcgtttctgggacattcgatcagagagcatagttcgagagatggagctgttgggaaagattactgccctggacttaaacccagaaaggactgagctcctgagctgctcccgtgatgacttgctaaaagttattgatctccgaacaaatgctatcaagcagacattcagtgcacctgggttcaagtgcggctctgactggaccagagttgtcttcagccctgatggcagttacgtggcggcaggctctgctgagggctctctgtatatctggagtgtgctcacagggaaagtggaaaaggttctttcaaagcagcacagctcatccatcaatgcggtggcgtggtcgccctctggctcgcacgttgtcagtgtggacaaaggatgcaaagctgtgctgtgggcacagtactgacggggctctcagggctgggaggaccccagtgccctcctcagaagaagcacatgggctcctgcagccctgtcctggcaggtgatgtgctgggtatagcatggacctcccagagaagctcaagctatgtggcactgtagctttgccgtgaatgggatttctgaagatttgactgaggtctctcttggcctggaagaataacactgaaaaaacctgacgctgcggtcacttagcagaggctcaggttcttgccttgggaaacactactagctctgaccttccatacctcacttgggggagcacagggccccgctgggcctcctcaccaacggcagtgccaaaatcagcccccacatcaaggtggtgttctctgtgctttctctcgtccttccaaagtcggttctggcctaacgcatgtcccaacaccttgggttcatttgcccggtgaactcactttaagcattggattaacggaaactcccgaactacagacccctccctggtgggttgcatgaatgtgtctcattactgctgaaatgtcctcacatctcttccactgttcttcagagctttctggctctctttcccccacaaaattcgacatatttaaaaatctccgtgtggctttaaaaaatggttttttgtttttttgtttttttgaggtgggagaggatgtgtgaaaatcttttccagggaaatgggttcgctgcagaggtaaggatgtgttcctgtatcgatctgcagacacccagaaggtgggtgcacactgcatgcttgggggtgccaagggattcgagacctccaacatacttgtctgaaggtggtgattctggccatggcccctctgccaagcctgtgtgcgatgcccttggtgctttagtgcaagaagcctaggctcagaagcacagcagcgccatctttccgtttcaggggttgtgatgaaggccaaggaaaaacatttatctttactattttacctacgtataaagttttagttcattgggtgtgcgaaacaccctttttatcacttttaaatttgcactttattttttttcttccatgcttgttctctggacatttggggatgtgagtgttagagctggtgagagaggagtcaggcggccttcccaccgatggtcctggcctccacctgccctctcttccctgcctgatcaccgctttccaatttgcccttcagagaacttaagtcaaggagagttgaaattcacaggccagggcacatcttttatttatttcattatgttggccaacagaacttgattgtaaataataataaagaaatctgttatatacttttcaaactcca

SEQ ID NO: 331580 - DNA, 989 bp, Homo sapiens
gggcgggtcttccggccctctcgaaaatcatttccggcatgagccggaagaccgtcccggatggcctcggggacggccagtgtgtggaggtgagctccgggattgccggcattcccgcttctgctggttgcttcatgctgcaggctgcggccgtcagccctcgctcgcattggtggcgctgaggtgccggggcagcaagtgacatgtcgtcgggcctccgcgccgctgacttcccccgctggaagcgccacatctcggagcaactgaggcgccgggaccggctgcagagacaggcgttcgaggagatcatcctgcagtataacaaattgctggaaaagtcagatcttcattcagtgttggcccagaaactacaggctgaaaagcatgacgtaccaaacaggcacgagataagtcccggacatgatggcacatggaatgacaatcagctacaagaaatggcccaactgaggattaagcaccaagaggaactgactgaattacacaagaaacgtggggagttagctcaactggtgattgacctgaataaccaaatgcagcggaaggacagggagatgcagatgaatgaagcaaaaattgcagaatgtttgcagactatctctgacctggagacggagtgcctagacctgcgcactaagctttgtgaccttgaaagagccaaccagaccctgaaggatgaatatgatgccctgcagatcacttttactgccttggagggaaaactgaggaaaactacggaagagaaccaggagctggtcaccagatggatggctgagaaagcccaggaagccaatcggcttaatgcagagaatgaaaaagactccagtgaggcgggaatgcctggttgcagaaagagctcgcaagagccaccaaaggaccctctaccagtcgaacaggatgatgccattgggggcattgtggaggaaccttttgacacaacaaactgctggagcgcttctggaatctataat

SEQ ID NO: 331581 - DNA, 803 bp, Homo sapiens
  misc_feature (779)..(780): n is a, c, g, or t
tatgagaggccatgtgctatacattatttaaatatgtagtatttaatattattagtaaattagtaattactagtagatcaataagtagtattaactcagtctggaccaaaattaattctaggtttacttttaaactattaagataaatataggccattattgttagaacagatgaaattaatgcaaggaccaactttaagcagtctacacagattttgagtactttttgagaaggttgcactgcactctaatgcaactgtaactagaagaataaaatgataatagaatcttagttgacctgggctaggagtccagtttagtttatgattggctccacctgtctttaaggatgagtgtttccccatgaattaggcatttggagtgttcgcgcatcttgagctcttgggatgagaatgactgggtttgacacagggtgcttgtcttgcaggatgcacatgatggggaagtcaacgctgtgcagttcagtccaggttcccggttactggccactggaggcatggaccgcagggttaagctttgggaagtatttggaggtgagagcctgctgcatgttctcagactgaaaacttgagatgatgcacccttgcactgcagaaagaagctgtgttgctggcatctggttgaccttgctttcaggcactgtgaattgttcattttctcaaaacatacattttatgtaagggatcgtttgaccaaagcatcgtacatctcagttattctttacttccgagtggatgtttgctctcattttctttaannctagtaaccttgttgctgtgagg

SEQ ID NO: 331582 - DNA, 3350 bp, Homo sapiens
gggcgggtcttccggccctctcgaaaatcatttccggcatgagccggaagaccgtcccggatggcctcggggacggccagtgtgtggaggtgagctccgggattgccggcattcccgcttctgctggttgcttcatgctgcaggctgcggccgtcagccctcgctcgcattggtggcgctgaggtgccggggcagcaagtgacatgtcgtcgggcctccgcgccgctgacttcccccgctggaagcgccacatctcggagcaactgaggcgccgggaccggctgcagagacaggcgttcgaggagatcatcctgcagtataacaaattgctggaaaagtcagatcttcattcagtgttggcccagaaactacaggctgaaaagcatgacgtaccaaacaggcacgagataagtcccggacatgatggcacatggaatgacaatcagctacaagaaatggcccaactgaggattaagcaccaagaggaactgactgaattacacaagaaacgtggggagttagctcaactggtgattgacctgaataaccaaatgcagcggaaggacagggagatgcagatgaatgaagcaaaaaagagcttgcagaagcagcaaaggaacctctaccagtcgaacaggatgatgacattgaggtcattgtggatgaaacttctgatcacacagaagagacctctcctgtgcgagccatcagcagagcagccactaagcgactctcgcagcctgctggaggccttctggattctatcactaatatctttgggagacgctctgtctcttccttcccagtcccccaggacaatgtggatactcatcctggttctggtaaagaagtgagggtaccagctactgccttgtgtgtcttcgatgcacatgatggggaagtcaacgctgtgcagttcagtccaggttcccggttactggccactggaggcatggaccgcagggttaagctttgggaagtatttggagaaaaatgtgagttcaagggttccctatctggcagtaatgcaggaattacaagcattgaatttgatagtgctggatcttacctcttagcagcttcaaatgattttgcaagccgaatctggactgtggatgattatcgattacggcacacactcacgggacacagtgggaaagtgctgtctgctaagttcctgctggacaatgcgcggattgtctcaggaagtcacgaccggactctcaaactctgggatctacgcagcaaagtctgtgaggaaattcagtctctctgtctgtgtatatgcttagatgttagcgtggaggtgtgtgtttgcacgtcagagcctgcatttatgtaatatagtttgaatttcagatctggcttcatgtttagaggggcactgaggatagtgatagtttttcttgtttaaagcttcatttaagtgagtaactctgacaagtcagtggttagagggtggcagcattatgtaaacagccacgttggtgcctctgcttgattaatgatgtttgcatttctttcaggcataaagacagtgtttgcaggatccagttgcaatgatattgtctgcacagagcaatgtgtaatgagtggacattttgacaagaaaattcgtttctgggacattcgatcagagagcatagttcgagagatggagctgttgggaaagattactgccctggacttaaacccagaaaggactgagctcctgagctgctcccgtgatgacttgctaaaagttattgatctccgaacaaatgctatcaagcagacattcagtgcacctgggttcaagtgcggctctgactggaccagagttgtcttcagccctgatggcagttacgtggcggcaggctctgctgagggctctctgtatatctggagtgtgctcacagggaaagtggaaaaggttctttcaaagcagcacagctcatccatcaatgcggtggcgtggtcgccctctggctcgcacgttgtcagtgtggacaaaggatgcaaagctgtgctgtgggcacagtactgacggggctctcagggctgggaggaccccagtgccctcctcagaagaagcacatgggctcctgcagccctgtcctggcaggtgatgtgctgggtatagcatggacctcccagagaagctcaagctatgtggcactgtagctttgccgtgaatgggatttctgaagatttgactgaggtctctcttggcctggaagaataacactgaaaaaacctgacgctgcggtcacttagcagaggctcaggttcttgccttgggaaacactactagctctgaccttccatacctcacttgggggagcacagggccccgctgggcctcctcaccaacggcagtgccaaaatcagcccccacatcaaggtggtgttctctgtgctttctctcgtccttccaaagtcggttctggcctaacgcatgtcccaacaccttgggttcatttgcccggtgaactcactttaagcattggattaacggaaactcccgaactacagacccctccctggtgggttgcatgaatgtgtctcattactgctgaaatgtcctcacatctcttccactgttcttcagagctttctggctctctttcccccacaaaattcgacatatttaaaaatctccgtgtggctttaaaaaatggttttttgtttttttgtttttttgaggtgggagaggatgtgtgaaaatcttttccagggaaatgggttcgctgcagaggtaaggatgtgttcctgtatcgatctgcagacacccagaaggtgggtgcacactgcatgcttgggggtgccaagggattcgagacctccaacatacttgtctgaaggtggtgattctggccatggcccctctgccaagcctgtgtgcgatgcccttggtgctttagtgcaagaagcctaggctcagaagcacagcagcgccatctttccgtttcaggggttgtgatgaaggccaaggaaaaacatttatctttactattttacctacgtataaagttttagttcattgggtgtgcgaaacaccctttttatcacttttaaatttgcactttattttttttcttccatgcttgttctctggacatttggggatgtgagtgttagagctggtgagagaggagtcaggcggccttcccaccgatggtcctggcctccacctgccctctcttccctgcctgatcaccgctttccaatttgcccttcagagaacttaagtcaaggagagttgaaattcacaggccagggcacatcttttatttatttcattatgttggccaacagaacttgattgtaaataataataaagaaatctgttatatacttttcaaactcca

SEQ ID NO: 331583 - DNA, 3676 bp, Homo sapiens
gggcgggtcttccggccctctcgaaaatcatttccggcatgagccggaagaccgtcccggatggcctcggggacggccagtgtgtggaggtgagctccgggattgccggcattcccgcttctgctggttgcttcatgctgcaggctgcggccgtcagccctcgctcgcattggtggcgctgaggtgccggggcagcaagtgacatgtcgtcgggcctccgcgccgctgacttcccccgctggaagcgccacatctcggagcaactgaggcgccgggaccggctgcagagacaggcgttcgaggagatcatcctgcagtataacaaattgctggaaaagtcagatcttcattcagtgttggcccagaaactacaggctgaaaagcatgacgtaccaaacaggcacgagataagtcccggacatgatggcacatggaatgacaatcagctacaagaaatggcccaactgaggattaagcaccaagaggaactgactgaattacacaagaaacgtggggagttagctcaactggtgattgacctgaataaccaaatgcagcggaaggacagggagatgcagatgaatgaagcaaaaattgcagaatgtttgcagactatctctgacctggagacggagtgcctagacctgcgcactaagctttgtgaccttgaaagagccaaccagaccctgaaggatgaatatgatgccctgcagatcacttttactgccttggagggaaaactgaggaaaactacggaagagaaccaggagctggtcaccagatggatggctgagaaagcccaggaagccaatcggcttaatgcagagaatgaaaaagactccaggaggcggcaagcccggctgcagaaagagcttgcagaagcagcaaaggaacctctaccagtcgaacaggatgatgacattgaggtcattgtggatgaaacttctgatcacacagaagagacctctcctgtgcgagccatcagcagagcagccactaagcgactctcgcagcctgctggaggccttctggattctatcactaatatctttgggagacgctctgtctcttccttcccagtcccccaggacaatgtggatactcatcctggttctggtaaagaagtgagggtaccagctactgccttgtgtgtcttcgatgcacatgatggggaagtcaacgctgtgcagttcagtccaggttcccggttactggccactggaggcatggaccgcagggttaagctttgggaagtatttggagaaaaatgtgagttcaagggttccctatctggcagtaatgcaggaattacaagcattgaatttgatagtgctggatcttacctcttagcagcttcaaatgattttgcaagccgaatctggactgtggatgattatcgattacggcacacactcacgggacacagtgggaaagtgctgtctgctaagttcctgctggacaatgcgcggattgtctcaggaagtcacgaccggactctcaaactctgggatctacgcagcaaagtctgcataaagacagtgtttgcaggatccagttgcaatgatattgtctgcacagagcaatgtgtaatgagtggacattttgacaagaaaattcgtttctgggacattcgatcagagagcatagttcgagagatggagctgttgggaaagattactgccctggacttaaacccagaaaggactgagctcctgagctgctcccgtgatgacttgctaaaagttattgatctccgaacaaatgctatcaagcagacattcagtgcacctgggttcaagtgcggctctgactggaccagagttgtcttcagccctgatggcagttacgtggcggcaggctctgctgagggctctctgtatatctggagtgtgctcacagggaaagtggaaaaggttctttcaaagcagcacagctcatccatcaatgcggtggcgtggtcgccctctggctcgcacgttgtcagtgtggacaaaggatgcaaagctgtgctgtgggcacagtactgacggggctctcagggctgggaggaccccagtgccctcctcagaagaagcacatgggctcctgcagccctgtcctggcaggtgatgtgctgggtatagcatggacctcccagagaagctcaagctatgtggcactgtagctttgccgtgaatgggatttctgaagatttgactgaggtctctcttggcctggaagaataacactgaaaaaacctgacgctgcggtcacttagcagaggctcaggttcttgccttgggaaacactactagctctgaccttccatacctcacttgggggagcacagggccccgctgggcctcctcaccaacggcagtgccaaaatcagcccccacatcaaggtggtgttctctgtgctttctctcgtccttccaaagtcggttctggcctaacgcatgtcccaacaccttgggttcatttgcccggtgaactcactttaagcattggattaacggaaactcccgaactacagacccctccctggtgggttgcatgaatgtgtctcattactgctgaaatgtcctcacatctcttccactgttcttcagagctttctggctctctttcccccacaaaattcgacatatttaaaaatctccgtgtggctttaaaaaatggttttttgtttttttgtttttttgaggtgggagaggatgtgtgaaaatcttttccagggaaatgggttcgctgcagaggtaaggatgtgttcctgtatcgatctgcagacacccagaaggtgggtgcacactgcatgcttgggggtgccaagggattcgagacctccaacatacttgtctgaaggtggtgattctggccatggcccctctgccaagcctgtgtgcgatgcccttggtgctttagtgcaagaagcctaggctcagaagcacagcagcgccatctttccgtttcaggggttgtgatgaaggccaaggaaaaacatttatctttactattttacctacgtataaagttttagttcattgggtgtgcgaaacaccctttttatcacttttaaatttgcactttattttttttcttccatgcttgttctctggacatttggggatgtgagtgttagagctggtgagagaggagtcaggcggccttcccaccgatggtcctggcctccacctgccctctcttccctgcctgatcaccgctttccaatttgcccttcagagaacttaagtcaaggagagttgaaattcacaggccagggcacatcttttatttatttcattatgttggccaacagaacttgattgtaaataataataaagaaatctgttatatacttttcaaactccatgcctcttggtgattattttattctcccttatccttagaaaggggaaagaaagtgatttctttgtttacctggtagttatttgtaaacaacggctagtactttttaacggtctctttttcattcatcatgtaagctccattccacaaagtatctctctctgtaaacaccagtgttccagtttcatgtcgcgcaaatcttaacggacattggaaagatgtttcttcagaacattaccagctgcagtagaagagcccagcacggattgctcttcagccctctgcacggagcctctctccagtgaactgccgcagcagagaggcattc

SEQ ID NO: 331584 - DNA, 2249 bp, Homo sapiens
ccggtttagacctcagtcggcgctgtgagggcactgtccgcccacctgctcggctggctgagctaggtcagtggagagaagctggggccactcacacagcacagcaggccacagtctacagagtacgccaggtagagcggttagagtggcagccgctggagaaagggttatagaaacacatccctgactctttggttatgtcccacgtcctctgtgtctccttccccttccctactctccttcctttctgcctccctgtctcccttggaagtccctgttgtcagtgcatttcagtgcattgacgtgtcctaaacactgatctccacacaccttcttttatcttccacctgataggcaggccccagacccccttttttcctagctttgttctgcccacacaagcccacctggctagttggaacccagataccattttccttcagaacctctctccctgtccttgggcagcagcaactgctcccagacctaaccagtgctgaccaccactgcccggctcttcagaggcatgtgtactgtctttccagctcactcagagctcctctcttagggagagtgtgataaggcctgactgccagaggggccaaactcccttcatcccagcatgacttaattaagtacaccactggattttttctgaggtcttttgcatgttagtgagctcctgccttgtcgcgggcacagtgccagagagtaaaatggaagttggaaaaattaggactccctgaatgcacaagcttctggtgtttggtttaccaagatctcatcccaaatgttctgaaacttggtgcttttctgatctctcctttgaagctcatccatcaatgcggtggcgtggtcgccctctggctcgcacgttgtcagtgtggacaaaggatgcaaagctgtgctgtgggcacagtactgacggggctctcagggctgggaggaccccagtgccctcctcagaagaagcacatgggctcctgcagccctgtcctggcaggtgatgtgctgggtatagcatggacctcccagagaagctcaagctatgtggcactgtagctttgccgtgaatgggatttctgaagatttgactgaggtctctcttggcctggaagaataacactgaaaaaacctgacgctgcggtcacttagcagaggctcaggttcttgccttgggaaacactactagctctgaccttccatacctcacttgggggagcacagggccccgctgggcctcctcaccaacggcagtgccaaaatcagcccccacatcaaggtggtgttctctgtgctttctctcgtccttccaaagtcggttctggcctaacgcatgtcccaacaccttgggttcatttgcccggtgaactcactttaagcattggattaacggaaactcccgaactacagacccctccctggtgggttgcatgaatgtgtctcattactgctgaaatgtcctcacatctcttccactgttcttcagagctttctggctctctttcccccacaaaattcgacatatttaaaaatctccgtgtggctttaaaaaatggttttttgtttttttgtttttttgaggtgggagaggatgtgtgaaaatcttttccagggaaatgggttcgctgcagaggtaaggatgtgttcctgtatcgatctgcagacacccagaaggtgggtgcacactgcatgcttgggggtgccaagggattcgagacctccaacatacttgtctgaaggtggtgattctggccatggcccctctgccaagcctgtgtgcgatgcccttggtgctttagtgcaagaagcctaggctcagaagcacagcagcgccatctttccgtttcaggggttgtgatgaaggccaaggaaaaacatttatctttactattttacctacgtataaagttttagttcattgggtgtgcgaaacaccctttttatcacttttaaatttgcactttattttttttcttccatgcttgttctctggacatttggggatgtgagtgttagagctggtgagagaggagtcaggcggccttcccaccgatggtcctggcctccacctgccctctcttccctgcctgatcaccgctttccaatttgcccttcagagaacttaagtcaaggagagttgaaattcacaggccagggcacatcttttatttatttcattatgttggccaacagaacttgattgtaaataataataaagaaatctgttatatacttttcaaactcca

SEQ ID NO: 331585 - DNA, 2775 bp, Homo sapiens
gggcgggtcttccggccctctcgaaaatcatttccggcatgagccggaagaccgtcccggatggcctcggggacggccagtgtgtggaggtgagctccgggattgccggcattcccgcttctgctggttgcttcatgctgcaggctgcggccgtcagccctcgctcgcattggtggcgctgaggtgccggggcagcaagtgacatgtcgtcgggcctccgcgccgctgacttcccccgctggaagcgccacatctcggagcaactgaggcgccgggaccggctgcagagacaggcgttcgaggagatcatcctgcagtataacaaattgctggaaaagtcagatcttcattcagtgttggcccagaaactacaggctgaaaagcatgacgtaccaaacaggcacgagataagtcccggacatgatggcacatggaatgacaatcagctacaagaaatggcccaactgaggattaagcaccaagaggaactgactgaattacacaagaaacgtggggagttagctcaactggtgattgacctgaataaccaaatgcagcggaaggacagggagatgcagatgaatgaagcaaaaattgcagaatgtttgcagactatctctgacctggagacggagtgcctagacctgcgcactaagctttgtgaccttgaaagagccaaccagaccctgaaggatgaatatgatgccctgcagatcacttttactgccttggagggaaaactgaggaaaactacggaagagaaccaggagctggtcaccagatggatggctgagaaagcccaggaagccaatcggcttaatgcagagaatgaaaaagactccaggaggcggcaagcccggctgcagaaagagcttgcagaagcagcaaaggaacctctaccagtcgaacaggatgatgacattgaggtcattgtggatgaaacttctgatcacacagaagagacctctcctgtgcgagccatcagcagagcagccactaagcgactctcgcagcctgctggaggccttctggattctatcactaatatctttgggagacgctctgtctcttccttcccagtcccccaggacaatgtggatactcatcctggttctggtaaagaagtgagggtaccagctactgccttgtgtgtcttcgatgcacatgatggggaagtcaacgctgtgcagttcagtccaggttcccggttactggccactggaggcatggaccgcagggttaagctttgggaagtatttggagaaaaatgtgagttcaagggttccctatctggcagtaatgcaggaattacaagcattgaatttgatagtgctggatcttacctcttagcagcttcaaatgattttgcaagccgaatctggactgtggatgattatcgattacggcacacactcacgggacacagtgggaaagtgctgtctgctaagttcctgctggacaatgcgcggattgtctcaggaagtcacgaccggactctcaaactctgggatctacgcagcaaagtctgcataaagacagtgtttgcaggatccagttgcaatgatattgtctgcacagagcaatgtgtaatgagtggacattttgacaagaaaattcgtttctgggacattcgatcagagagcatagttcgagagatggagctgttgggaaagattactgccctggacttaaacccagaaaggactgagctcctgagctgctcccgtgatgacttgctaaaagttattgatctccgaacaaatgctatcaagcagacattcagtgcacctgggttcaagtgcggctctgactggaccagagttgtcttcagccctgatggcagttacgtggcggcaggctctgctgagggctctctgtatatctggagtgtgctcacagggaaagtggaaaaggttctttcaaagcagcacagctcatccatcaatgcggtggcgtggtcgccctctggctcgcacgttgtcagtgtggacaaaggatgcaaagctgtgctgtgggcacagtactgacggggctctcagggctgggaggaccccagtgccctcctcagaagaagcacatgggctcctgcagccctgtcctggcaggtgatgtgctgggtatagcatggacctcccagagaagctcaagctatgtggcactgtagctttgccgtgaatgggatttctgaagatttgactgaggtctctcttggcctggaagaataacactgaaaaaacctgacgctgcggtcacttagcagaggctcaggttcttgccttgggaaacactactagctctgaccttccatacctcacttgggggagcacagggccccgctgggcctcctcaccaacagcagcgccatctttccgtttcaggggttgtgatgaaggccaaggaaaaacatttatctttactattttacctacgtataaagttttagttcattgggtgtgcgaaacaccctttttatcacttttaaatttgcactttattttttttcttccatgcttgttctctggacatttggggatgtgagtgttagagctggtgagagaggagtcaggcggccttcccaccgatggtcctggcctccacctgccctctcttccctgcctgatcaccgctttccaatttgcccttcagagaacttaagtcaaggagagttgaaattcacaggccagggcacatcttttatttatttcattatgttggccaacagaacttgattgtaaataataataaagaaatctgttatatacttttcaaactcca

SEQ ID NO: 331586 - DNA, 447 bp, Homo sapiens
aagaacaaacattccttcttgggaaaaaggccacagagatgctgaattgggggtggggaattgacaacctttcttttcttactgtcttctgtagccctgatggcagttacgtggcggcaggctctgctgagggctctctgtatatctggagtgtgctcacagggaaagtggaaaaggttctttcaaagcagcacaggtaagatgaaccctgtctcagccccccgttgcgttgtgagcaaggcctttgacttcatctcaggggtcatccggtttagacctcagtcggcgctgtgagggcactgtccgcccacctgctcggctggctgagctaggtcagtggagagaagctggggccactcacacagcacagcaggccacagtctacagagtacgccaggtagagcggttagagtggcagccgctggagaaagggttatagaaacacat

SEQ ID NO: 331587 - DNA, 322 bp, Homo sapiens
ccctgttgtcagtgcatttcagtgcattgacgtgtcctaaacactgatctccacacaccttcttttatcttccacctgataggcaggccccagacccccttttttcctagctttgttctgcccacacaagcccacctggctagttggaacccagataccattttccttcagaacctctctccctgtccttgggcagcagcaactgctcccagacctaaccagtgctgaccaccactgcccggctcttcagaggcatgtgtactgtctttccagctcactcagagctcctctcttagggagagtgtgataaggcctgactgcc

SEQ ID NO: 331588 - DNA, 312 bp, Homo sapiens
gctggttgcttcatgctgcaggctgcggccgtcagccctcgctcgcattggtggcgctgaggtgccggggcagcaagtgacatgtcgtcgggcctccgcgccgctgacttcccccgctggaagcgccacatctcggagcaactgaggcgccgggaccggctgcagagacaggcgttcgaggagatcatcctgcagtgtgagcggcgccggtgcgggctgggagtggggcgggcgggccccgcggaggcatgcggggcgtcagcgggaacctgaggccgagtccctggcgccgcccgcacgcatggcggccgc

SEQ ID NO: 331589 - DNA, 304 bp, Homo sapiens
tccatgtgtttcatgtctcctcctttccactcatagtgcctgtaaccgcagctgctggagacacccgaatggtttattggctttgtgaacatgtttctggagttatggtttcattgcctaattggaaaggtttggagtctcatttttccccctccgttttttgcacattctcttcatctgcctggtttgccaatttagtcccggacatgatggcacatggaatgacaatcagctacaagaaatggcccaactgaggattaagcaccaagaggaactgactgaattacacaagaaacgtggggag

SEQ ID NO: 331590 - DNA, 4292 bp, Homo sapiens
gggcgggtcttccggccctctcgaaaatcatttccggcatgagccggaagaccgtcccggatggcctcggggacggccagtgtgtggaggtgagctccgggattgccggcattcccgcttctgctggttgcttcatgctgcaggctgcggccgtcagccctcgctcgcattggtggcgctgaggtgccggggcagcaagtgacatgtcgtcgggcctccgcgccgctgacttcccccgctggaagcgccacatctcggagcaactgaggcgccgggaccggctgcagagacaggcgttcgaggagatcatcctgcagtataacaaattgctggaaaagtcagatcttcattcagtgttggcccagaaactacaggctgaaaagcatgacgtaccaaacaggcacgagataagtcccggacatgatggcacatggaatgacaatcagctacaagaaatggcccaactgaggattaagcaccaagaggaactgactgaattacacaagaaacgtggggagttagctcaactggtgattgacctgaataaccaaatgcagcggaaggacagggagatgcagatgaatgaagcaaaaattgcagaatgtttgcagactatctctgacctggagacggagtgcctagacctgcgcactaagctttgtgaccttgaaagagccaaccagaccctgaaggatgaatatgatgccctgcagatcacttttactgccttggagggaaaactgaggaaaactacggaagagaaccaggagctggtcaccagatggatggctgagaaagcccaggaagccaatcggcttaatgcagagaatgaaaaagactccaggaggcggcaagcccggctgcagaaagagcttgcagaagcagcaaaggaacctctaccagtcgaacaggatgatgacattgaggtcattgtggatgaaacttctgatcacacagaagagacctctcctgtgcgagccatcagcagagcagccacgtaagtaggcaggtttgggccagggaaaagacagcttgaggagcaatatgaaggcacatctgtggacatgacaaagaatgcagtcagatgcacccaaccccttaccccttttctgggacacccagcgtcgaacacaccacagaggtgtccagtctttctcagttcacctctgcttaatgggagggaagcagaacacgggtggcttcaaatgcttctaaatacaaaaaaatgtagtggcttactcaaatatggacagtgaaaccttattaagcagaatgattgtttaggtttgatcatcctgtttcattcttactagggcttccccccgcccgcaccgcccttcaagagtggggattggttactaacagtcagaaattgtgaagttagttagccaggaattgtgaggttagttgtctaatgctttatttccagggaaattaatttaatactagggaaccttgtttcttttgaaacttctaggctgggttttccctttcccttcccactgttttctggcagtttggtactgtgttgggtttctcttggctggggtttgggaactaagtgggaaacatattcccagttacctgtttttgtgggctgtttattgattgattatttgggcaaaatgtttctaaggtttaaacctatcctcccctcctctttagtaagcgactctcgcagcctgctggaggccttctggattctatcactaatatctttgggagacgctctgtctcttccttcccagtcccccaggacaatgtggatactcatcctggttctggtaaagaagtgagggtaccagctactgccttgtgtgtcttcgatgcacatgatggggaagtcaacgctgtgcagttcagtccaggttcccggttactggccactggaggcatggaccgcagggttaagctttgggaagtatttggagaaaaatgtgagttcaagggttccctatctggcagtaatgcaggaattacaagcattgaatttgatagtgctggatcttacctcttagcagcttcaaatgattttgcaagccgaatctggactgtggatgattatcgattacggcacacactcacgggacacagtgggaaagtgctgtctgctaagttcctgctggacaatgcgcggattgtctcaggaagtcacgaccggactctcaaactctgggatctacgcagcaaagtctgtgaggaaattcagtctctctgtctgtgtatatgcttagatgttagcgtggaggtgtgtgtttgcacgtcagagcctgcatttatgtaatatagtttgaatttcagatctggcttcatgtttagaggggcactgaggatagtgatagtttttcttgtttaaagcttcatttaagtgagtaactctgacaagtcagtggttagagggtggcagcattatgtaaacagccacgttggtgcctctgcttgattaatgatgtttgcatttctttcaggcataaagacagtgtttgcaggatccagttgcaatgatattgtctgcacagagcaatgtgtaatgagtggacattttgacaagaaaattcgtttctgggacattcgatcagagagcatagttcgagagatggagctgttgggaaagattactgccctggacttaaacccagaaaggactgagctcctgagctgctcccgtgatgacttgctaaaagttattgatctccgaacaaatgctatcaagcagacattcagtgcacctgggttcaagtgcggctctgactggaccagagttgtcttcagccctgatggcagttacgtggcggcaggctctgctgagggctctctgtatatctggagtgtgctcacagggaaagtggaaaaggttctttcaaagcagcacagctcatccatcaatgcggtggcgtggtcgccctctggctcgcacgttgtcagtgtggacaaaggatgcaaagctgtgctgtgggcacagtactgacggggctctcagggctgggaggaccccagtgccctcctcagaagaagcacatgggctcctgcagccctgtcctggcaggtgatgtgctgggtatagcatggacctcccagagaagctcaagctatgtggcactgtagctttgccgtgaatgggatttctgaagatttgactgaggtctctcttggcctggaagaataacactgaaaaaacctgacgctgcggtcacttagcagaggctcaggttcttgccttgggaaacactactagctctgaccttccatacctcacttgggggagcacagggccccgctgggcctcctcaccaacggcagtgccaaaatcagcccccacatcaaggtggtgttctctgtgctttctctcgtccttccaaagtcggttctggcctaacgcatgtcccaacaccttgggttcatttgcccggtgaactcactttaagcattggattaacggaaactcccgaactacagacccctccctggtgggttgcatgaatgtgtctcattactgctgaaatgtcctcacatctcttccactgttcttcagagctttctggctctctttcccccacaaaattcgacatatttaaaaatctccgtgtggctttaaaaaatggttttttgtttttttgtttttttgaggtgggagaggatgtgtgaaaatcttttccagggaaatgggttcgctgcagaggtaaggatgtgttcctgtatcgatctgcagacacccagaaggtgggtgcacactgcatgcttgggggtgccaagggattcgagacctccaacatacttgtctgaaggtggtgattctggccatggcccctctgccaagcctgtgtgcgatgcccttggtgctttagtgcaagaagcctaggctcagaagcacagcagcgccatctttccgtttcaggggttgtgatgaaggccaaggaaaaacatttatctttactattttacctacgtataaagttttagttcattgggtgtgcgaaacaccctttttatcacttttaaatttgcactttattttttttcttccatgcttgttctctggacatttggggatgtgagtgttagagctggtgagagaggagtcaggcggccttcccaccgatggtcctggcctccacctgccctctcttccctgcctgatcaccgctttccaatttgcccttcagagaacttaagtcaaggagagttgaaattcacaggccagggcacatcttttatttatttcattatgttggccaacagaacttgattgtaaataataataaagaaatctgttatatacttttcaaactcca

SEQ ID NO: 331591 - DNA, 1837 bp, Homo sapiens
gggcgggtcttccggccctctcgaaaatcatttccggcatgagccggaagaccgtcccggatggcctcggggacggccagtgtgtggaggtgagctccgggattgccggcattcccgcttctgctggttgcttcatgctgcaggctgcggccgtcagccctcgctcgcattggtggcgctgaggtgccggggcagcaagtgacatgtcgtcgggcctccgcgccgctgacttcccccgctggaagcgccacatctcggagcaactgaggcgccgggaccggctgcagagacaggcgttcgaggagatcatcctgcagtataacaaattgctggaaaagtcagatcttcattcagtgttggcccagaaactacaggctgaaaagcatgacgtaccaaacaggcacgagataagtcccggacatgatggcacatggaatgacaatcagctacaagaaatggcccaactgaggattaagcaccaagaggaactgactgaattacacaagaaacgtggggagttagctcaactggtgattgacctgaataaccaaatgcagcggaaggacagggagatgcagatgaatgaagcaaaaaagagcttgcagaagcagcaaaggaacctctaccagtcgaacaggatgatgacattgaggtcattgtggatgaaacttctgatcacacagaagagacctctcctgtgcgagccatcagcagagcagccactaagcgactctcgcagcctgctggaggccttctggattctatcactaatatctttgggagacgctctgtctcttccttcccagtcccccaggacaatgtggatactcatcctggttctggtaaagaagtgagggtaccagctactgccttgtgtgtcttcgatgcacatgatggggaagtcaacgctgtgcagttcagtccaggttcccggttactggccactggaggcatggaccgcagggttaagctttgggaagtatttggagaaaaatgtgagttcaagggttccctatctggcagtaatgcaggaattacaagcattgaatttgatagtgctggatcttacctcttagcagcttcaaatgattttgcaagccgaatctggactgtggatgattatcgattacgggtaagacccagttaagaaagttagtgcaatctccaaacttcatgtggtgttatcaaggcacaaactggcaggtgcttaattaggggactttgttttcccaaaaatcatgcttgattcaccctgcccttcctttcctccttggggaaatctgtgtttccactttatactctttgtccaaaactcagtttcaaaatatttgcaatgggaccctcacatttgcatgaaaaccttggaatactcttcataaggactaaatactttggtagatagcaattttggcttaatggcacagaacttagcaacagcatgtgaattgtgattcctgtgggctctaaaacctaattacctaaagtgggatatagaagtacaaatggatgtatcatagggataagacaattctgaaacaaaaactccaagctgagaaagaggggacaggtgtcagagcagggagaaatgattggatgttgaggaaagctgcatttgaaccaaaacttgccaagaattctcttggcatctgacagagagaccaaaacttggttgtatcatttttgattggggcagggggcggagggcgaagcatgtaacttaatttgcagacattttttttccccataagcctgaaggaatcatcacataagcttattaaatacaagctattgaaagatataatggaggatgaatttggcattagtaggcattttacta

SEQ ID NO: 331592 - DNA, 4343 bp, Homo sapiens
gggcgggtcttccggccctctcgaaaatcatttccggcatgagccggaagaccgtcccggatggcctcggggacggccagtgtgtggaggtgagctccgggattgccggcattcccgcttctgctggttgcttcatgctgcaggctgcggccgtcagccctcgctcgcattggtggcgctgaggtgccggggcagcaagtgacatgtcgtcgggcctccgcgccgctgacttcccccgctggaagcgccacatctcggagcaactgaggcgccgggaccggctgcagagacaggcgttcgaggagatcatcctgcagtataacaaattgctggaaaagtcagatcttcattcagtgttggcccagaaactacaggctgaaaagcatgacgtaccaaacaggcacgagataagtcccggacatgatggcacatggaatgacaatcagctacaagaaatggcccaactgaggattaagcaccaagaggaactgactgaattacacaagaaacgtggggagttagctcaactggtgattgacctgaataaccaaatgcagcggaaggacagggagatgcagatgaatgaagcaaaaattgcagaatgtttgcagactatctctgacctggagacggagtgcctagacctgcgcactaagctttgtgaccttgaaagagccaaccagaccctgaaggatgaatatgatgccctgcagatcacttttactgccttggagggaaaactgaggaaaactacggaagagaaccaggagctggtcaccagatggatggctgagaaagcccaggaagccaatcggcttaatgcagagaatgaaaaagactccaggaggcggcaagcccggctgcagaaagagcttgcagaagcagcaaaggaacctctaccagtcgaacaggatgatgacattgaggtcattgtggatgaaacttctgatcacacagaagagacctctcctgtgcgagccatcagcagagcagccacgtaagtaggcaggtttgggccagggaaaagacagcttgaggagcaatatgaaggcacatctgtggacatgacaaagaatgcagtcagatgcacccaaccccttaccccttttctgggacacccagcgtcgaacacaccacagaggtgtccagtctttctcagttcacctctgcttaatgggagggaagcagaacacgggtggcttcaaatgcttctaaatacaaaaaaatgtagtggcttactcaaatatggacagtgaaaccttattaagcagaatgattgtttaggtttgatcatcctgtttcattcttactagggcttccccccgcccgcaccgcccttcaagagtggggattggttactaacagtcagaaattgtgaagttagttagccaggaattgtgaggttagttgtctaatgctttatttccagggaaattaatttaatactagggaaccttgtttcttttgaaacttctaggctgggttttccctttcccttcccactgttttctggcagtttggtactgtgttgggtttctcttggctggggtttgggaactaagtgggaaacatattcccagttacctgtttttgtgggctgtttattgattgattatttgggcaaaatgtttctaaggtttaaacctatcctcccctcctctttagtaagcgactctcgcagcctgctggaggccttctggattctatcactaatatctttggtctgtccgagtctccccttttgggacatcattcttcttctgatgctgccaggagacgctctgtctcttccttcccagtcccccaggacaatgtggatactcatcctggttctggtaaagaagtgagggtaccagctactgccttgtgtgtcttcgatgcacatgatggggaagtcaacgctgtgcagttcagtccaggttcccggttactggccactggaggcatggaccgcagggttaagctttgggaagtatttggagaaaaatgtgagttcaagggttccctatctggcagtaatgcaggaattacaagcattgaatttgatagtgctggatcttacctcttagcagcttcaaatgattttgcaagccgaatctggactgtggatgattatcgattacggcacacactcacgggacacagtgggaaagtgctgtctgctaagttcctgctggacaatgcgcggattgtctcaggaagtcacgaccggactctcaaactctgggatctacgcagcaaagtctgtgaggaaattcagtctctctgtctgtgtatatgcttagatgttagcgtggaggtgtgtgtttgcacgtcagagcctgcatttatgtaatatagtttgaatttcagatctggcttcatgtttagaggggcactgaggatagtgatagtttttcttgtttaaagcttcatttaagtgagtaactctgacaagtcagtggttagagggtggcagcattatgtaaacagccacgttggtgcctctgcttgattaatgatgtttgcatttctttcaggcataaagacagtgtttgcaggatccagttgcaatgatattgtctgcacagagcaatgtgtaatgagtggacattttgacaagaaaattcgtttctgggacattcgatcagagagcatagttcgagagatggagctgttgggaaagattactgccctggacttaaacccagaaaggactgagctcctgagctgctcccgtgatgacttgctaaaagttattgatctccgaacaaatgctatcaagcagacattcagtgcacctgggttcaagtgcggctctgactggaccagagttgtcttcagccctgatggcagttacgtggcggcaggctctgctgagggctctctgtatatctggagtgtgctcacagggaaagtggaaaaggttctttcaaagcagcacagctcatccatcaatgcggtggcgtggtcgccctctggctcgcacgttgtcagtgtggacaaaggatgcaaagctgtgctgtgggcacagtactgacggggctctcagggctgggaggaccccagtgccctcctcagaagaagcacatgggctcctgcagccctgtcctggcaggtgatgtgctgggtatagcatggacctcccagagaagctcaagctatgtggcactgtagctttgccgtgaatgggatttctgaagatttgactgaggtctctcttggcctggaagaataacactgaaaaaacctgacgctgcggtcacttagcagaggctcaggttcttgccttgggaaacactactagctctgaccttccatacctcacttgggggagcacagggccccgctgggcctcctcaccaacggcagtgccaaaatcagcccccacatcaaggtggtgttctctgtgctttctctcgtccttccaaagtcggttctggcctaacgcatgtcccaacaccttgggttcatttgcccggtgaactcactttaagcattggattaacggaaactcccgaactacagacccctccctggtgggttgcatgaatgtgtctcattactgctgaaatgtcctcacatctcttccactgttcttcagagctttctggctctctttcccccacaaaattcgacatatttaaaaatctccgtgtggctttaaaaaatggttttttgtttttttgtttttttgaggtgggagaggatgtgtgaaaatcttttccagggaaatgggttcgctgcagaggtaaggatgtgttcctgtatcgatctgcagacacccagaaggtgggtgcacactgcatgcttgggggtgccaagggattcgagacctccaacatacttgtctgaaggtggtgattctggccatggcccctctgccaagcctgtgtgcgatgcccttggtgctttagtgcaagaagcctaggctcagaagcacagcagcgccatctttccgtttcaggggttgtgatgaaggccaaggaaaaacatttatctttactattttacctacgtataaagttttagttcattgggtgtgcgaaacaccctttttatcacttttaaatttgcactttattttttttcttccatgcttgttctctggacatttggggatgtgagtgttagagctggtgagagaggagtcaggcggccttcccaccgatggtcctggcctccacctgccctctcttccctgcctgatcaccgctttccaatttgcccttcagagaacttaagtcaaggagagttgaaattcacaggccagggcacatcttttatttatttcattatgttggccaacagaacttgattgtaaataataataaagaaatctgttatatacttttcaaactcca

SEQ ID NO: 331593 - DNA, 3243 bp, Homo sapiens
gggcgggtcttccggccctctcgaaaatcatttccggcatgagccggaagaccgtcccggatggcctcggggacggccagtgtgtggaggtgagctccgggattgccggcattcccgcttctgctggttgcttcatgctgcaggctgcggccgtcagccctcgctcgcattggtggcgctgaggtgccggggcagcaagtgacatgtcgtcgggcctccgcgccgctgacttcccccgctggaagcgccacatctcggagcaactgaggcgccgggaccggctgcagagacaggcgttcgaggagatcatcctgcagtataacaaattgctggaaaagtcagatcttcattcagtgttggcccagaaactacaggctgaaaagcatgacgtaccaaacaggcacgagataaggaggcggcaagcccggctgcagaaagagcttgcagaagcagcaaaggaacctctaccagtcgaacaggatgatgacattgaggtcattgtggatgaaacttctgatcacacagaagagacctctcctgtgcgagccatcagcagagcagccactaagcgactctcgcagcctgctggaggccttctggattctatcactaatatctttggtctgtccgagtctccccttttgggacatcattcttcttctgatgctgccaggagacgctctgtctcttccttcccagtcccccaggacaatgtggatactcatcctggttctggtaaagaagtgagggtaccagctactgccttgtgtgtcttcgatgcacatgatggggaagtcaacgctgtgcagttcagtccaggttcccggttactggccactggaggcatggaccgcagggttaagctttgggaagtatttggagaaaaatgtgagttcaagggttccctatctggcagtaatgcaggaattacaagcattgaatttgatagtgctggatcttacctcttagcagcttcaaatgattttgcaagccgaatctggactgtggatgattatcgattacggcacacactcacgggacacagtgggaaagtgctgtctgctaagttcctgctggacaatgcgcggattgtctcaggaagtcacgaccggactctcaaactctgggatctacgcagcaaagtctgtgaggaaattcagtctctctgtctgtgtatatgcttagatgttagcgtggaggtgtgtgtttgcacgtcagagcctgcatttatgtaatatagtttgaatttcagatctggcttcatgtttagaggggcactgaggatagtgatagtttttcttgtttaaagcttcatttaagtgagtaactctgacaagtcagtggttagagggtggcagcattatgtaaacagccacgttggtgcctctgcttgattaatgatgtttgcatttctttcaggcataaagacagtgtttgcaggatccagttgcaatgatattgtctgcacagagcaatgtgtaatgagtggacattttgacaagaaaattcgtttctgggacattcgatcagagagcatagttcgagagatggagctgttgggaaagattactgccctggacttaaacccagaaaggactgagctcctgagctgctcccgtgatgacttgctaaaagttattgatctccgaacaaatgctatcaagcagacattcagtgcacctgggttcaagtgcggctctgactggaccagagttgtcttcagccctgatggcagttacgtggcggcaggctctgctgagggctctctgtatatctggagtgtgctcacagggaaagtggaaaaggttctttcaaagcagcacagctcatccatcaatgcggtggcgtggtcgccctctggctcgcacgttgtcagtgtggacaaaggatgcaaagctgtgctgtgggcacagtactgacggggctctcagggctgggaggaccccagtgccctcctcagaagaagcacatgggctcctgcagccctgtcctggcaggtgatgtgctgggtatagcatggacctcccagagaagctcaagctatgtggcactgtagctttgccgtgaatgggatttctgaagatttgactgaggtctctcttggcctggaagaataacactgaaaaaacctgacgctgcggtcacttagcagaggctcaggttcttgccttgggaaacactactagctctgaccttccatacctcacttgggggagcacagggccccgctgggcctcctcaccaacggcagtgccaaaatcagcccccacatcaaggtggtgttctctgtgctttctctcgtccttccaaagtcggttctggcctaacgcatgtcccaacaccttgggttcatttgcccggtgaactcactttaagcattggattaacggaaactcccgaactacagacccctccctggtgggttgcatgaatgtgtctcattactgctgaaatgtcctcacatctcttccactgttcttcagagctttctggctctctttcccccacaaaattcgacatatttaaaaatctccgtgtggctttaaaaaatggttttttgtttttttgtttttttgaggtgggagaggatgtgtgaaaatcttttccagggaaatgggttcgctgcagaggtaaggatgtgttcctgtatcgatctgcagacacccagaaggtgggtgcacactgcatgcttgggggtgccaagggattcgagacctccaacatacttgtctgaaggtggtgattctggccatggcccctctgccaagcctgtgtgcgatgcccttggtgctttagtgcaagaagcctaggctcagaagcacagcagcgccatctttccgtttcaggggttgtgatgaaggccaaggaaaaacatttatctttactattttacctacgtataaagttttagttcattgggtgtgcgaaacaccctttttatcacttttaaatttgcactttattttttttcttccatgcttgttctctggacatttggggatgtgagtgttagagctggtgagagaggagtcaggcggccttcccaccgatggtcctggcctccacctgccctctcttccctgcctgatcaccgctttccaatttgcccttcagagaacttaagtcaaggagagttgaaattcacaggccagggcacatcttttatttatttcattatgttggccaacagaacttgattgtaaataataataaagaaatctgttatatacttttcaaactcca

SEQ ID NO: 331594 - DNA, 3316 bp, Homo sapiens
gggcgggtcttccggccctctcgaaaatcatttccggcatgagccggaagaccgtcccggatggcctcggggacggccagtgtgtggaggtgagctccgggattgccggcattcccgcttctgctggttgcttcatgctgcaggctgcggccgtcagccctcgctcgcattggtggcgctgaggtgccggggcagcaagtgacatgtcgtcgggcctccgcgccgctgacttcccccgctggaagcgccacatctcggagcaactgaggcgccgggaccggctgcagagacaggcgttcgaggagatcatcctgcagtataacaaattgctggaaaagtcagatcttcattcagtgttggcccagaaactacaggctgaaaagcatgacgtaccaaacaggcacgagataagtcccggacatgatggcacatggaatgacaatcagctacaagaaatggcccaactgaggattaagcaccaagaggaactgactgaattacacaagaaacgtggggagttagctcaactggtgattgacctgaataaccaaatgcagcggaaggacagggagatgcagatgaatgaagcaaaaattgcagaatgtttgcagactatctctgacctggagacggagtgcctagacctgcgcactaagctttgtgaccttgaaagagccaaccagaccctgaaggatgaatatgatgccctgcagatcacttttactgccttggagggaaaactgaggaaaactacggaagagaaccaggagctggtcaccagatggatggctgagaaagcccaggaagccaatcggcttaatgcagagaatgaaaaagactccaggaggcggcaagcccggctgcagaaagagcttgcagaagcagcaaaggaacctctaccagtcgaacaggatgatgacattgaggtcattgtggatgaaacttctgatcacacagaagagacctctcctgtgcgagccatcagcagagcagccactaagcgactctcgcagcctgctggaggccttctggattctatcactaatatctttgggagacgctctgtctcttccttcccagtcccccaggacaatgtggatactcatcctggttctggtaaagaagtgagggtaccagctactgccttgtgtgtcttcgatgcacatgatggggaagtcaacgctgtgcagttcagtccaggttcccggttactggccactggaggcatggaccgcagggttaagctttgggaagtatttggagaaaaatgtgagttcaagggttccctatctggcagtaatgcaggaattacaagcattgaatttgatagtgctggatcttacctcttagcagcttcaaatgattttgcaagccgaatctggactgtggatgattatcgattacggcacacactcacgggacacagtgggaaagtgctgtctgctaagttcctgctggacaatgcgcggattgtctcaggaagtcacgaccggactctcaaactctgggatctacgcagcaaagtctgcataaagacagtgtttgcaggatccagttgcaatgatattgtctgcacagagcaatgtgtaatgagtggacattttgacaagaaaattcgtttctgggacattcgatcagagagcatagttcgagagatggagctgttgggaaagattactgccctggacttaaacccagaaaggactgagctcctgagctgctcccgtgatgacttgctaaaagttattgatctccgaacaaatgctatcaagcagacattcagtgcacctgggttcaagtgcggctctgactggaccagagttgtcttcagccctgatggcagttacgtggcggcaggctctgctgagggctctctgtatatctggagtgtgctcacagggaaagtggaaaaggttctttcaaagcagcacagctcatccatcaatgcggtggcgtggtcgccctctggctcgcacgttgtcagtgtggacaaaggatgcaaagctgtgctgtgggcacagtactgacggggctctcagggctgggaggaccccagtgccctcctcagaagaagcacatgggctcctgcagccctgtcctggcaggtgatgtgctgggtatagcatggacctcccagagaagctcaagctatgtggcactgtagctttgccgtgaatgggatttctgaagatttgactgaggtctctcttggcctggaagaataacactgaaaaaacctgacgctgcggtcacttagcagaggctcaggttcttgccttgggaaacactactagctctgaccttccatacctcacttgggggagcacagggccccgctgggcctcctcaccaacggcagtgccaaaatcagcccccacatcaaggtggtgttctctgtgctttctctcgtccttccaaagtcggttctggcctaacgcatgtcccaacaccttgggttcatttgcccggtgaactcactttaagcattggattaacggaaactcccgaactacagacccctccctggtgggttgcatgaatgtgtctcattactgctgaaatgtcctcacatctcttccactgttcttcagagctttctggctctctttcccccacaaaattcgacatatttaaaaatctccgtgtggctttaaaaaatggttttttgtttttttgtttttttgaggtgggagaggatgtgtgaaaatcttttccagggaaatgggttcgctgcagaggtaaggatgtgttcctgtatcgatctgcagacacccagaaggtgggtgcacactgcatgcttgggggtgccaagggattcgagacctccaacatacttgtctgaaggtggtgattctggccatggcccctctgccaagcctgtgtgcgatgcccttggtgctttagtgcaagaagcctaggctcagaagcacagcagcgccatctttccgtttcaggggttgtgatgaaggccaaggaaaaacatttatctttactattttacctacgtataaagttttagttcattgggtgtgcgaaacaccctttttatcacttttaaatttgcactttattttttttcttccatgcttgttctctggacatttggggatgtgagtgttagagctggtgagagaggagtcaggcggccttcccaccgatggtcctggctttccaatttgcccttcagagaacttaagtcaaggagagttgaaattcacaggccagggcacatcttttatttatttcattatgttggccaacagaacttgattgtaaataataataaagaaatctgttatatacttttcaaactcca

SEQ ID NO: 331595 - DNA, 865 bp, Homo sapiens
cgcgccccgacgtcactccgtctcgccctgccccggcggggggtcaggatcctccacaggtaggcgcagtcagctggagcgtcgcggcggtccgccggtcgtggagggcgtgtcctgcggcgcgatggccgtagtgttgccggcggttgtggaggagctcctgagcgagatggcggcggcggtgcaggagagcgcgcgagattcctgatgaatatctgttatcgctgaagtttctctttggctcatcagccacccaggccttggacctagttgatcgacagtccatcaccttaatctcatcacccagtggaaggcgtgtttaccaggtccttggaagttccagtaaaacatacacatgtttggcttcttgtcattactgttcatgtcctgcatttgcattctcagtgctacggaagagtgacagcatcctgtgcaagcatctcttggcagtttacctgagtcaggttatgaggacctgtcagcagctaagtgtctctgacaagcagttgactgacatattattgatggagaagaaacaagaagcataaaaggtacagattgagcatcattctttcaaaatagaatcctgtcaagaaatgcattgaaagcgtcatgattcacatggaaaagaggtgaaatggatcttcagacacttcatgttactgtcccttttccctccaggactgcaggaggtgctgtgggttggagccgtgggctgtggagggtttgtgtatgatgagaagccctgtacagtcttgtcaagaaataccctgagccagtctctgagacgcttcggtaaaaaatgtccctggatggaatcaagattttaaattcaaataaagcctaatatcatgttgtgtccaca

SEQ ID NO: 331596 - DNA, 1814 bp, Homo sapiens
cgcgccccgacgtcactccgtctcgccctgccccggcggggggtcaggatcctccacaggtaggcgcagtcagctggagcgtcgcggcggtccgccggtcgtggagggcgtgtcctgcggcgcgatggccgtagtgttgccggcggttgtggaggagctcctgagcgagatggcggcggcggtgcaggagagcgcgcgagattcctgatgaatatctgttatcgctgaagtttctctttggctcatcagccacccaggccttggacctagttgatcgacagtccatcaccttaatctcatcacccagtggaaggcgtgtttaccaggtccttggaagttccagtaaaacatacacatgtttggcttcttgtcattactgttcatgtcctgcatttgcattctcagtgctacggaagagtgacagcatcctgtgcaagcatctcttggcagtttacctgagtcaggttatgaggacctgtcagcagctaagtgtctctgacaagcagttgactgacatattattgatggagaagaaacaagaagcataaaaggactgcaggaggtgctgtgggttggagccgtgggctgtggagggtttgtgtatgatgagaagccctgtacagtcttgtcaagaaataccctgagccagtctctgagacgcttcggtaaaatggagtctcactttgtcgcccaggctggggtgcagtggcgtgatctcagctcactgcaagctccgctcccgggttcacgccattctcctggcctcagcctcccgagtagctgggactacaggtacccgccaccatgcccggctaaatttttgtattttttttttagtagagatggggtttcaccgtgttagccaggatggtctccatctcctgacctagtggtctgcccgcctcgacctcccaaagtgctggaattacatgcatgagccactgcgcctgaccctatttagtcttaagtaactaactgaattactagtaatttttaaaaggttggaatggtgggccaaacagtaagatgaagtttcgacgagtaggtcagttcttttccttgggtccaggaaactattgagcagcaacagaagatcagagcagagatgtggctaaacagtagcaggtatgaaaagacttagaggttctggtttctgtaagcttcaaatatctgtgatgcttgtgccaaaacagcttaagtagactgtattgtttgagagttagtatcgagaacaagggaagaactggtttcactctgcacttctgatctttacaacagggcaattgaaggaacagactaaaaatcgtgtcctggaaggaaactacaggtactaccagggattttcagtctgaagaagaaaagacaaaatagatgacagaaggagtattagaagggagagcgatgagactcagttggacaccgagagagcaaagaagcaataatacgtgaagatgaaaatgaaatcaatttcagcataagaagacaagaacttatggtaaagctgcccacagccagaagaggatcctagaaggacaggaattccctgtctgcagcatttcataagcatgtaatattgttgcagggatactgcagaaggagttgaagcagtggacagacagatgatataggtgattttacagcctaagaaagccctgtgcttgtgcccccaaaacatgaggtgctagtgaatgaatgctgggggaaagcccagggcctaggtgttgcaatgttctgtggttggcagatgctttttgttttgttaaaaagtgcaacagataaaatttatcaatacttttctgctactcaggaaaatt

SEQ ID NO: 331597 - DNA, 1328 bp, Homo sapiens
cgcgccccgacgtcactccgtctcgccctgccccggcggggggtcaggatcctccacaggtaggcgcagtcagctggagcgtcgcggcggtccgccggtcgtggagggcgtgtcctgcggcgcgatggccgtagtgttgccggcggttgtggaggagctcctgagcgagatggcggcggcggtgcaggagagcgcgcgagattcctgatgaatatctgttatcgctgaagtttctctttggctcatcagccacccaggccttggacctagttgatcgacagtccatcaccttaatctcatcacccagtggaaggcgtgtttaccaggtccttggaagttccagtaaaacatacacatgtttggcttcttgtcattactgttcatgtcctgcatttgcattctcagtgctacggaagagtgacagcatcctgtgcaagcatctcttggcagtttacctgagtcaggttatgaggacctgtcagcagctaagtgtctctgacaagcagttgactgacatattattgatggagaagaaacaagaagcataaaaggactgcaggaggtgctgtgggttggagccgtgggctgtggagggtttgtgtatgatgagaagccctgtacagtcttgtcaagaaataccctgagccagtctctgagacgcttcggtaaaatggagtctcactttgtcgcccaggctggggtgcagtggcgtgatctcagctcactgcaagctccgctcccgggttcacgccattctcctggcctcagcctcccgagtagctgggactacagggcaattgaaggaacagactaaaaatcgtgtcctggaaggaaactacaggtactaccagggattttcagtctgaagaagaaaagacaaaatagatgacagaaggagtattagaagggagagcgatgagactcagttggacaccgagagagcaaagaagcaataatacgtgaagatgaaaatgaaatcaatttcagcataagaagacaagaacttatggtaaagctgcccacagccagaagaggatcctagaaggacaggaattccctgtctgcagcatttcataagcatgtaatattgttgcagggatactgcagaaggagttgaagcagtggacagacagatgatataggtgattttacagcctaagaaagccctgtgcttgtgcccccaaaacatgaggtgctagtgaatgaatgctgggggaaagcccagggcctaggtgttgcaatgttctgtggttggcagatgctttttgttttgttaaaaagtgcaacagataaaatttatcaatacttttctgctactcaggaaaatt

SEQ ID NO: 331598 - DNA, 716 bp, Homo sapiens
aatggtcactgcttaatatgattaactttttttttccattctcattttacagttcctgatgaatatctgttatcgctgaagtttctctttggctcatcagccacccaggccttggacctagttgatcgacagtccatcaccttaatctcatcacccagtggaaggcgtgtttaccaggtccttggaagttccagtaaaacatacacatgtttggcttcttgtcattactgttcatgtcctgcatttgcattctcagtgctacggaagagtgacagcatcctgtgcaagcatctcttggcagtttacctgagtcaggttatgaggacctgtcagcagctaagtgtctctgacaagcagttgactgacatattattgatggagaagaaacaagaagcataaaaggtacagattgagcatcattctttcaaaatagaatcctgtcaagaaatgcattgaaagcgtcatgattcacatggaaaagaggtgaaatggatcttcagacacttcatgttactgtcccttttccctccaggactgcaggaggtgctgtgggttggagccgtgggctgtggagggtttgtgtatgatgagaagccctgtacagtcttgtcaagaaataccctgagccagtctctgagacgcttcggtaaaaaatgtccctggatggaatcaagattttaaattcaaataaagcctaatatcatgttgtgtccaca

SEQ ID NO: 331599 - DNA, 1672 bp, Homo sapiens
cgcgccccgacgtcactccgtctcgccctgccccggcggggggtcaggatcctccacagttcctgatgaatatctgttatcgctgaagtttctctttggctcatcagccacccaggccttggacctagttgatcgacagtccatcaccttaatctcatcacccagtggaaggcgtgtttaccaggtccttggaagttccagtaaaacatacacatgtttggcttcttgtcattactgttcatgtcctgcatttgcattctcagtgctacggaagagtgacagcatcctgtgcaagcatctcttggcagtttacctgagtcaggttatgaggacctgtcagcagctaagtgtctctgacaagcagttgactgacatattattgatggagaagaaacaagaagcataaaaggactgcaggaggtgctgtgggttggagccgtgggctgtggagggtttgtgtatgatgagaagccctgtacagtcttgtcaagaaataccctgagccagtctctgagacgcttcggtaaaatggagtctcactttgtcgcccaggctggggtgcagtggcgtgatctcagctcactgcaagctccgctcccgggttcacgccattctcctggcctcagcctcccgagtagctgggactacaggtacccgccaccatgcccggctaaatttttgtattttttttttagtagagatggggtttcaccgtgttagccaggatggtctccatctcctgacctagtggtctgcccgcctcgacctcccaaagtgctggaattacatgcatgagccactgcgcctgaccctatttagtcttaagtaactaactgaattactagtaatttttaaaaggttggaatggtgggccaaacagtaagatgaagtttcgacgagtaggtcagttcttttccttgggtccaggaaactattgagcagcaacagaagatcagagcagagatgtggctaaacagtagcaggtatgaaaagacttagaggttctggtttctgtaagcttcaaatatctgtgatgcttgtgccaaaacagcttaagtagactgtattgtttgagagttagtatcgagaacaagggaagaactggtttcactctgcacttctgatctttacaacagggcaattgaaggaacagactaaaaatcgtgtcctggaaggaaactacaggtactaccagggattttcagtctgaagaagaaaagacaaaatagatgacagaaggagtattagaagggagagcgatgagactcagttggacaccgagagagcaaagaagcaataatacgtgaagatgaaaatgaaatcaatttcagcataagaagacaagaacttatggtaaagctgcccacagccagaagaggatcctagaaggacaggaattccctgtctgcagcatttcataagcatgtaatattgttgcagggatactgcagaaggagttgaagcagtggacagacagatgatataggtgattttacagcctaagaaagccctgtgcttgtgcccccaaaacatgaggtgctagtgaatgaatgctgggggaaagcccagggcctaggtgttgcaatgttctgtggttggcagatgctttttgttttgttaaaaagtgcaacagataaaatttatcaatacttttctgctactcaggaaaatt

SEQ ID NO: 331600 - DNA, 813 bp, Homo sapiens
cgcgccccgacgtcactccgtctcgccctgccccggcggggggtcaggatcctccacaggtaggcgcagtcagctggagcgtcgcggcggtccgccggtcgtggagggcgtgtcctgcggcgcgatggccgtagtgttgccggcggttgtggaggagctcctgagcgagatggcggcggcggtgcaggagagcgcgcgagattcctgatgaatatctgttatcgctgaagtttctctttggctcatcagccacccaggccttggacctagttgatcgacagtccatcaccttaatctcatcacccagtggaaggcgtgtttaccaggtccttggaagttccagtaaaacatacacatgtttggcttcttgtcattactgttcatgtcctgcatttgcattctcagtgctacggaagagtgacagcatcctgtgcaagcatctcttggcagtttacctgagtcaggttatgaggacctgtcagcagctaagtgtctctgacaagcagttgactgacatattattgatggagaagaaacaagaagcataaaaggactgcaggaggtgctgtgggttggagccgtgggctgtggagggtttgtgtatgatgagaagccctgtacagtcttgtcaagaaataccctgagccagtctctgagacgcttcggtaaaaaatgtccctggatggaatcaagattttaaattcaaataaagcctaatatcatgttgtgtccacaaaaaaaaaacacaaaaacaacaaacaaaaccacacacacaaatccacaccacaacaccaacaaacaacaacagggggg

SEQ ID NO: 331601 - DNA, 1085 bp, Homo sapiens
gtgatcctcccacctcgacctcccaaagtgctgggattacaggctttgagccaccacacccggcctgagacttatcttactcctgccctgctactgaccctttgcctgtttttactctctctttaggtatgtaggaagctttagaaatttatacacctgctgtgaaataccaaaggttaagaacccccacaataaaatgtagatgagagattccccccccccacttccttcttattacagtcagcccatagagtgggccccatgaatcactaggcgtaggaacagaatggtttatgtggttggttgaactaatctgaaactcttcagttcctttatatgctgtcctaaaggtgagcactgagaggtgaggaagagagagtctgtacactggaggaagagaagttgtttcctcttttatgtaaaacattactgcagttcttctcggtgcaatttgcagagcaactctgagtctacataaataaaaagggaaagaggtggtttttccagcacatctgaggtctgatcccatctatcctttctttgtaggtccttggaagttccagtaaaacatacacatgtttggcttcttgtcattactgttcatgtcctgcatttgcattctcagtgctacggaagagtgacagcatcctgtgcaagcatctcttggcagtttacctgagtcaggttatgaggacctgtcagcagctaagtgtctctgacaagcagttgactgacatattattgatggagaagaaacaagaagcataaaaggtacagattgagcatcattctttcaaaatagaatcctgtcaagaaatgcattgaaagcgtcatgattcacatggaaaagaggtgaaatggatcttcagacacttcatgttactgtcccttttccctccaggactgcaggaggtgctgtgggttggagccgtgggctgtggagggtttgtgtatgatgagaagccctgtacagtcttgtcaagaaataccctgagccagtctctgagacgcttcggtaaaaaatgtccctggatggaatcaagattttaaattcaaataaagcctaatatcatgttgtgtccaca

SEQ ID NO: 331602 - DNA, 409 bp, Homo sapiens
aaaattaaaatgaatttttaaaaaatactaagtctagtgatcctttgggcaagttactgaggtgactttgagaatcaggccttctaatctgaagtgtttttatttcacaggctgaagtttctctttggctcatcagccacccaggccttggacctagttgatcgacagtccatcaccttaatctcatcacccagtggaaggcgtgtttaccaggtagaagtctagagatgggggtgatccctacagaaaccccttaggacaaaatgttcttcatctctgtagaagctgttgactagctttaaatatttcctggactgttaaaaggcttttgccccaacttggtaaaattaacgaattgataattttttaaaatttttatttacttttaactgacagaaactgtctatat

SEQ ID NO: 331603 - DNA, 735 bp, Homo sapiens
cgcgccccgacgtcactccgtctcgccctgccccggcggggggtcaggatcctccacaggtaggcgcagtcagctggagcgtcgcggcggtccgccggtcgtggagggcgtgtcctgcggcgcgatggccgtagtgttgccggcggttgtggaggagctcctgagcgagatggcggcggcggtgcaggagagcgcgcgagattcctgatgaatatctgttatcgctgaagtttctctttggctcatcagccacccaggccttggacctagttgatcgacagtccatcaccttaatctcatcacccagtggaaggcgtgtttaccaggtccttggaagttccagtaaaacatacacatgtttggcttcttgtcattactgttcatgtcctgcatttgcattctcagtgctacggaagagtgacagcatcctgtgcaagcatctcttggcagtttacctgagtcaggttatgaggacctgtcagcagctaagtgtctctgacaagcagttgactgacatattattgatggagaagaaacaagaagcataaaaggactgcaggaggtgctgtgggttggagccgtgggctgtggagggtttgtgtatgatgagaagccctgtacagtcttgtcaagaaataccctgagccagtctctgagacgcttcggtaaaaaatgtccctggatggaatcaagattttaaattcaaataaagcctaatatcatgttgtgtccaca

SEQ ID NO: 331604 - DNA, 715 bp, Homo sapiens
gaagaagctccttgagcaaaatgccgccgccggtgcagaaaagcgcgcgaattcctgatgaatatctgttatcgctgaagtttctctttggctcatcagccacccaggccttggacctagttgatcgacagtccatcaccttaatctcatcacccagtggaaggcgtgtttaccaggtccttggaagttccagtaaaacatacacatgtttggcttcttgtcattactgttcatgtcctgcatttgcattctcagtgctacggaagagtgacagcatcctgtgcaagcatctcttggcagtttacctgagtcaggttatgaggacctgtcagcagctaagtgtctctgacaagcagttgactgacatattattgatggagaagaaacaagaagcataaaaggtacagattgagcatcattctttcaaaatagaatcctgtcaagaaatgcattgaaagcgtcatgattcacatggaaaagaggtgaaatggatcttcagacacttcatgttactgtcccttttccctccaggactgcaggaggtgctgtgggttggagccgtgggctgtggagggtttgtgtatgatgagaagccctgtacagtcttgtcaagaaataccctgagccagtctctgagacgcttcggtaaaaaatgtccctggatggaatcaagattttaaattcaaataaagcctaatatcatgttgtgtccaca

SEQ ID NO: 331605 - DNA, 975 bp, Homo sapiens
cgcgccccgacgtcactccgtctcgccctgccccggcggggggtcaggatcctccacaggtaggcgcagtcagctggagcgtcgcggcggtccgccggtcgtggagggcgtgtcctgcggcgcgatggccgtagtgttgccggcggttgtggaggagctcctgagcgagatggcggcggcggtgcaggagagcgcgcgagattcctgatgaatatctgttatcacagtgtctcactctgtcactgaggctggagtacagtggcgcgatctcaactcactgcagcctctgcctcccaggttccagtgattctcctgcctcagcctcctgagtagctgggactacaggtggcacacaccgaggcaggtggatgatgaggtcaggagttccgcctgccttggcctcccaaggtgctgggattacaggcatgagccaccacacctggccttaaaaaaattcttaaaggctgaagtttctctttggctcatcagccacccaggccttggacctagttgatcgacagtccatcaccttaatctcatcacccagtggaaggcgtgtttaccaggtccttggaagttccagtaaaacatacacatgtttggcttcttgtcattactgttcatgtcctgcatttgcattctcagtgctacggaagagtgacagcatcctgtgcaagcatctcttggcagtttacctgagtcaggttatgaggacctgtcagcagctaagtgtctctgacaagcagttgactgacatattattgatggagaagaaacaagaagcataaaaggactgcaggaggtgctgtgggttggagccgtgggctgtggagggtttgtgtatgatgagaagccctgtacagtcttgtcaagaaataccctgagccagtctctgagacgcttcggtaaaaaatgtccctggatggaatcaagattttaaattcaaataaagcctaatatcatgttgtgtccaca

SEQ ID NO: 331606 - DNA, 1932 bp, Homo sapiens
cgcgccccgacgtcactccgtctcgccctgccccggcggggggtcaggatcctccacaggtaggcgcagtcagctggagcgtcgcggcggtccgccggtcgtggagggcgtgtcctgcggcgcgatggccgtagtgttgccggcggttgtggaggagctcctgagcgagatggcggcggcggtgcaggagagcgcgcgagattcctgatgaatatctgttatcgctgaagtttctctttggctcatcagccacccaggccttggacctagttgatcgacagtccatcaccttaatctcatcacccagtggaaggcgtgtttaccagagacagggtctcactatgttgcccaggctggtctcaaactcctaggttcaagcgatcctcccaccttggcctctcacaatattgggattacagtgcaagcatctcttggcagtttacctgagtcaggttatgaggacctgtcagcagctaagtgtctctgacaagcagttgactgacatattattgatggagaagaaacaagaagcataaaaggtacagattgagcatcattctttcaaaatagaatcctgtcaagaaatgcattgaaagcgtcatgattcacatggaaaagaggtgaaatggatcttcagacacttcatgttactgtcccttttccctccaggactgcaggaggtgctgtgggttggagccgtgggctgtggagggtttgtgtatgatgagaagccctgtacagtcttgtcaagaaataccctgagccagtctctgagacgcttcggtaaaatggagtctcactttgtcgcccaggctggggtgcagtggcgtgatctcagctcactgcaagctccgctcccgggttcacgccattctcctggcctcagcctcccgagtagctgggactacaggtacccgccaccatgcccggctaaatttttgtattttttttttagtagagatggggtttcaccgtgttagccaggatggtctccatctcctgacctagtggtctgcccgcctcgacctcccaaagtgctggaattacatgcatgagccactgcgcctgaccctatttagtcttaagtaactaactgaattactagtaatttttaaaaggttggaatggtgggccaaacagtaagatgaagtttcgacgagtaggtcagttcttttccttgggtccaggaaactattgagcagcaacagaagatcagagcagagatgtggctaaacagtagcaggtatgaaaagacttagaggttctggtttctgtaagcttcaaatatctgtgatgcttgtgccaaaacagcttaagtagactgtattgtttgagagttagtatcgagaacaagggaagaactggtttcactctgcacttctgatctttacaacagggcaattgaaggaacagactaaaaatcgtgtcctggaaggaaactacaggtactaccagggattttcagtctgaagaagaaaagacaaaatagatgacagaaggagtattagaagggagagcgatgagactcagttggacaccgagagagcaaagaagcaataatacgtgaagatgaaaatgaaatcaatttcagcataagaagacaagaacttatggtaaagctgcccacagccagaagaggatcctagaaggacaggaattccctgtctgcagcatttcataagcatgtaatattgttgcagggatactgcagaaggagttgaagcagtggacagacagatgatataggtgattttacagcctaagaaagccctgtgcttgtgcccccaaaacatgaggtgctagtgaatgaatgctgggggaaagcccagggcctaggtgttgcaatgttctgtggttggcagatgctttttgttttgttaaaaagtgcaacagataaaatttatcaatacttttctgctactcaggaaaatt

SEQ ID NO: 331607 - DNA, 1230 bp, Homo sapiens
atccctaatcaccagaggtacaggctccttcccacttcttagcagcttttctcactctgaggcctcccatcttagagtaaagcccaggggacagagtggctgcactctaaaatccatcagcacattcatgcagaggccacccttcccacctgctgcttccagccaatgcctgagcatgggagggactcgtctgaggggcagcactggctccccaatggctttgctgaaactttctcagcaccacactccagtggaaaacgtcccccctcccccggcctttcctcctccacaggggtctgccaactctgccaacagcctccagctcccagccccattttcccttgcaggtgtttcccccagtaaatctcttgtacttttaatcctatcttggcatctgttttttggatgacccaaactaacacatagataattattctttttccttcaattccagtatctctgcctttataacatttcacattagtttcaccgaccatcacttaagggggaaaaaaaaaaagaaaatgcgaaattctgctttctaaatgagattacatatatataatacctggcaggtagtagacacataataaaaggcacacaaataaatagtctctgcgttagagaagacctaaggtcacctgacatagattaattcaaccaacatgtactaattacatgtgtgtggcaccttgctatgtgtggtagagatgcaaagatacatgacatggtctatacaccaaaacaagcttagaatttgacaaggaagaaaagacatacacacaaaaccaaattcatatgtagctgagttataaaatgctacgagagtcaggaaggggaagattcctttggctggggcaggaagacaggaaaggggtggaggaaagaagagatttggtctatctttgtctaagagtttacacttgaaccaggcaccaaaggccataggactgcaaccatatgagacagaggtgctgtccgtgcaagcccaaacagcgtgagccaatgcacagagataggcaggcgagctgtgtgtccaatggggctgaagcggggcaggcaggtgcctcctgccaggctgtcctgagccaggcccgtcagcctacggttcccgtgccacaggaggccactgacagcttgagaactgagttttcagggttagtaatcctgtggcaaaatgaagaatgaaccagaaggggagaccctgggggtggttctgacagaaagtta

SEQ ID NO: 331608 - DNA, 1626 bp, Homo sapiens
caaactggaaattttacttggcatctatcatgtaagccactgggatgtaaagaataaaagtagcttctatgcacaatgctcagtctagtggggaggcagacccaaaagacggaggtgtgcccagaggtgctttctgaccttgcagtggcacgaagaggctacatgccacagtgctccgggggatgggaataggtccagggtggtggcatgtcaccgtgctccagagatggcagcttcctcaggcagcaatggcttggctttaggctggtctgcactaaaggaggtttccctctagtgcagaaagaccattccaagctaagactgcaaatattcaaactgccgacgagaggaagaattctctttcccaggccctcgttttgcctaactggctaaagggcctgtgtgccacaagccacctttgaacttttagcttggttgattctatggtgtggcagtcatgaagatgtatttctccaaatgcaggggacagagtggctgcactctaaaatccatcagcacattcatgcagaggccacccttcccacctgctgcttccagccaatgcctgagcatgggagggactcgtctgaggggcagcactggctccccaatggctttgctgaaactttctcagcaccacactccagtggaaaacgtcccccctcccccggcctttcctcctccacaggggtctgccaactctgccaacagcctccagctcccagccccattttcccttgcaggtgtttcccccagtaaatctcttgtacttttaatcctatcttggcatctgttttttggatgacccaaactaacacatagataattattctttttccttcaattccagtatctctgcctttataacatttcacattagtttcaccgaccatcacttaagggggaaaaaaaaaaagaaaatgcgaaattctgctttctaaatgagattacatatatataatacctggcaggtagtagacacataataaaaggcacacaaataaatagtctctgcgttagagaagacctaaggtcacctgacatagattaattcaaccaacatgtactaattacatgtgtgtggcaccttgctatgtgtggtagagatgcaaagatacatgacatggtctatacaccaaaacaagcttagaatttgacaaggaagaaaagacatacacacaaaaccaaattcatatgtagctgagttataaaatgctacgagagtcaggaaggggaagattcctttggctggggcaggaagacaggaaaggggtggaggaaagaagagatttggtctatctttgtctaagagtttacacttgaaccaggcaccaaaggccataggactgcaaccatatgagacagaggtgctgtccgtgcaagcccaaacagcgtgagccaatgcacagagataggcaggcgagctgtgtgtccaatggggctgaagcggggcaggcaggtgcctcctgccaggctgtcctgagccaggcccgtcagcctacggttcccgtgccacaggaggccactgacagcttgagaactgagttttcagggttagtaatcctgtggcaaaatgaagaatgaaccagaaggggagaccctgggggtggttctgacagaaagtta

SEQ ID NO: 331609 - DNA, 411 bp, Homo sapiens
caccgcaggaggtggcaggggtccagtcgacctgccatgagacctggaggtaggtacagagcctcacctgcaaaaaccccatgaggtaggaagaaagaatgcctgctctctcttaaggccttcaagagggctgaattagactagcacttagcacagagcctggcatagagtgggggctcaattggctcctgttaagtgactgagtaaaccaaccagtgagcaagccaactttctcctgtgtcctccccaacacgatggggactaaggaaaagaagctgggagctgggaagccctgtcattgcaacaggaagtagtaacggcatttagcaaaggtggaggggaaaataaaggaagatgctcctctctcccacacatcggaaaaatgaactaatcagcagcaagcagttaatg

SEQ ID NO: 331610 - DNA, 129 bp, Homo sapiens
gggtcattttggatttttttttaatgataaggtattccttctttgatcacttatgcatttttggatatttcagttttaaaaaagatatgttttggctaggcgcagcggcttatgcctgtaatcccagca

SEQ ID NO: 331611 - DNA, 582 bp, Homo sapiens
ttgtgagagttaaatgtgatcgatgatgtaaattgcttcatagaatgcagaatgtgtaatagctcacaataagtaggtattatgtttacatattatgtttgtatttatgctacttaaatacaaaactggacaggccaggcatggtggctcatgcctgtaatcccagcactttgggaggctgaggtaggtggaaaacctgaggtcaggagttcaagaacagcctgaccaacatggtgaaactccatctctactaaaaatacaaaaattaaccaggcttgatggtgtgcacctgtaatctcagctactcgggaggctgaggcaagagaatcgcttgaacccaggaggcagaggttgcagtgcaccaagactgcgccattgcactccagcccgggcaacaagagcgaaaccccatctcgaaaaaaaacaaaacaaaactagacaagtgagtgcctacgtgacactcaaatgttgccagcatacagttaagggccctagtcaatgtaggcctgcttcttatagctttttgactatattatgctgtctttgacttagtcagtcaacacttattgagcacctactaag

SEQ ID NO: 331612 - DNA, 351 bp, Homo sapiens
gtgtcctaaaatctgcctcatgggtagcttgccttggtgaggacagatgccccaggaacccaggccggagttcctggagaccctctgctaatctcatgattattgaactttcaagctaccacacactcctattcactgtcaccattcattttcacagtaaccctgtgggatctagctacagtgacaatcctcattttacggatgacaaaacaggtgctcgtagaggttcactaatttgctgaaggcttcacagtagttagtaagtagctggggtttgagcccatggcagactgactccagagttcatgccgtacacatcatctggctttgcattctcccagaccacagaat

SEQ ID NO: 331613 - DNA, 275 bp, Homo sapiens
atacagagccggttgaccttaggattgctagaatctgtgtttggtgctatgcgttttttaccctttgatgtgagacacttgatgcgaacttgcttgtccactagtgcatatctgacatggaatttaaattggcaagaaatgtgtgcagaccaggctaaacagaaccatgttgctggacacggagacattacagaggatatgctattaggtaatggcccttattcagacctggaaagtcaaatggcactcccagacgctgcttatcagcagtgtgc

SEQ ID NO: 331614 - DNA, 544 bp, Homo sapiens
gggaggagggagaaggattcaatgcactgttgctggctctggatgcagggaactaacatgcaaggatgggagagagacctctggaactaatggcagtcctcatcagacagccatcaagaaaacaggacctcagtcctacagccgcatgaaccaaactatgccaacaatcaaaaggaggctggaagtagatgcttagagacttcagaaaggaatgtagccctgccaacaccttcatttccaccttgtgatattctaagcagaatatcagctcactgtacctggacttctgacttactcaatttgagataataaatttgtgctattttaagccacttaagtttgtggtaatttcttacagcagcaataaaaaatacacggctaattcaggcaacagcacaacccactttggaacctggtagtctacagtggctatcctcaagatctgtgtagcccagtctgtgaaatgcggacatctaataggcacctgcagcaatcaccaggttagtatgactggaagatctaatactttcagttattaatattt

SEQ ID NO: 331615 - DNA, 666 bp, Homo sapiens
aggaggcacaggacggggtgggagtgagggtgggtgcagccacagctggaagtgtgcacagctggaacttcccagcattgagcaggtcctcatgggaacaatttatgaaaactatgattatttttccatttcctagactctgtgattgttttcacaagaagctaagtggtttctgtgtgattatatatcccaggtgttgtgtggaattttaactcaaataccaaaatctagggcgatttgcctatcacgcatccatttattccacttcctccagcaagttcacagcactatgtaaaatgcttagaaccagtggaggtttttgtgagttctggaaaacaagaggagggaaaaatcaatggagaaaagcaggagtgaagcagatagccactgagaagaagaagatggcaggctgacgggaaagtacagcggccgagtgtctgctggcgagctgtgcgtcagggcccacttgcacaaatagtaaggcagaactagtggccccctagacccagggggcgtttagaggtcctgggaaacataaactctccatcctaagacaacactacaccctcccactcctaatcaaggcccttacattccaccattcaagcgcattaaataatagttgtccaaatgtgtggtaaaggattttctcttttcagagccact

SEQ ID NO: 331616 - DNA, 123 bp, Homo sapiens
tctagagtctagaccaacaggcctccacactcacgtcccagagatttccctggtcccacctactcccagtggcaaccagacttctgcacataggagagatgtcatactcagagtccagcctcc

SEQ ID NO: 331617 - DNA, 278 bp, Homo sapiens
gggattacaggtgtgagccaccatgcccggcccaactcagccctattgcaaaataatcactccttggggttcttctagctaaaagctatagatattttttaatgaattgatttaaatcaaattagtccttaaagtgtccttgtggagcctgacagaggaatgagaggcatcaagagttgtattgtattgcctgccaaccctagaccccttttctttgagaaacgagacagcaattctaggtcttagtgcataaggccagtctttgtgctttgaggtgc

SEQ ID NO: 331618 - DNA, 468 bp, Homo sapiens
gggtagatctagaggatcccgagctctctcgtggggacgacctgcctacggaaaggagctacccactgcaggtctcctgagggctgttctgtcactcagtgaagctcctctccgccttgagcaccttccagttgaccgtgaacctcattcttcctggacgcaggataataacatgggacccactgaaaggcgggactgaaagatctgtaaaacagggctgaaacatgcccccttgctcaccacgttgcagacaatgagaaggaaagaagagctgaggccctttggggagcccagacctaagagctccccaaaccagggttgtgacaccctctttggggctctgggattcttgatgtctccaagcttcagggtgccactacgttccccagtacccacagtggaagccactgtggtatgtctgatccagatgcaacctcacagggagccagtgcctggatatgcccgccc

SEQ ID NO: 331619 - DNA, 802 bp, Homo sapiens
cagccgggacattgttccccgcggcctggggacccggggccgcagtttccttctcgaaccggccgaagcctgccctgcgggaaagcccggagcctggggcgctcacctctcctcttggagtccctccctgggggcctcccccagccctggggaaagactgggagagcctggcctggcaagattttccccaattcctctgtccaggcggaaaggaactttacagatttaggaaaatgccccgctcatcttaaagatgtgtaagggagcatcggtgagaaaaaaatgttcttgcccaaggtcacaccgccatcccatggctgctggagtcatagtgagggttcagcttttgcctttcaggccaactggctgagtgattcgaagaaagtgaggaatcctccctggacactgtatcgcccttcgtcgtctttcagtcaatctcttccactctaaggattgagtgagcgcgagctggggactctgcccaatgataaggagggttcctgcccccaggtgaacattaactttccccagctcggcctctgtcgggaccagtgccaggtggacagccagtgtcctggccagatgaaatgctgccgcaatggctgtgggaaggtgtcctgtgtcactcccaatttctgagctccagccaccaccaggctgagcagtgaggagagaaagtttctgcctggccctgcatctggttccagcccacctgccctcccctttttcgggactctgtattccctcttgggctgaccacagcttctccctttcccaaccaataaagtaaccactttcagca

SEQ ID NO: 331620 - DNA, 348 bp, Homo sapiens
actggctgtccacctggcactggtcccgacagaggccgagctggggaaagttaatgttcacctgggggcaggaaccctccttatcattgggcagagagcagaaggtggacagccagtgtcctggccagatgaaatgctgccgcaatggctgtgggaaggtgtcctgtgtcactcccaatttctgagctccagccaccaccaggctgagcagtgaggagagaaagtttctgcctggccctgcatctggttccagcccacctgccctcccctttttcgggactctgtattccctcttgggctgaccacagcttctccctttcccaaccaataaagtaaccactttcagca

SEQ ID NO: 331621 - DNA, 702 bp, Homo sapiens
aactacagagtagtttgatatttcagggagaaataatatatgtttgtttcccactgctttcacaacaaccctatgttgtaattagcactgttccactggcacctaaagacacggaggctctgggagatttctggccctaggccacgaaggcccacttgggactcaagctgaggtcctgtgattccatttgggagcaggaggagggatttgcaggtgatcttcctgggcctcctgagagcagctcaggtgcccaagatggactcaggcaggcagctctgctgtatgtgaagcccagtgaggggcagtgggggggccatgctgcaggtacaagttaatctccctgtatcgcctctgcccacttacccttactcctttttctacccagatataaggagggttcctgcccccaggtgaacattaactttccccagctcggcctctgtcgggaccagtgccaggtggacagccagtgtcctggccagatgaaatgctgccgcaatggctgtgggaaggtgtcctgtgtcactcccaatttctgagctccagccaccaccaggctgagcagtgaggagagaaagtttctgcctggccctgcatctggttccagcccacctgccctcccctttttcgggactctgtattccctcttgggctgaccacagcttctccctttcccaaccaataaagtaaccactttcagca

SEQ ID NO: 331622 - DNA, 733 bp, Homo sapiens
taaatccccgcacctgagcatcggctcacacctgcaccccgcccgggcatagcaccatgcctgcttgtcgcctaggcccgctagccgccgccctcctcctcagcctgctgctgttcggcttcaccctagtctcaggcacaggagcagagaagactggcgtgtgccccgagctccaggctgaccagaactgcacgcaagagtgcgtctcggacagcgaatgcgccgacaacctcaagtgctgcagcgcgggctgtgccaccttctgctctctgcccaatgataaggagggttcctgcccccaggtgaacattaactttccccagctcggcctctgtcgggaccagtgccaggtggacagccagtgtcctggccagatgaaatgctgccgcaatggctgtgggaaggtgtcctgtgtcactcccaatttctgagctccagccaccaccaggctgagcagtgaggagagaaagtttctgcctggccctgcatctggttccagcccacctgccctcccctttttcgggactctgtattccctcttgggctgaccacagcttctccctttcccaaccaataaagtaaccactttcagcaagaaaaaaaaaaaaaaacctcggggaatagtttctctccccatccccccggaggggcgccccgggttgcccggggctccgccggagttagggcgcgggtaaagtagcgcgggtgtccccccaaggcgcaaggatattac

SEQ ID NO: 331623 - DNA, 495 bp, Homo sapiens
cagttctggttcagcctggagctcggggcacacgccagtcttctctgctcctgtgcctgagactagtggtgaatgccgaacagcagcaggctgtaggaggagggcggcggctagcgggcctaggcgacaacctcaagtgctgcagcgcgggctgtgccaccttctgctctctgcccaatgataaggagggttcctgcccccaggtgaacattaactttccccagctcggcctctgtcgggaccagtgccaggtggacagccagtgtcctggccagatgaaatgctgccgcaatggctgtgggaaggtgtcctgtgtcactcccaatttctgagctccagccaccaccaggctgagcagtgaggagagaaagtttctgcctggccctgcatctggttccagcccacctgccctcccctttttcgggactctgtattccctcttgggctgaccacagcttctccctttcccaaccaataaagtaaccactttcagca

SEQ ID NO: 331624 - DNA, 938 bp, Homo sapiens
cagccgggacattgttccccgcggcctggggacccggggccgcagtttccttctcgaaccggccgaagcctgccctgcgggaaagcccggagcctggggcgctcacctctcctcttggagtccctccctgggggcctcccccagccctggggaaagactgggagagcctggcctggcaagattttccccaattcctctgtccaggcggaaaggaactttacagatttaggaaaatgccccgctcatcttaaagatgtgtaagggagcatcggtgagaaaaaaatgttcttgcccaaggtcacaccgccatcccatggctgctggagtcatagtgagggttcagcttttgcctttcaggccaactggctgagtgattcgaagaaagtgaggaatcctccctggacactgtatcgcccttcgtcgtctttcagtcaatctcttccactctaaggattgagtgagcgcgagctggggactctgcccaatggtgcttgctggagctgcagtctccaccaggctatcagaacagggggtggcttaaacagcatggaatctcagctttccgttctccagaggaaaatgctgaggattagaggcagggataggacctggagagaaccaagataaggagggttcctgcccccaggtgaacattaactttccccagctcggcctctgtcgggaccagtgccaggtggacagccagtgtcctggccagatgaaatgctgccgcaatggctgtgggaaggtgtcctgtgtcactcccaatttctgagctccagccaccaccaggctgagcagtgaggagagaaagtttctgcctggccctgcatctggttccagcccacctgccctcccctttttcgggactctgtattccctcttgggctgaccacagcttctccctttcccaaccaataaagtaaccactttcagca

SEQ ID NO: 331625 - DNA, 214 bp, Homo sapiens
taggtcggaccagtgtctgagaaggtgtcctgtgtcactcccaatttctgagctccagccaccaccaggctgagcagtgaggagagaaagtttctgcctggccctgcatctggttccagcccacctgccctcccctttttcgggactctgtattccctcttgggctgaccacagcttctccctttcccaaccaataaagtaaccactttcagca

SEQ ID NO: 331626 - DNA, 253 bp, Homo sapiens
aggagctggtctaggatttaagctgcaggtactcctgcctagtctaatggatattgttgttgatggtattgttataattttcttcctccagctccagccaccaccaggctgagcagtgaggagagaaagtttctgcctggccctgcatctggttccagcccacctgccctcccctttttcgggactctgtattccctcttgggctgaccacagcttctccctttcccaaccaataaagtaaccactttcagca

SEQ ID NO: 331627 - DNA, 594 bp, Homo sapiens
taaatccccgcacctgagcatcggctcacacctgcaccccgcccgggcatagcaccatgcctgcttgtcgcctaggcccgctagccgccgccctcctcctcagcctgctgctgttcggcttcaccctagtctcaggcacaggagcagagaagactggcgtgtgccccgagctccaggctgaccagaactgcacgcaagagtgcgtctcggacagcgaatgcgccgacaacctcaagtgctgcagcgcgggctgtgccaccttctgctctctgcccaatgataaggagggttcctgcccccaggtgaacattaactttccccagctcggcctctgtcgggaccagtgccaggtggacagccagtgtcctggccagatgaaatgctgccgcaatggctgtgggaaggtgtcctgtgtcactcccaatttctgagctccagccaccaccaggctgagcagtgaggagagaaagtttctgcctggccctgcatctggttccagcccacctgccctcccctttttcgggactctgtattccctcttgggctgaccacagcttctccctttcccaaccaataaagtaaccactttcagca

SEQ ID NO: 331628 - DNA, 801 bp, Homo sapiens
taaatccccgcacctgagcatcggctcacacctgcaccccgcccgggcatagcaccatgcctgcttgtcgcctaggcccgctagccgccgccctcctcctcagcctgctgctgttcggcttcaccctagtctcaggcacaggagcagagaagactggcgtgtgccccgagctccaggctgaccagaactgcacgcaagagtgcgtctcggacagcgaatgcgccgacaacctcaagtgctgcagcgcgggctgtgccaccttctgctctctgcccaatgataaggagggttcctgcccccaggtgaacattaactttccccagctcggcctctgtcgggaccagtgccaggtggacagccagtgtcctggccagatgaaatgctgccgcaatggctgtgggaaggtgtcctgtgtcactcccaatttctgagctccagccaccaccaggctgagcagtgaggagagaaagtttctgcctggccctgcatctggttccagcccacctgccctcccctttttcgggactctgtattccctcttgggctgaccacagcttctccctttcccaaccaataaagtaaccactttcagcagtagataggaaatggctcagttattcaatatcaatttgagcaaatgttgtatactatgaaaaacaattacaaagatcatgtagaacaagtgaaatatgaaaactgaaaggtatcagaaatgagaaaatatgaaatatatactgtttacagctatatgaaatatgtacatatatatatggagcgagagcgcgagacaaaagagaaatg

SEQ ID NO: 331629 - DNA, 453 bp, Homo sapiens
gtgcctcctttttctttcaaagtcaacaaagttcagcagtgatttgggaacattagaaaatttttttttgctattctaactaacgtttttaatatactacataagatagctagtaagtccatagacaagtaaaaataattcaggaaatcactattttatgatgggctgacactttaaaactcataaaatataagttttgaattctttaaattgagatggccacttaagaatttaatcacaaatatgccagtgaaaagcaaatgattcattcaaggatttttgagcaattagaactcacagctttcttgtctaagactttcacttaaatcacgtgagtataagactgagttccatgtagaattatattcttcggcaaccaaaccagaaaaggaaacttgcccagagccagcagttagctgagaaaaacttcaactgaaagaaacatttaggcca

SEQ ID NO: 331630 - DNA, 1341 bp, Homo sapiens
gattcctgctgactccagggggacacctggcacctcagcttcctttcccacttctccaggctgcatggaggggtgccgggcagggtcctcctggaagggaacctcctgcagcctcaagcaccaggtcatgacatgacatctatccctttcccaggtgaccgactcctgcaggtggatggagtgattctgtgcggcctcacccacaagcaggctgtgcagtgcctgaagggtcctgggcaggttgcaagactggtcttagagagaagagtccccaggagtacacagcagtgtccttctgctaatgacagcatgggagatgaacgcacggctgtttccttggtaacagccttgcctggcaggccttcgagctgtgtctcggtgacagatggtcctaagtttgaagtcaaactaaaaaagaatgccaatggtttgggattcagtttcgtgcagatggagaaagagagctgcagccatctcaaaagtgatcttgtgaggattaagaggctctttccggggcagccagctgaggagaatggggccattgcagctggtgacattatcctggccgtgaatggaaggtccacggaaggcctcatcttccaggaggtgctgcatttactgagaggggccccacaggaagtcacgctcctcctttgccgaccccctccaggtgcgctgcctgagatggagcaggaatggcagacacctgaactctcagctgacaaagaattcaccagggcaacatgtactgactcatgtaccagccccatcctggatcaagaggacagctggagggacagtgcctccccagatgcaggggaaggcctgggtctcaggccagagtcttcccaaaaggccatcagagaggcacaatggggccaaaacagagagagacctttgggccagttccttgacacattctcctgagtcccaccctcatttatgcaaacttcaccaagaaagggatgaatcaacattggcgacctctttggaaaaggatgtgaggcaaaactgctattcagtttgtgatatcatgagacttggaagataaacacagagaacagccgtcttccgaggcagagactgagggtttctgcatggaggtcctttggacagaagagccctcaggtgaccttggtccaaagagtgtacccaccagctctgccactgggaaagaaacctgtaggctcctgcaaaggtgacctgggatgaagggcctggcccagttgttaagagctcacttcaagaagagcatgcttgtcaattccaagactcattttgaatcatggctgttgcctctcttcagttctggggtttacgtccagcaaagctttgtgcgcg

SEQ ID NO: 331631 - DNA, 412 bp, Homo sapiens
ccataaagtggcatgagtcctacttttccttcacaaaatatttctcttttatgaggctaaggaaaactcccttgctcagtgggattaagaagaggacggaactgttctgtttagggaaggctactggcaaaatgacgaggtcacccattaaaagctgcttattgttttagataaacacagagaacagccgtcttccgaggcagagactgagggtttctgcatggaggtcctttggacagaagagccctcaggtgaccttggtccaaagagtgtacccaccagctctgccactgggaaagaaacctgtaggctcctgcaaaggtgacctgggatgaagggcctggcccagttgttaagagctcacttcaagaagagcatgcttgtcaattccaagactcattttgaatcatgg

SEQ ID NO: 331632 - DNA, 827 bp, Homo sapiens
gactttgtatcctgaattgcctcgtctgatatggaaccaataatttatcagctgtcaaattccagatgatactcaccctaactgcccaagatggacaactaatcaaaacaagctcaggcctcctattgttacagagaaggggtcccgacgcagaccccaagggaaggttcttggatctcatgcaagaaagaattcagagcgagtctataaagtgaaaacaagtgtatttaaaaagtaaaggagtaaaaaatggctactccatagagacagcagccccaagggctgctggttgtccatttttaaggttatttcttgattatatgctaaaaactataattagatattattgcattgtgaattatttatgcctcccgataagagaagctggctgccttcagcaaaatcctttcctgaagcttttgtaaaacctcctggccttccaagaaggtttgcatctttctacgatttttctcaccatcctgaccgatctcctacactttatgacctgtatcttgtgccaacctcctatctcatcctgtgacctagaatgccttaatgtctgggaatgcagccccgtaggtctcagcctcattttacccagcccctactcaagatggaattggtctgatttaaacacctctggcactaacatctcctttagacagagcagggcgagagttctgtggtcacaataggtagggactatgccccaatcagcatgaagcagttacagaaggaaagaccatcagtccctctgcctcccataaagatttcccaccctgtagaatgctttcatgtttgaataaatccctgctttcactgcttca

SEQ ID NO: 331633 - DNA, 4316 bp, Homo sapiens
agcgggcgggcacgccgccgcctgcgcggttccgggtgctcccggcgcggcgctgcccagggcacacttgaccgaggtcgggctgcggggaaaggcgggtctggggagaaccccgagagacgcggcgtcctccaactcctcctccttctcctcgcggccgccgaagccacagcccgagcccgagcccgagcccgagccggcgccaccgcgcccccggccatggcttttgccaatttccgccgcatcctgcgcctgtctaccttcgagaagagaaagtcccgcgaatatgagcacgtccgccgcgacctggaccccaacgaggtgtgggagatcgtgggcgagctgggcgacggcgccttcggcaaggtttacaaggccaagaataaggagacgggtgctttggctgcggccaaagtcattgaaaccaagagtgaggaggagctggaggactacatcgtggagattgagatcctggccacctgcgaccacccctacattgtgaagctcctgggagcctactatcacgacgggaagctgtggatcatgattgagttctgtccagggggagccgtggacgccatcatgctggagctggacagaggcctcacggagccccagatacaggtggtttgccgccagatgctagaagccctcaacttcctgcacagcaagaggatcatccaccgagatctgaaagctggcaacgtgctgatgaccctcgagggagacatcaggctgggatggcccccgaggtggtcatgtgtgagaccatgaaagacacgccctacgactacaaagccgacatctggtccctgggcatcacgctgattgagatggcccagatcgagccgccacaccacgagctcaaccccatgcgggtcctgctaaagatcgccaagtcagaccctcccacgctgctcacgccctccaagtggtctgtagagttccgtgacttcctgaagatagccctggataagaacccagaaacccgacccagtgccgcgcagctgctggagcatcccttcgtcagcagcatcaccagtaacaaggctctgcgggagctggtggctgaggccaaggccgaggtgatggaagagatcgaagacggccgggatgagggggaagaggaggacgccgtggatgccgcctccaccctggagaaccatactcagaactcctctgaggtgagtccgccaagcctcaatgctgacaagcctctcgaggagtcaccttccaccccgctggcacccagccagtctcaggacagtgtgaatgagccctgcagccagccctctggggacagatccctccaaaccaccagtcccccagtcgtggcccctggaaatgagaacggcctggcagtgcctgtgcccctgcggaagtcccgacccgtgtcaatggatgccagaattcaggtagcccaggagaagcaagttgctgagcagggtggggacctcagcccagcagccaacagatctcaaaaggccagccagagccggcccaacagcagcgccctggagaccttgggtggggagaagctggccaatggcagcctggagccacctgcccaggcagctccagggccttccaagagggactcggactgcagcagcctctgcacctctgagagcatggactatggtaccaatctctccactgacctgtcgctgaacaaagagatgggctctctgtccatcaaggacccgaaactgtacaaaaaaaccctcaagcggacacgcaaatttgtggtggatggtgtggaggtgagcatcaccacctccaagatcatcagcgaagatgagaagaaggatgaggagatgagatttctcaggcgccaggaactccgagagcttcggctgctccagaaagaagagcatcggaaccagacccagctgagtaacaagcatgagctgcagctggagcaaatgcataaacgttttgaacaggaaatcaacgccaagaagaagttctttgacacggaattagagaacctggagcgtcagcaaaagcagcaagtggagaagatggagcaagaccatgccgtgcgccgccgggaggaggccaggcggatccgcctggagcaggatcgggactacaccaggttccaagagcagctcaaactgatgaagaaagaggtgaagaacgaggtggagaagctcccccgacagcagcggaaggaaagcatgaagcagaagatggaggagcacacgcagaaaaagcagcttcttgaccgggactttgtagccaagcagaaggaggacctggagctggccatgaagaggctcaccaccgacaacaggcgggagatctgtgacaaggagcgcgagtgcctcatgaagaagcaggagctccttcgagaccgggaagcagccctgtgggagatggaagagcaccagctgcaggagaggcaccagctggtgaagcagcagctcaaagaccagtacttcctccagcggcacgagctgctgcgcaagcatgagaaggagcgggagcagatgcagcgctacaaccagcgcatgatagagcagctgaaggtgcggcagcaacaggaaaaggcgcggctgcccaagatccagaggagtgagggcaagacgcgcatggccatgtacaagaagagcctccacatcaacggcgggggcagcgcagctgagcagcgtgagaagatcaagcagttctcccagcaggaggagaagaggcagaagtcggagcggctgcagcaacagcagaaacacgagaaccagatgcgggacatgctggcgcagtgtgagagcaacatgagcgagctgcagcagctgcagaatgaaaagtgccacctcctggtagagcacgaaacccagaaactgaaggccctggatgagagccataaccagaacctgaaggaatggcgggacaagcttcggccgcgcaagaaggctctggaagaggatctgaaccagaagaagcgggagcaggagatgttcttcaagctgagcgaggaggcggagtgcccaaacccctccaccccaagcaaggccgccaagttcttcccctacagttctgcggatgcttcttaacaaccgcccggggctgtggctggcagcttggtgggccccagggccttctccttcattctctgtgaacatgtaactcaggaccccttttccctcttgcgtctgtgccagctcaaatccagcccctcgccctgtgccaccccaactgtgcctgatagacctgccccagcgttcctgacttcttgctggcctgtggagggtgaggtgtaattatttgtcacctgaacctaatgtatattctccttgagccccagatcccttcaagctggaagggatggggctgttggtggggtcagggtccaagaggaatgggtgttctgtggcctcgagtcctctcctgtttgcgaaaataccagttttgctctctgtgggacaaagcactgctgatgaagtccccgtgggctcatccgggctggaattcttggtttttcagccattccctgcagagtcactcaatcatcaagtccctcacagccatttctgttcccagaggagccaggcctgcagctggctgctcaggagatggcctcattcctcctgttctcccagtttgctttccacttaagacaaagccttgtctatgtggggggcggggaccggggaaagagggaggctgaaatgtttattctgcttctcccgtgtttcatgccatctcgcgtcccccttcctgcacatgggtgtgaatgcacacacatacgcgtacacacaggacttggtctgctggcctggcctcttctgcccaggtgggttggaacacgtttgctgcctgagcctgtgccactgagcatgttaggtggagcagttggtgtggcacgtgcggggtgttggcaccggaggcatggaaaagcacaggctgtactgccaggctgcgatgcgtgctggcccccgcacaggctcctgtgtgcagggactgattcctcagcacacgaggcttccacaacccagtctgctccatagcactctggcccaccctgtctgcaggtgaaacaggagggctgtttgcctctgccccatccccccgactgtgttcaggagtcccaccttgcatttcagacctgggctggcagtctgttggacttctcttcaggaagaaaaagcatcagggggaaatggaatgcccctgccccaggaacatggcagaagcacaggttctgtacctcagatggactcctgctgggccttcggggtctcagttggcttcccccagattctgattctacagctgcagaatgtatataacgcaataaaagcaaatgtttgaaccag

SEQ ID NO: 331634 - DNA, 4875 bp, Homo sapiens
agcgggcgggcacgccgccgcctgcgcggttccgggtgctcccggcgcggcgctgcccagggcacacttgaccgaggtcgggctgcggggaaaggcgggtctggggagaaccccgagagacgcggcgtcctccaactcctcctccttctcctcgcggccgccgaagccacagcccgagcccgagcccgagcccgagccggcgccaccgcgcccccggccatggcttttgccaatttccgccgcatcctgcgcctgtctaccttcgagaagagaaagtcccgcgaatatgagcacgtccgccgcgacctggaccccaacgaggtgtgggagatcgtgggcgagctgggcgacggcgccttcggcaaggtttacaaggccaagaataaggagacgggtgctttggctgcggccaaagtcattgaaaccaagagtgaggaggagctggaggactacatcgtggagattgagatcctggccacctgcgaccacccctacattgtgaagctcctgggagcctactatcacgacgggaagctgtggatcatgattgagttctgtccagggggagccgtggacgccatcatgctggagctggacagaggcctcacggagccccagatacaggtggtttgccgccagatgctagaagccctcaacttcctgcacagcaagaggatcatccaccgagatctgaaagctggcaacgtgctgatgaccctcgagggagacatcaggctggctgactttggtgtgtctgccaagaatctgaagactctacagaaacgagattccttcatcggcacgccttactggatggcccccgaggtggtcatgtgtgagaccatgaaagacacgccctacgactacaaagccgacatctggtccctgggcatcacgctgattgagatggcccagatcgagccgccacaccacgagctcaaccccatgcgggtcctgctaaagatcgccaagtcagaccctcccacgctgctcacgccctccaagtggtctgtagagttccgtgacttcctgaagatagccctggataagaacccagaaacccgacccagtgccgcgcagctgctggagcatcccttcgtcagcagcatcaccagtaacaaggctctgcgggagctggtggctgaggccaaggccgaggtgatggaagagatcgaagacggccgggatgagggggaagaggaggacgccgtggatgccgcctccaccctggagaaccatactcagaactcctctgaggtgagtccgccaagcctcaatgctgacaagcctctcgaggagtcaccttccaccccgctggcacccagccagtctcaggacagtgtgaatgagccctgcagccagccctctggggacagatccctccaaaccaccagtcccccagtcgtggcccctggaaatgagaacggcctggcagtgcctgtgcccctgcggaagtcccgacccgtgtcaatggatgccagaattcaggtagcccaggagaagcaagttgctgagcagggtggggacctcagcccagcagccaacagatctcaaaaggccagccagagccggcccaacagcagcgccctggagaccttgggtggggagaagctggccaatggcagcctggagccacctgcccaggcagctccagggccttccaagagggactcggactgcagcagcctctgcacctctgagagcatggactatggtaccaatctctccactgacctgtcgctgaacaaagagatgggctctctgtccatcaagataagcagatggaggctcagagaagtgaggagccagcccagggccaggtaggagtgggaagatggacagaccccaggctccaaactctaaaccttcccagtgggagccatggcctccttcttagggagctggaaggggctgactcctttcctggcctccccgataaatcccggggtgttactaaactcaccatgggtcacctgaccctctacccaaagctcattttagaggaaatactgtatgattttgtttttccttcccaaatgtacttggtgaaaaacacgcagtagagactcgaacatatttgctaagcaaaggggagtgacaggagccgcaacggccaatcagctttaggcagggaagggaagcacagttccaacaggccaccgggacaagcatgcacagcagctgttacctgtgagcagcgtcttccttaggaccggcatcctgccacttctcttcctgaagacactgagtgaaaaaaaggacccgaaactgtacaaaaaaaccctcaagcggacacgcaaatttgtggtggatggtgtggaggtgagcatcaccacctccaagatcatcagcgaagatgagaagaaggatgaggagatgagatttctcaggcgccaggaactccgagagcttcggctgctccagaaagaagagcatcggaaccagacccagctgagtaacaagcatgagctgcagctggagcaaatgcataaacgttttgaacaggaaatcaacgccaagaagaagttctttgacacggaattagagaacctggagcgtcagcaaaagcagcaagtggagaagatggagcaagaccatgccgtgcgccgccgggaggaggccaggcggatccgcctggagcaggatcgggactacaccaggttccaagagcagctcaaactgatgaagaaagaggtgaagaacgaggtggagaagctcccccgacagcagcggaaggaaagcatgaagcagaagatggaggagcacacgcagaaaaagcagcttcttgaccgggactttgtagccaagcagaaggaggacctggagctggccatgaagaggctcaccaccgacaacaggcgggagatctgtgacaaggagcgcgagtgcctcatgaagaagcaggagctccttcgagaccgggaagcagccctgtgggagatggaagagcaccagctgcaggagaggcaccagctggtgaagcagcagctcaaagaccagtacttcctccagcggcacgagctgctgcgcaagcatgagaaggagcgggagcagatgcagcgctacaaccagcgcatgatagagcagctgaaggtgcggcagcaacaggaaaaggcgcggctgcccaagatccagaggagtgagggcaagacgcgcatggccatgtacaagaagagcctccacatcaacggcgggggcagcgcagctgagcagcgtgagaagatcaagcagttctcccagcaggaggagaagaggcagaagtcggagcggctgcagcaacagcagaaacacgagaaccagatgcgggacatgctggcgcagtgtgagagcaacatgagcgagctgcagcagctgcagaatgaaaagtgccacctcctggtagagcacgaaacccagaaactgaaggccctggatgagagccataaccagaacctgaaggaatggcgggacaagcttcggccgcgcaagaaggctctggaagaggatctgaaccagaagaagcgggagcaggagatgttcttcaagctgagcgaggaggcggagtgcccaaacccctccaccccaagcaaggccgccaagttcttcccctacagttctgcggatgcttcttaacaaccgcccggggctgtggctggcagcttggtgggccccagggccttctccttcattctctgtgaacatgtaactcaggaccccttttccctcttgcgtctgtgccagctcaaatccagcccctcgccctgtgccaccccaactgtgcctgatagacctgccccagcgttcctgacttcttgctggcctgtggagggtgaggtgtaattatttgtcacctgaacctaatgtatattctccttgagccccagatcccttcaagctggaagggatggggctgttggtggggtcagggtccaagaggaatgggtgttctgtggcctcgagtcctctcctgtttgcgaaaataccagttttgctctctgtgggacaaagcactgctgatgaagtccccgtgggctcatccgggctggaattcttggtttttcagccattccctgcagagtcactcaatcatcaagtccctcacagccatttctgttcccagaggagccaggcctgcagctggctgctcaggagatggcctcattcctcctgttctcccagtttgctttccacttaagacaaagccttgtctatgtggggggcggggaccggggaaagagggaggctgaaatgtttattctgcttctcccgtgtttcatgccatctcgcgtcccccttcctgcacatgggtgtgaatgcacacacatacgcgtacacacaggacttggtctgctggcctggcctcttctgcccaggtgggttggaacacgtttgctgcctgagcctgtgccactgagcatgttaggtggagcagttggtgtggcacgtgcggggtgttggcaccggaggcatggaaaagcacaggctgtactgccaggctgcgatgcgtgctggcccccgcacaggctcctgtgtgcagggactgattcctcagcacacgaggcttccacaacccagtctgctccatagcactctggcccaccctgtctgcaggtgaaacaggagggctgtttgcctctgccccatccccccgactgtgttcaggagtcccaccttgcatttcagacctgggctggcagtctgttggacttctcttcaggaagaaaaagcatcagggggaaatggaatgcccctgccccaggaacatggcagaagcacaggttctgtacctcagatggactcctgctgggccttcggggtctcagttggcttcccccagattctgattctacagctgcagaatgtatataacgcaataaaagcaaatgtttgaaccag

SEQ ID NO: 331635 - DNA, 1982 bp, Homo sapiens
agctcggtggcatgtcctctgcagaccgggaagcagccctgtgggagatggaagagcaccagctgcaggagaggcaccagctggtgaagcagcagctcaaagaccagtacttcctccagcggcacgagctgctgcgcaagcatgagaaggagcgggagcagatgcagcgctacaaccagcgcatgatagagcagctgaaggtgcggcagcaacaggaaaaggcgcggctgcccaagatccagaggagtgagggcaagacgcgcatggccatgtacaagaagagcctccacatcaacggcgggggcagcgcagctgagcagcgtgagaagatcaagcagttctcccagcaggaggagaagaggcagaagtcggagcggctgcagcaacagcagaaacacgagaaccagatgcgggacatgctggcgcagtgtgagagcaacatgagcgagctgcagcagctgcagaatgaaaagtgccacctcctggtagagcacgaaacccagaaactgaaggccctggatgagagccataaccagaacctgaaggaatggcgggacaagcttcggccgcgcaagaaggctctggaagaggatctgaaccagaagaagcgggagcaggagatgttcttcaagctgagcgaggaggcggagtgcccaaacccctccaccccaagcaaggccgccaagttcttcccctacagttctgcggatgcttcttaacaaccgcccggggctgtggctggcagcttggtgggccccagggccttctccttcattctctgtgaacatgtaactcaggaccccttttccctcttgcgtctgtgccagctcaaatccagcccctcgccctgtgccaccccaactgtgcctgatagacctgccccagcgttcctgacttcttgctggcctgtggagggtgaggtgtaattatttgtcacctgaacctaatgtatattctccttgagccccagatcccttcaagctggaagggatggggctgttggtggggtcagggtccaagaggaatgggtgttctgtggcctcgagtcctctcctgtttgcgaaaataccagttttgctctctgtgggacaaagcactgctgatgaagtccccgtgggctcatccgggctggaattcttggtttttcagccattccctgcagagtcactcaatcatcaagtccctcacagccatttctgttcccagaggagccaggcctgcagctggctgctcaggagatggcctcattcctcctgttctcccagtttgctttccacttaagacaaagccttgtctatgtggggggcggggaccggggaaagagggaggctgaaatgtttattctgcttctcccgtgtttcatgccatctcgcgtcccccttcctgcacatgggtgtgaatgcacacacatacgcgtacacacaggacttggtctgctggcctggcctcttctgcccaggtgggttggaacacgtttgctgcctgagcctgtgccactgagcatgttaggtggagcagttggtgtggcacgtgcggggtgttggcaccggaggcatggaaaagcacaggctgtactgccaggctgcgatgcgtgctggcccccgcacaggctcctgtgtgcagggactgattcctcagcacacgaggcttccacaacccagtctgctccatagcactctggcccaccctgtctgcaggtgaaacaggagggctgtttgcctctgccccatccccccgactgtgttcaggagtcccaccttgcatttcagacctgggctggcagtctgttggacttctcttcaggaagaaaaagcatcagggggaaatggaatgcccctgccccaggaacatggcagaagcacaggttctgtacctcagatggactcctgctgggccttcggggtctcagttggcttcccccagattctgattctacagctgcagaatgtatataacgcaataaaagcaaatgtttgaaccag

SEQ ID NO: 331636 - DNA, 4439 bp, Homo sapiens
agcgggcgggcacgccgccgcctgcgcggttccgggtgctcccggcgcggcgctgcccagggcacacttgaccgaggtcgggctgcggggaaaggcgggtctggggagaaccccgagagacgcggcgtcctccaactcctcctccttctcctcgcggccgccgaagccacagcccgagcccgagcccgagcccgagccggcgccaccgcgcccccggccatggcttttgccaatttccgccgcatcctgcgcctgtctaccttcgagaagagaaagtcccgcgaatatgagcacgtccgccgcgacctggaccccaacgaggtgtgggagatcgtgggcgagctgggcgacggcgccttcggcaaggtttacaaggccaagaataaggagacgggtgctttggctgcggccaaagtcattgaaaccaagagtgaggaggagctggaggactacatcgtggagattgagatcctggccacctgcgaccacccctacattgtgaagctcctgggagcctactatcacgacgggaagctgtggatcatgattgagttctgtccagggggagccgtggacgccatcatgctggagctggacagaggcctcacggagccccagatacaggtggtttgccgccagatgctagaagccctcaacttcctgcacagcaagaggatcatccaccgagatctgaaagctggcaacgtgctgatgaccctcgagggagacatcaggctggctgactttggtgtgtctgccaagaatctgaagactctacagaaacgagattccttcatcggcacgccttactggatggcccccgaggtggtcatgtgtgagaccatgaaagacacgccctacgactacaaagccgacatctggtccctgggcatcacgctgattgagatggcccagatcgagccgccacaccacgagctcaaccccatgcgggtcctgctaaagatcgccaagtcagaccctcccacgctgctcacgccctccaagtggtctgtagagttccgtgacttcctgaagatagccctggataagaacccagaaacccgacccagtgccgcgcagctgctggagcatcccttcgtcagcagcatcaccagtaacaaggctctgcgggagctggtggctgaggccaaggccgaggtgatggaagagatcgaagacggccgggatgagggggaagaggaggacgccgtggatgccgcctccaccctggagaaccatactcagaactcctctgaggtgagtccgccaagcctcaatgctgacaagcctctcgaggagtcaccttccaccccgctggcacccagccagtctcaggacagtgtgaatgagccctgcagccagccctctggggacagatccctccaaaccaccagtcccccagtcgtggcccctggaaatgagaacggcctggcagtgcctgtgcccctgcggaagtcccgacccgtgtcaatggatgccagaattcaggtagcccaggagaagcaagttgctgagcagggtggggacctcagcccagcagccaacagatctcaaaaggccagccagagccggcccaacagcagcgccctggagaccttgggtggggagaagctggccaatggcagcctggagccacctgcccaggcagctccagggccttccaagagggactcggactgcagcagcctctgcacctctgagagcatggactatggtaccaatctctccactgacctgtcgctgaacaaagagatgggctctctgtccatcaaggacccgaaactgtacaaaaaaaccctcaagcggacacgcaaatttgtggtggatggtgtggaggtgagcatcaccacctccaagatcatcagcgaagatgagaagaaggatgaggagatgagatttctcaggcgccaggaactccgagagcttcggctgctccagaaagaagagcatcggaaccagacccagctgagtaacaagcatgagctgcagctggagcaaatgcataaacgttttgaacaggaaatcaacgccaagaagaagttctttgacacggaattagagaacctggagcgtcagcaaaagcagcaagtggagaagatggagcaagaccatgccgtgcgccgccgggaggaggccaggcggatccgcctggagcaggatcgggactacaccaggttccaagagcagctcaaactgatgaagaaagaggtgaagaacgaggtggagaagctcccccgacagcagcggaaggaaagcatgaagcagaagatggaggagcacacgcagaaaaagcagcttcttgaccgggactttgtagccaagcagaaggaggacctggagctggccatgaagaggctcaccaccgacaacaggcgggagatctgtgacaaggagcgcgagtgcctcatgaagaagcaggagctccttcgagaccgggaagcagccctgtgggagatggaagagcaccagctgcaggagaggcaccagctggtgaagcagcagctcaaagaccagtacttcctccagcggcacgagctgctgcgcaagcatgagaaggagcgggagcagatgcagcgctacaaccagcgcatgatagagcagctgaaggtgcggcagcaacaggaaaaggcgcggctgcccaagatccagaggagtgagggcaagacgcgcatggccatgtacaagaagagcctccacatcaacggcgggggcagcgcagctgagcagcgtgagaagatcaagcagttctcccagcaggaggagaagaggcagaagtcggagcggctgcagcaacagcagaaacacgagaaccagatgcgggacatgctggcgcagtgtgagagcaacatgagcgagctgcagcagctgcagaatgaaaagtgccacctcctggtagagcacgaaacccagaaactgaaggccctggatgagagccataaccagaacctgaaggaatggcgggacaagcttcggccgcgcaagaaggctctggaagaggatctgaaccagaagaagcgggagcaggagatgttcttcaagctgagcgaggaggcggagtgcccaaacccctccaccccaagcaaggccgccaagttcttcccctacagttctgcggatgcttcttaacaaccgcccggggctgtggctggcagcttggtgggccccagggccttctccttcattctctgtgaacatgtaactcaggaccccttttccctcttgcgtctgtgccagctcaaatccagcccctcgccctgtgccaccccaactgtgcctgatagacctgccccagcgttcctgacttcttgctggcctgtggagggtgaggtgtaattatttgtcacctgaacctaatgtatattctccttgagccccagatcccttcaagctggaagggatggggctgttggtggggtcagggtccaagaggaatgggtgttctgtggcctcgagtcctctcctgtttgcgaaaataccagttttgctctctgtgggacaaagcactgctgatgaagtccccgtgggctcatccgggctggaattcttggtttttcagccattccctgcagagtcactcaatcatcaagtccctcacagccatttctgttcccagaggagccaggcctgcagctggctgctcaggagatggcctcattcctcctgttctcccagtttgctttccacttaagacaaagccttgtctatgtggggggcggggaccggggaaagagggaggctgaaatgtttattctgcttctcccgtgtttcatgccatctcgcgtcccccttcctgcacatgggtgtgaatgcacacacatacgcgtacacacaggacttggtctgctggcctggcctcttctgcccaggtgggttggaacacgtttgctgcctgagcctgtgccactgagcatgttaggtggagcagttggtgtggcacgtgcggggtgttggcaccggaggcatggaaaagcacaggctgtactgccaggctgcgatgcgtgctggcccccgcacaggctcctgtgtgcagggactgattcctcagcacacgaggcttccacaacccagtctgctccatagcactctggcccaccctgtctgcaggtgaaacaggagggctgtttgcctctgccccatccccccgactgtgttcaggagtcccaccttgcatttcagacctgggctggcagtctgttggacttctcttcaggaagaaaaagcatcagggggaaatggaatgcccctgccccaggaacatggcagaagcacaggttctgtacctcagatggactcctgctgggccttcggggtctcagttggcttcccccagattctgattctacagctgcagaatgtatataacgcaataaaagcaaatgtttgaaccagaaaaaaaaaaaaaaaaaaaccgggtcatactggggcgagaaaaggtatag

SEQ ID NO: 331637 - DNA, 1731 bp, Homo sapiens
agcgggcgggcacgccgccgcctgcgcggttccgggtgctcccggcgcggcgctgcccagggcacacttgaccgaggtcgggctgcggggaaaggcgggtctggggagaaccccgagagacgcggcgtcctccaactcctcctccttctcctcgcggccgccgaagccacagcccgagcccgagcccgagcccgagccggcgccaccgcgcccccggccatggcttttgccaatttccgccgcatcctgcgcctgtctaccttcgagaagagaaagtcccgcgaatatgagcacgtccgccgcgacctggaccccaacgaggtgtgggagatcgtgggcgagctgggcgacggcgccttcggcaaggtttacaaggccaagaataaggagacgggtgctttggctgcggccaaagtcattgaaaccaagagtgaggaggagctggaggactacatcgtggagattgagatcctggccacctgcgaccacccctacattgtgaagctcctgggagcctactatcacgacgggaagctgtggatcatgattgagttctgtccagggggagccgtggacgccatcatgctggagctggacagaggcctcacggagccccagatacaggtggtttgccgccagatgctagaagccctcaacttcctgcacagcaagaggatcatccaccgagatctgaaagctggcaacgtgctgatgaccctcgagggagacatcaggctggctgactttggtgtgtctgccaagaatctgaagactctacagaaacgagattccttcatcggcacgccttactggatggcccccgaggtggtcatgtgtgagaccatgaaagacacgccctacgactacaaagccgacatctggtccctgggcatcacgctgattgagatggcccagatcgagccgccacaccacgagctcaaccccatgcgggtcctgctaaagatcgccaagtcagaccctcccacgctgctcacgccctccaagtggtctgtagagttccgtgacttcctgaagatagccctggataagaacccagaaacccgacccagtgccgcgcagctgctggagcatcccttcgtcagcagcatcaccagtaacaaggctctgcgggagctggtggctgaggccaaggccgaggtgatggaagagatcgaagacggccgggatgagggggaagaggaggacgccgtggatgccgcctccaccctggagaaccatactcagaactcctctgaggtgagtccgccaagcctcaatgctgacaagcctctcgaggagtcaccttccaccccgctggcacccagccagtctcaggacagtgtgaatgagccctgcagccagccctctggggacagatccctccaaaccaccagtcccccagtcgtggcccctggaaatgagaacggcctggcagtgcctgtgcccctgcggaagtcccgacccgtgtcaatggatgccagaattcaggtagcccaggagaagcaacttgcatttcagacctgggctggcagtctgttggacttctcttcaggaagaaaaagcatcagggggaaatggaatgcccctgccccaggaacatggcagaagcacaggttctgtacctcagatggactcctgctgggccttcggggtctcagttggcttcccccagattctgattctacagctgcagaatgtatataacgcaataaaagcaaatgtttgaaccag

SEQ ID NO: 331638 - DNA, 627 bp, Homo sapiens
agcgggcgggcacgccgccgcctgcgcggttccgggtgctcccggcgcggcgctgcccagggcacacttgaccgaggtcgggctgcggggaaaggcgggtctggggagaaccccgagagacgcggcgtcctccaactcctcctccttctcctcgcggccgccgaagccacagcccgagcccgagcccgagcccgagccggcgccaccgcgcccccggccatggcttttgccaatttccgccgcatcctgcgcctgtctaccttcgagaagagaaagtcccgcgaatatgagcacgtccgccgcgacctggaccccaacgaggtgtgggagatcgtgggcgagctgggcgacggcgccttcggcaaggtttacaaggccaagaataaggagacgggtgctttggctgcggccaaagtcattgaaaccaagagtgaggaggagctggaggactacatcgtggagattgagatcctggccacctgcgaccacccctacattgtgaagctcctgggagcctactatcacgacgggaagctgtgggtaaggctgccgccctgcctgtcccagctcagcccccatggcctgtgctctggagctagcctggtcctgaagtcttcagctctttct

SEQ ID NO: 331639 - DNA, 592 bp, Homo sapiens
ccttgtagctgagagtacaggcacccaccaccatgcctggctaattttctgtagagacaaggtctcctatgttgcccaggctggtcttgaactcctggcctcaagggatccgtctgcctcggcctcccaaagtgctggaattacaggcgtgagctaccgtgctgcctctgtgcacttgacatgagatcttcaccagagcaaaccaagtcacccaaataagctggctcccactggggaacaggagccccagctgagccgcaggagccacatggcacaccctgggcgggacatcgggggcctgggttcaaatcccggcactgctgagtctcctcactgcgtggcctgggcacgtccctgctcctcgccgatgtctgggtccccatctggacagtggtgtccatgatgaaaagggcatcgtgtaggccctgtcactgttttagcttgtgaaagtttcctctgtcctttgaggggcatgattgggacagtggagtctgtgacgtggggggcttctctctgctcttgcctcctccatgcttacctctgacgcctgtcctcccaggtctgtagagttccgtgacttcctgaagatagc

SEQ ID NO: 331640 - DNA, 373 bp, Homo sapiens
cagctggggagcgcaggggctggtgcgagacctggaatggtgaccaggccccctctctgcctttgcccaatccctgcccctcaaataccccgttctgaatacctaaatctggcctcatccttcatggccccattatcccctcctccatgcagccttcctcgattgccctgcctccatctggaagtaagctcttccatctctggataccccaacactttacattgaccacctcccaaacccttagcacctcctaccttgttttagggttatttatttgtaagtcacatctccttgaccaacccagtatattcccctgcccacttggcatcttttaagtctgaaggacatcaaacttgtgatgtcccagacctgg

SEQ ID NO: 331641 - DNA, 296 bp, Homo sapiens
ggcgctggcccacttcatcttgagggtgtctgactttctccactgcatctctgactcttgccttgaacatacagcagcatggcctttaatatatatatatatatttttctagaccctggagaaccatactcagaactcctctgaggtgagtccgccaagcctcaatgctgacaagcctctcgaggagtcaccttccaccccgctggcacccagccagtctcaggacagtgtgaatgagccctgcagccagccctctggggacagatccctccaaaccaccagtcccccagtcgtgg

SEQ ID NO: 331642 - DNA, 411 bp, Homo sapiens
ccttagctgaaatgctgagacttgtctaatggttttccctggccaggacccgaaactgtacaaaaaaaccctcaagcggacacgcaaatttgtggtggatggtgtggaggtgagcatcaccacctccaagatcatcagcgaagatgagaagaaggatgaggagatgagatttctcaggcaagcctgggaagggccaccaatggtggtaacagggtggggctatggtaagaggagtgggcattggtcctttggtgagagggctgtctgtctacagcatgaagtgggggaatcaaggaggcaaaaggaaactcattttgcctgcgatcctgcactcccccatctacccaaccgttcacctatctatccactcatccattcatttattcacccatctatccacctactcaccta

SEQ ID NO: 331643 - DNA, 4389 bp, Homo sapiens
agcgggcgggcacgccgccgcctgcgcggttccgggtgctcccggcgcggcgctgcccagggcacacttgaccgaggtcgggctgcggggaaaggcgggtctggggagaaccccgagagacgcggcgtcctccaactcctcctccttctcctcgcggccgccgaagccacagcccgagcccgagcccgagcccgagccggcgccaccgcgcccccggccatggcttttgccaatttccgccgcatcctgcgcctgtctaccttcgagaagagaaagtcccgcgaatatgagcacgtccgccgcgacctggaccccaacgaggtgtgggagatcgtgggcgagctgggcgacggcgccttcggcaaggtttacaaggccaagaataaggagacgggtgctttggctgcggccaaagtcattgaaaccaagagtgaggaggagctggaggactacatcgtggagattgagatcctggccacctgcgaccacccctacattgtgaagctcctgggagcctactatcacgacgggaagctgtggatcatgattgagttctgtccagggggagccgtggacgccatcatgctggagctggacagaggcctcacggagccccagatacaggtggtttgccgccagatgctagaagccctcaacttcctgcacagcaagaggatcatccaccgagatctgaaagctggcaacgtgctgatgaccctcgagggagacatcaggctggctgactttggtgtgtctgccaagaatctgaagactctacagaaacgagattccttcatcggcacgccttactggatggcccccgaggtggtcatgtgtgagaccatgaaagacacgccctacgactacaaagccgacatctggtccctgggcatcacgctgattgagatggcccagatcgagccgccacaccacgagctcaaccccatgcgggtcctgctaaagatcgccaagtcagaccctcccacgctgctcacgccctccaagtggtctgtagagttccgtgacttcctgaagatagccctggataagaacccagaaacccgacccagtgccgcgcagctgctggagcatcccttcgtcagcagcatcaccagtaacaaggctctgcgggagctggtggctgaggccaaggccgaggtgatggaagagatcgaagacggccgggatgagggggaagaggaggacgccgtggatgccgcctccaccctggagaaccatactcagaactcctctgaggtgagtccgccaagcctcaatgctgacaagcctctcgaggagtcaccttccaccccgctggcacccagccagtctcaggacagtgtgaatgagccctgcagccagccctctggggacagatccctccaaaccaccagtcccccagtcgtggcccctggaaatgagaacggcctggcagtgcctgtgcccctgcggaagtcccgacccgtgtcaatggatgccagaattcaggtagcccaggagaagcaagttgctgagcagggtggggacctcagcccagcagccaacagatctcaaaaggccagccagagccggcccaacagcagcgccctggagaccttgggtggggagaagctggccaatggcagcctggagccacctgcccaggcagctccagggccttccaagagggactcggactgcagcagcctctgcacctctgagagcatggactatggtaccaatctctccactgacctgtcgctgaacaaagagatgggctctctgtccatcaaggacccgaaactgtacaaaaaaaccctcaagcggacacgcaaatttgtggtggatggtgtggaggtgagcatcaccacctccaagatcatcagcgaagatgagaagaaggatgaggagatgagatttctcaggcgccaggaactccgagagcttcggctgctccagaaagaagagcatcggaaccagacccagctgagtaacaagcatgagctgcagctggagcaaatgcataaacgttttgaacaggaaatcaacgccaagaagaagttctttgacacggaattagagaacctggagcgtcagcaaaagcagcaagtggagaagatggagcaagaccatgccgtgcgccgccgggaggaggccaggcggatccgcctggagcaggatcgggactacaccaggttccaagagcagctcaaactgatgaagaaagaggtgaagaacgaggtggagaagctcccccgacagcagcggaaggaaagcatgaagcagaagatggaggagcacacgcagaaaaagcagcttcttgaccgggactttgtagccaagcagaaggaggacctggagctggccatgaagaggctcaccaccgacaacaggcgggagatctgtgacaaggagcgcgagtgcctcatgaagaagcaggagctccttcgagaccgggaagcagccctgtgggagatggaagagcaccagctgcaggagaggcaccagctggtgaagcagcagctcaaagaccagtacttcctccagcggcacgagctgctgcgcaagcatgagaaggagcgggagcagatgcagcgctacaaccagcgcatgatagagcagctgaaggtgcggcagcaacaggaaaaggcgcggctgcccaagatccagaggagtgagggcaagacgcgcatggccatgtacaagaagagcctccacatcaacggcgggggcagcgcagctgagcagcgtgagaagatcaagcagttctcccagcaggaggagaagaggcagaagtcggagcggctgcagcaacagcagaaacacgagaaccagatgcgggacatgctggcgcagtgtgagagcaacatgagcgagctgcagcagctgcagaatgaaaagtgccacctcctggtagagcacgaaacccagaaactgaaggccctggatgagagccataaccagaacctgaaggaatggcgggacaagcttcggccgcgcaagaaggctctggaagaggatctgaaccagaagaagcgggagcaggagatgttcttcaagctgagcgaggaggcggagtgcccaaacccctccaccccaagcaaggccgccaagttcttcccctacagttctgcggatgcttcttaacaaccgcccggggctgtggctggcagcttggtgggccccagggccttctccttcattctctgtgaacatgtaactcaggaccccttttccctcttgcgtctgtgccagctcaaatccagcccctcgccctgtgccaccccaactgtgcctgatagacctgccccagcgttcctgacttcttgctggcctgtggagggtgaggtgtaattatttgtcacctgaacctaatgtatattctccttgagccccagatcccttcaagctggaagggatggggctgttggtggggtcagggtccaagaggaatgggtgttctgtggcctcgagtcctctcctgtttgcgaaaataccagttttgctctctgtgggacaaagcactgctgatgaagtccccgtgggctcatccgggctggaattcttggtttttcagccattccctgcagagtcactcaatcatcaagtccctcacagccatttctgttcccagaggagccaggcctgcagctggctgctcaggagatggcctcattcctcctgttctcccagtttgctttccacttaagacaaagccttgtctatgtggggggcggggaccggggaaagagggaggctgaaatgtttattctgcttctcccgtgtttcatgccatctcgcgtcccccttcctgcacatgggtgtgaatgcacacacatacgcgtacacacaggacttggtctgctggcctggcctcttctgcccaggtgggttggaacacgtttgctgcctgagcctgtgccactgagcatgttaggtggagcagttggtgtggcacgtgcggggtgttggcaccggaggcatggaaaagcacaggctgtactgccaggctgcgatgcgtgctggcccccgcacaggctcctgtgtgcagggactgattcctcagcacacgaggcttccacaacccagtctgctccatagcactctggcccaccctgtctgcaggtgaaacaggagggctgtttgcctctgccccatccccccgactgtgttcaggagtcccaccttgcatttcagacctgggctggcagtctgttggacttctcttcaggaagaaaaagcatcagggggaaatggaatgcccctgccccaggaacatggcagaagcacaggttctgtacctcagatggactcctgctgggccttcggggtctcagttggcttcccccagattctgattctacagctgcagaatgtatataacgcaataaaagcaaatgtttgaaccag

SEQ ID NO: 331644 - DNA, 389 bp, Homo sapiens
gcctcagcacagtttctgaaggctgagatcagggaagagcaagggaataagctcagaacccccagctcctaggttaagttgaggcaagagggacgatggatggccacatctctctgggggtggttctgaagctgtgggcccagcagagctgtggcctcacctgctgcgacagccatgggtccttagctgaaatgctgagacttgtctaatggttttccctggccaggacccgaaactgtacaaaaaaaccctcaagcggacacgcaaatttgtggtggatggtgtggaggtgagcatcaccacctccaagatcatcagcgaagatgagaagaaggatgaggagatgagatttctcaggcgccaggaactccgagagtctccgtcgaact

SEQ ID NO: 331645 - DNA, 3528 bp, Homo sapiens
aaaagcatttaggggcttccttgcattttaagtggttcattagggggttttgggtttgactcatagtttaatctccaaaatatctgggttcaatatgggatttaggaatgtaaagcagttggtttgggtttaaatttcaaagcttggtaaaaggccctggtaaaatttgggagagagaactcttaggccttagctacaaatgaagttctgtcatccagaggtcagccacgagacccagctgataactggtaaatccaactaaaggaaacagctcaaagccatcttccccgcctccggggcctttctggaggtgggcagtgttgcgaatgacgatagccaccgcactagaggcctgggcttgaggcgaaccctgtacaaagtgctttaaaaagaacagacaggctccttcatcctctcactttacagataagcagatggaggctcagagaagtgaggagccagcccagggccaggtaggagtgggaagatggacagaccccaggctccaaactctaaaccttcccagtgggagccatggcctccttcttagggagctggaaggggctgactcctttcctggcctccccgataaatcccggggtgttactaaactcaccatgggtcacctgaccctctacccaaagctcattttagaggaaatactgtatgattttgtttttccttcccaaatgtacttggtgaaaaacacgcagtagagactcgaacatatttgctaagcaaaggggagtgacaggagccgcaacggccaatcagctttaggcagggaagggaagcacagttccaacaggccaccgggacaagcatgcacagcagctgttacctgtgagcagcgtcttccttaggaccggcatcctgccacttctcttcctgaagacactgagtgaaaaaaaggacccgaaactgtacaaaaaaaccctcaagcggacacgcaaatttgtggtggatggtgtggaggtgagcatcaccacctccaagatcatcagcgaagatgagaagaaggatgaggagatgagatttctcaggcgccaggaactccgagagcttcggctgctccagaaagaagagcatcggaaccagacccagctgagtaacaagcatgagctgcagctggagcaaatgcataaacgttttgaacaggaaatcaacgccaagaagaagttctttgacacggaattagagaacctggagcgtcagcaaaagcagcaagtggagaagatggagcaagaccatgccgtgcgccgccgggaggaggccaggcggatccgcctggagcaggatcgggactacaccaggttccaagagcagctcaaactgatgaagaaagaggtgaagaacgaggtggagaagctcccccgacagcagcggaaggaaagcatgaagcagaagatggaggagcacacgcagaaaaagcagcttcttgaccgggactttgtagccaagcagaaggaggacctggagctggccatgaagaggctcaccaccgacaacaggcgggagatctgtgacaaggagcgcgagtgcctcatgaagaagcaggagctccttcgagaccgggaagcagccctgtgggagatggaagagcaccagctgcaggagaggcaccagctggtgaagcagcagctcaaagaccagtacttcctccagcggcacgagctgctgcgcaagcatgagaaggagcgggagcagatgcagcgctacaaccagcgcatgatagagcagctgaaggtgcggcagcaacaggaaaaggcgcggctgcccaagatccagaggagtgagggcaagacgcgcatggccatgtacaagaagagcctccacatcaacggcgggggcagcgcagctgagcagcgtgagaagatcaagcagttctcccagcaggaggagaagaggcagaagtcggagcggctgcagcaacagcagaaacacgagaaccagatgcgggacatgctggcgcagtgtgagagcaacatgagcgagctgcagcagctgcagaatgaaaagtgccacctcctggtagagcacgaaacccagaaactgaaggccctggatgagagccataaccagaacctgaaggaatggcgggacaagcttcggccgcgcaagaaggctctggaagaggatctgaaccagaagaagcgggagcaggagatgttcttcaagctgagcgaggaggcggagtgcccaaacccctccaccccaagcaaggccgccaagttcttcccctacagttctgcggatgcttcttaacaaccgcccggggctgtggctggcagcttggtgggccccagggccttctccttcattctctgtgaacatgtaactcaggaccccttttccctcttgcgtctgtgccagctcaaatccagcccctcgccctgtgccaccccaactgtgcctgatagacctgccccagcgttcctgacttcttgctggcctgtggagggtgaggtgtaattatttgtcacctgaacctaatgtatattctccttgagccccagatcccttcaagctggaagggatggggctgttggtggggtcagggtccaagaggaatgggtgttctgtggcctcgagtcctctcctgtttgcgaaaataccagttttgctctctgtgggacaaagcactgctgatgaagtccccgtgggctcatccgggctggaattcttggtttttcagccattccctgcagagtcactcaatcatcaagtccctcacagccatttctgttcccagaggagccaggcctgcagctggctgctcaggagatggcctcattcctcctgttctcccagtttgctttccacttaagacaaagccttgtctatgtggggggcggggaccggggaaagagggaggctgaaatgtttattctgcttctcccgtgtttcatgccatctcgcgtcccccttcctgcacatgggtgtgaatgcacacacatacgcgtacacacaggacttggtctgctggcctggcctcttctgcccaggtgggttggaacacgtttgctgcctgagcctgtgccactgagcatgttaggtggagcagttggtgtggcacgtgcggggtgttggcaccggaggcatggaaaagcacaggctgtactgccaggctgcgatgcgtgctggcccccgcacaggctcctgtgtgcagggactgattcctcagcacacgaggcttccacaacccagtctgctccatagcactctggcccaccctgtctgcaggtgaaacaggagggctgtttgcctctgccccatccccccgactgtgttcaggagtcccaccttgcatttcagacctgggctggcagtctgttggacttctcttcaggaagaaaaagcatcagggggaaatggaatgcccctgccccaggaacatggcagaagcacaggttctgtacctcagatggactcctgctgggccttcggggtctcagttggcttcccccagattctgattctacagctgcagaatgtatataacgcaataaaagcaaatgtttgaaccag

SEQ ID NO: 331646 - DNA, 3783 bp, Homo sapiens
agcgggcgggcacgccgccgcctgcgcggttccgggtgctcccggcgcggcgctgcccagggcacacttgaccgaggtcgggctgcggggaaaggcgggtctggggagaaccccgagagacgcggcgtcctccaactcctcctccttctcctcgcggccgccgaagccacagcccgagcccgagcccgagcccgagccggcgccaccgcgcccccggccatggcttttgccaatttccgccgcatcctgcgcctgtctaccttcgagaagagaaagtcccgcgaatatgagcacgtccgccgcgacctggaccccaacgaggtgtgggagatcgtgggcgagctgggcgacggcgccttcggcaaggtttacaaggccaagaataaggagacgggtgctttggctgcggccaaagtcattgaaaccaagagtgaggaggagctggaggactacatcgtggagattgagatcctggccacctgcgaccacccctacattgtgaagctcctgggagcctactatcacgacgggaagctgtggatcatgattgagttctgtccagggggagccgtggacgccatcatgctggagctggacagaggcctcacggagccccagatacaggtggtttgccgccagatgctagaagccctcaacttcctgcacagcaagaggatcatccaccgagatctgaaagctggcaacgtgctgatgaccctcgagggagacatcaggctggctgactttggtgtgtctgccaagaatctgaagactctacagaaacgagattccttcatcggcacgccttactggatggcccccgaggtggtcatgtgtgagaccatgaaagacacgccctacgactacaaagccgacatctggtccctgggcatcacgctgattgagatggcccagatcgagccgccacaccacgagctcaaccccatgcgggtcctgctaaagatcgccaagtcagaccctcccacgctgctcacgccctccaagtggtctgtagagttccgtgacttcctgaagatagccctggataagaacccagaaacccgacccagtgccgcgcagctgctggagcatcccttcgtcagcagcatcaccagtaacaaggctctgcgggagctggtggctgaggccaaggccgaggtgatggaagagatcgaagacggccgggatgagggggaagaggaggacgccgtggatgccgcctccaccctggagaaccatactcagaactcctctgaggtgagtccgccaagcctcaatgctgacaagcctctcgaggagtcaccttccaccccgctggcacccagccagtctcaggacagtgtgaatgagccctgcagccagccctctggggacagatccctccaaaccaccagtcccccagtcgtggcccctggaaatgagaacggcctggcagtgcctgtgcccctgcggaagtcccgacccgtgtcaatggatgccagaattcaggtagcccaggagaagcaagttgctgagcagggtggggacctcagcccagcagccaacagatctcaaaaggccagccagagccggcccaacagcagcgccctggagaccttgggtggggagaagctggccaatggcagcctggagccacctgcccaggcagctccagggccttccaagagggactcggactgcagcagcctctgcacctctgagagcatggactatggtaccaatctctccactgacctgtcgctgaacaaagagatgggctctctgtccatcaaggacccgaaactgtacaaaaaaaccctcaagcggacacgcaaatttgtggtggatggtgtggaggtgagcatcaccacctccaagatcatcagcgaagatgagaagaaggatgaggagatgagatttctcaggcgccaggaactccgagagcttcggctgctccagaaagaagagcatcggaaccagacccagctgagtaacaagcatgagctgcagctggagcaaatgcataaacgttttgaacaggaaatcaacgccaagaagaagttctttgacacggaattagagaacctggagcgtcagcaaaagcagcaagtggagaagatggagcaagaccatgccgtgcgccgccgggaggaggccaggcggatccgcctggagcaggatcgggactacaccaggttccaagagcagctcaaactgatgaagaaagaggtgaagaacgaggtggagaagctcccccgacagcagcggaaggaaagcatgaagcagaagatggaggagcacacgcagaaaaagcagcttcttgaccgggactttgtagccaagcagaaggaggacctggagctggccatgaagaggctcaccaccgacaacaggcgggagatctgtgacaaggagcgcgagtgcctcatgaagaagcaggagctccttcgagaccgggaagcagccctgtgggagatggaagagcaccagctgcaggagaggcaccagctggtgaagcagcagctcaaagaccagtacttcctccagcggcacgagctgctgcgcaagcatgagaaggagcgggagcagatgcagcgctacaaccagcgcatgatagagcagctgaaggtgcggcagcaacaggaaaaggcgcggctgcccaagatccagaggagtgagggcaagacgcgcatggccatgtacaagaagagcctccacatcaacggcgggggcagcgcagctgagcagcgtgagaagatcaagcagttctcccagcaggaggagaagaggcagaagtcggagcggctgcagcaacagcagaaacacgagaaccagatgcgggacatgctggcgcagtgtgagagcaacatgagcgagctgcagcagctgcagaatgaaaagtgccacctcctggtagagcacgaaacccagaaactgaaggccctggatgagagccataaccagaacctgaaggaatggcgggacaagcttcggccgcgcaagaaggctctggaagaggatctgaaccagaagaagcgggagcaggagatgttcttcaagctgagcgaggaggcggagtgcccaaacccctccaccccaagcaaggccgccaagttcttcccctacagttctgcggatgcttcttaacaaccgcccggggctgtggctggcagcttggtgggccccagggccttctccttcattctctgtgaacatgtaactcaggaccccttttccctcttgcgtctgtgccagctcaaatccagcccctcgccctgtgccaccccaactgtgcctgatagacctgccccagcgttcctgacttcttgctggcctgtggagggtgaggtgtaattatttgtcacctgaacctaatgtatattctccttgagccccagatcccttcaagctggaagggatggggctgttggtggggtcagggtccaagaggaatgggtgttctgtggcctcgagtcctctccttctgctccatagcactctggcccaccctgtctgcaggtgaaacaggagggctgtttgcctctgccccatccccccgactgtgttcaggagtcccaccttgcatttcagacctgggctggcagtctgttggacttctcttcaggaagaaaaagcatcagggggaaatggaatgcccctgccccaggaacatggcagaagcacaggttctgtacctcagatggactcctgctgggccttcggggtctcagttggcttcccccagattctgattctacagctgcagaatgtatataacgcaataaaagcaaatgtttgaaccag

SEQ ID NO: 331647 - DNA, 1174 bp, Homo sapiens
agcgggcgggcacgccgccgcctgcgcggttccgggtgctcccggcgcggcgctgcccagggcacacttgaccgaggtcgggctgcggggaaaggcgggtctggggagaaccccgagagacgcggcgtcctccaactcctcctccttctcctcgcggccgccgaagccacagcccgagcccgagcccgagcccgagccggcgccaccgcgcccccggccatggcttttgccaatttccgccgcatcctgcgcctgtctaccttcgagaagagaaagtcccgcgaatatgagcacgtccgccgcgacctggaccccaacgaggtgtgggagatcgtgggcgagctgggcgacggcgccttcggcaaggtttacaaggccaagaataaggagacgggtgctttggctgcggccaaagtcattgaaaccaagagtgaggaggagctggaggactacatcgtggagattgagatcctggccacctgcgaccacccctacattgtgaagctcctgggagcctactatcacgacgggaagctgtggatcatgattgagttctgtccagggggagccgtggacgccatcatgctggagctggacagaggcctcacggagccccagatacaggtggtttgccgccagatgctagaagccctcaacttcctgcacagcaagaggatcatccaccgagatctgaaagctggcaacgtgctgatgaccctcgagggagacatcaggctggctgactttggtgtgtctgccaagaatctgaagactctacagaaacgagattccttcatcggcacgccttactggatggcccccgaggtggtcatgtgtgagaccatgaaagacacgccctacgactacaaagccgacatctggtccctgggcatcacgctgattgagatggcccagatcgagccgccacaccacgagctcaaccccatgcgggtcctgctaaagatcgccaagtcagaccctcccacgctgctcacgccctccaagtggtctgtagagttccgtgacttcctgaagatagccctggataagaacccagaaacccgacccagtgccgcgcagctgctggaggtgagtggattcccctcccactctgctccctgaagggtggagcctaatgaactcaccagtgacctggacgctgggcatgttctca

SEQ ID NO: 331648 - DNA, 376 bp, Homo sapiens
gcccgagcccgagcccgagcccgagccggcgccaccgcgcccccggccatggcttttgccaatttccgccgcatcctgcgcctgtctaccttcgagaagagaaagtcccgcgaatatgagcacgtccgccgcgacctggaccccaacgaggtgtgggagatcgtgggcgagctgggcgacggcgccttcggcaaggtttacaaggtgagggcgctgaggtgggtggccggacgcgcgtcgaggggctccggaaggaagggatgcctgagccggacccggccagcctggctccggctccgagggctgcccggcgctgaattcggggtccctggccctcatcccgatgactcttgttttttggggggaacatcactcg

SEQ ID NO: 331649 - DNA, 390 bp, Homo sapiens
ttctggcattttcttttgtttacagggtactggcctaattgccatgagtctcattttttttcttctcagcaatgccactggctctctaaaaaacagaggataatgtgatagagacagataaagaatttttctaaattaggcaatcaaaccaagaaaaaacacataaaacatgcataactaagtcagtgtttcctcaaaaggggcagagtttggtaaagaaaagccttgtcttgtacactgctgtgtatgcactttatagaaaagtactagcatagagtgggtgctcagtaagtgttagttaaatggatgttgaagggttgggaaagagaggagttgagttgagcacagagatgtgatacaagtcctacacagtcatgagtttataagtgt

SEQ ID NO: 331650 - DNA, 420 bp, Homo sapiens
attcagactgtagcaaccccttctcttttctctctctactcttttcctaggtgattgtagccactcccatccttacaccgatgactcacaaacatacatttagctagccctatcctctggcttcagacctgcatgtccaatcagatgactaatgtcatcttttgggtttatcagagacatctcaaactcagcatgtcgaaaatggaaatcttgccctttcccagagtcttttgatcctcttcctctgttgccgcctcattgaatgacaccaccatttatgcatgccagaaacctgagagtcaattttgacactccctgtcacctgccatattcaattcattaccaagtcttgtcagcaaccacccctcaaatccattcattctcctttatcatcgccttagtgcctactctcctgcagta

SEQ ID NO: 331651 - DNA, 172 bp, Homo sapiens
cgcctactatgggccaggaagtattttaggtactgcgatagaagagtaaaaagcaaagtccctgtactcacatatcttactttctactggagagaaatggaccaaaaccaaaacaaataaaaaacacacaaataagtatagggaacatcaggggtaagaattcctgtgaagg

SEQ ID NO: 331652 - DNA, 321 bp, Homo sapiens
ctagagtcaggtaacttcctctttccagctccatctcaggtacctctccctcatcgtagcttgtctttatgaatgtcagctttttgtttgttgtagaccaaactaatgcattcatttaattctaacatctaatctaaggtatcttgggttatctccatttacacttataaactgaggctttgagaagattaggtgactagtccaaggctggtattctggatcctttgggcactggaggacaactaacacagccggcgttcaccactgccaaaaagtaacgaacgctgccgtagtgtaaagacctcccaagggtatctcccc

SEQ ID NO: 331653 - DNA, 423 bp, Homo sapiens
cctggctgacagagcaaggcgcacacacaaaaaaaggtcaagttgtgtttcggcaaatttgaaagaactatccaggcttttcttaatagaaattcatggcatcaacaactggttggagaaaaaaataggtaatctcttttgctaaacaaatatctccactgaaggtcatgtttgttggtaccaaaatgaggaaaaggattagagatcaggaagcagggttttgacactttgcacaagtcctgcaccactctcctatggctctccactgcatttctctccaaccctcctaacgcccaggttcaatgcctggattactgccacttcctcacagctggtttcccttgagtcttatcccccataaatccctcctctatacagcattcagagttaaacctataatggttccccaatgccgtatggcaa

SEQ ID NO: 331654 - DNA, 2245 bp, Homo sapiens
  misc_feature (1975)..(1975): n is a, c, g, or t
  misc_feature (2160)..(2160): n is a, c, g, or t
attccatgcctccaatatggcgtcctccacataggcagtggctgtggtttctaccccgggtggccgggggcagtgctgagctgggactgttgtttgcccagcctgggctgcagaaagcagcagttaaagttcgtttctggtcactgctccaggaagccaccttactctgagggtcaagaattgccgcttccttttagttactgtaagttcctcctctgcccctggtttgtttcccgcggcacttctggatacccccaggtcccagacccttccagactcaaaccatgaactttcggcagctgctgttgcacttgccacgttatcttggagcctcgggttccccgcgtcgcctgtggtggtccccgtccctcgacaccatctcctcggtgggctcttggcgtggtcggtcctccaagtccccggcccactggaatcaggtagtgtcagaggcggagaagatcgtggggtaccccacgtccttcatgagccttcgctgcctgctgagcgacgagctcagcaacatcgctatgcaggtgcggaagctggtgggcactcagcaccctctgcttaccacagccaggattttgagaggtgacagcatgctggcagtcctcagagccctcgcttgttctcggcacctcccctgcctgggctcccactttggtggcatttgaggagcccttcagcccccccactgcactgtgggagcccctttctgggctggccaaggctggagcccactccctcagcttgcagggaggtgtggagggagaggcaccagcgggaaccgggactgcgtgcagcgcttgcgggccagctggagttccgggtgggcgtgggcttggtgggccccgcactcggagcagccagccagccctgctggccccgggcaatgggggacttagcacccgggccagtggctgcggagggtgtactgagtcccccagcagtgccggcccactggcgctgtgctcgatttctcgccgggccttagctgccttcccgcggggcagggctggggacctgcagcccgccatgcctgagcctcccacccactccatgggctcctgtgcggcccgaacctccccgaccagcaccactccctactccacggcgcccagtcccatcgaccacccaagggctgaggaatgcgagcgcacggcgcaggactggcaggcagctccacctgcagccccagtgcgggatccactaggtgaagccagctgggctcctgagtctggtggggacgtggagagtctttatatctagctcagggattgtaaatacaccactcagcaccctgtgtttagctcaaggtttgtgagtgcaccagtcgacgctctgtatctagctgctctggtgaggacgtggagaacctttatgtctagctcagggattgcaaatacaccaatcggcactctgtatctagctcaaggattgtaaacacaccaatcagcaccctgtgtttagctcaaggtttgtgagtgcaccaatcgacactgtgtatctagctgctctggtggggacttggagaacctgtgtgtcaaaactctgtatcttaactaatctgatgtggacgtggagaacctttgtatctagctcagggattgtaaacgcaccaatcagcgccctgacaaaacaggccactcggctctaccaatcagcaggatgtgggtggggccagataagagaataaaagcaggctgcccgagccagtattggcaacccgctcgggtccccttccacaccgtgggagctttgttctttcgctctttgcaataactcttgctactgctcactctttgggtccacgctgcttttatgagctgtaacactcactgcgaagatgtgcagcttcactcctgaagccagcgagaccacgagcccaccgggatggaacgaacaactccagacgtgctgccttaagagctgtaacactcaccgcgaaggtctgcagcttcactcctgagccagngagaccacgaacccaccagaaggaagaaattccaaacacatctgaacatcagaagggacagactccagacgcgccaccttaagagctgtaagactcaccgcgagggtctgcggcttcattcttgaagtcagtgagaccaagaacccaccaattccgaacacaatttatccttcaacagtttgtcnctgatgtgtctatgtgtatatctctgtatttgtcctgtattgagttagttgaatggctttgttctgtaaattaacagttttcatc

SEQ ID NO: 331655 - DNA, 1118 bp, Homo sapiens
  misc_feature (1107)..(1109): n is a, c, g, or t
gatgaagggttctgcagtcaaatgaaattcagagctgttttataattgccaagggtaaaattagcagagtcaattattttccctttggcttttccctgaagatattaggggtcttcaaggtaattgccttaggtaacacttagatttttaaatatcttcaagtatagaaattgtttattaatcctctggtaattgtcttcttaccattatagctgtagtcacataaatgcaaattaacaagattttgaattcaagagggaatttaaaaattaatgcttgggttttcattcattttcaattatggaacataagggcaagtttttattttagtacttcactgtacaaagacctggactaaaagacctcagaatgcctctttttaaatcataaatttcctgattccattgggataagttgctctatattgtgtccatgtagaacatcactggatgctgtagtgatgtggtcatgccagaatctaaaattttagtgtttgagcagcaagctatcagtgagacatgctaactaattggaagggaaatcatgaagtggagaagtactataatttcgaaatctagctggccattaacaggcttcctctggtctttgtatttatttagactgggtttgtatttaggattaagccacagtgcaaataagactgtgtggattactacctgtcatcttgtttttgaaaagtcttttactttacatatataatgataagcctagtatttaaagaatggaatttatcacgttatttttttttctttgtagtcattttcatttaatggacctattgctatatatcagatgggagactgtgagtcagcctggatcttgtctaaacacccaagagcattgtcatgatgtcactcctggaggttgttctattaagcattagtgatttatacttccggataaccagtggcacagatgtactctttacatagctgatgtatttccttatgttaactttgttttcctaaaggcgtaaatatgttgtttaaaatgaagtattttgtttgtacaaatatgctcaatttatgcatataaatctccctttacaccatctatatagtttaataaagatgctattgtctaaannngtttgtctt

SEQ ID NO: 331656 - DNA, 338 bp, Homo sapiens
catatttggacaatatcaaagctcaagaaaaaggaagattggactatgctaagtcttcaagtacagaagttcaactttctaactttcaacaaatgctactttcaacactcttaagcaccgcatgataagcactgaacgatgagaatattgagagagcatgaagaggagatggttagaagagaggcaacattgacagtgaggaaatgacagatgtgctcagtgttgagctgtttgacctcaggaacaattctctaggactcccagtttgtgcttctgtgagtggaagaaaacacactcaaaagtgtttgatacagtctctcaaaaatagtcaacacagg

SEQ ID NO: 331657 - DNA, 3659 bp, Homo sapiens
attccatgcctccaatatggcgtcctccacataggcagtggctgtggtttctaccccgggtggccgggggcagtgctgagctgggactgttgtttgcccagcctgggctgcagaaagcagcagttaaagttcgtttctggtcactgctccaggaagccaccttactctgagggtcaagaattgccgcttccttttagttactgtaagttcctcctctgcccctggtttgtttcccgcggcacttctggatacccccaggtcccagacccttccagactcaaaccatgaactttcggcagctgctgttgcacttgccacgttatcttggagcctcgggttccccgcgtcgcctgtggtggtccccgtccctcgacaccatctcctcggtgggctcttggcgtggtcggtcctccaagtccccggcccactggaatcaggtagtgtcagaggcggagaagatcgtggggtaccccacgtccttcatgagccttcgctgcctgctgagcgacgagctcagcaacatcgctatgcaggtgcggaagctggtgggcactcagcaccctctgcttaccacagccagggggcttgtacatgacagctggaatagcctccagttgaggggcttggtggtgctccttatctctaaagcagctgggcccagcagcgtgaacacttcatgtcagaactatgacatggtcagtgggatctactcatgtcaaagaagtttggcagagatcacggagctaattcatattgctctccttgtacatcgtgggatagtaaatttaaatgagttgcaatcatctgatggtccactgaaagacatgcaatttggaaataaaattgctatcctgagtggagactttcttctagcaaatgcctgcaatggactagctctgctacagaacaccaaggttgtggaacttttagcaagtgctcttatggacttggtacaaggagtatatcatgaaaattctacttcaaaggaaagttatatcacagatgatattggaatatcgacttggaaggagcagacttttctctcccatggtgccttactagcaaagagctgccaagctgcaatggaattagcaaagcatgatgctgaggttcagaatatggcatttcagtatgggaagcacatggccatgagtcataagataaattctgatgtccagccttttattaaagaaaagaccagtgactccatgacttttaatctaaactcagctcctgtagtcttacatcaggaatttcttggaagagatttgtggattaaacagatcggagaggctcaagaaaaaggaagattggactatgctaagagatagggtctcgctctgtcgctcaggctggagtgcagtgtcacaatcatagcttactgcagcctcccactcctgggctcaagtgatcctcttgcctcagactcccagttgcgagaaagaatcaaagctggcaaaggtgtgacttcagctattgacctgtgtcgttaccatggaaacaaggcactggaggccctggagagctttcctccctcggaggccagatctgctttagaaaacattgtgtttgctgtgaccagattttcatgacatcaaattaaaaagacactattgttagttagctgaaaatcctagggaatgaggttgattgggagcgctttcacgatgcgttaatgacttttaaaacatatgcatttttccttccttttatcacattgctaaatgagttctgctttctttttggaactgctacaaacaaaattagaagaaaaaaaggtcaagcagttttcacttgtcacgccagaagcacacttgaggctgcagtcgcagaaataattaatgagattcgctcctgtgacctcagcaaatggacaggaaataagtccttattgattggaccgagccagggatggcgccagggcggtggcctgtggtttttcctgctagagaggacaaagcaagttggaagctgcaggtgtcaagagaaatgctctcaataccaaccagggaggattgtctaatcaaaaactagtgaccaatttgtcataatggagagtagttcaatggattgagaaaaatatgttttatttgttggcttgtaattatgtctctggattattattattttttttttagatgtagttttgctcttgttgcccaggctggagtgcaatggtgcagttttgactcactgcaacctccgcctcctgggttcaagtgattctcctgcctcagcctcccgagtagctggaattacaggcacctgccaccacgcctggctaattttgtatttttagtagagatggggtttcactatgttggtcaggctagtctcgaactcctgacctcaggtgatccgcctgcctcggcctcccaaagtgctgggattagaggcttgagccactgcacctggcctcatgtctctggatttataatgcagtatgaatatactttgtgctttatggtttttataatgtctttttggagaaattgccgaaaagttgccaaatacttgaagtaggagattaaaatgttatcaaatgttaaattggttatattaggaatagtctgtttttctttcctgaagatcagtttttttattcaaacacatttcaaagaaccaaattttttttttctttaaggaaaaaggagctttttttcaagtgaaatgtattcatttgtaatactttggtttaaggcatactttaatttttacgagtttcagaaacagaatttttgtactagggaattcattggtgagagtgttcttttaacctcagaatgtcaaattttggtcttgaaccacagacatccaattacagaaagaatataagcaatctcacaggcctgcaatcggacactgtctctgtgtggttcataggagatgatttttgaggtttgcactcatgcaatttgagaacaccgttgacaagaaggctgagtttacataaatgatctagattgaaactcagctacctttcttcctcatgtggtgtaattacagccctatctggagacagcgaatacagcaaacagattttattacctagttcgctcaaacactacatgaagttattttagttaaagccctcccccaaaagttataaaaccattttatcagggcccaacatgtggcatgcaatgaagagaaaatgtaaagctacagaggttaatgtattgtattataaaatattttaagtgtactcaaaatatcataattgtacagtttatgccaccataatttgaggcctatagatttagcttaagagaacactgttctgtttgaaatgctttctgtcactgaaattggcttaattagtaaccatggataagatgctttagatcagactaggttttaatcattaacttccacaaagaagtcatactttgcgttaggtgtgctggttggatgtgcaggaacttcagcaagcagtaggttttactaagcagatggtcgggcactgcagggcaccaggcaggatcctagggcgcctcttattctgcgttagcatctggtttgctgtatgaccttgcacaagtcacttccttctgagcctcaattttctcatctgtacaatgagattcaaaagttgacctgaaagtcaagtgtgaaaaaaaaaaagagattaaacaagataattatgaaattctttccag

SEQ ID NO: 331658 - DNA, 3562 bp, Homo sapiens
attccatgcctccaatatggcgtcctccacataggcagtggctgtggtttctaccccgggtggccgggggcagtgctgagctgggactgttgtttgcccagcctgggctgcagaaagcagcagttaaagttcgtttctggtcactgctccaggaagccaccttactctgagggtcaagaattgccgcttccttttagttactctgctgttgcacttgccacgttatcttggagcctcgggttccccgcgtcgcctgtggtggtccccgtccctcgacaccatctcctcggtgggctcttggcgtggtcggtcctccaagtccccggcccactggaatcaggtagtgtcagaggcggagaagatcgtggggtaccccacgtccttcatgagccttcgctgcctgctgagcgacgagctcagcaacatcgctatgcaggtgcggaagctggtgggcactcagcaccctctgcttaccacagccagggggcttgtacatgacagctggaatagcctccagttgaggggcttggtggtgctccttatctctaaagcagctgggcccagcagcgtgaacacttcatgtcagaactatgacatggtcagtgggatctactcatgtcaaagaagtttggcagagatcacggagctaattcatattgctctccttgtacatcgtgggatagtaaatttaaatgagttgcaatcatctgatggtccactgaaagacatgcaatttggaaataaaattgctatcctgagtggagactttcttctagcaaatgcctgcaatggactagctctgctacagaacaccaaggttgtggaacttttagcaagtgctcttatggacttggtacaaggagtatatcatgaaaattctacttcaaaggaaagttatatcacagatgatattggaatatcgacttggaaggagcagacttttctctcccatggtgccttactagcaaagagctgccaagctgcaatggaattagcaaagcatgatgctgaggttcagaatatggcatttcagtatgggaagcacatggccatgagtcataagataaattctgatgtccagccttttattaaagaaaagaccagtgactccatgacttttaatctaaactcagctcctgtagtcttacatcaggaatttcttggaagagatttgtggattaaacagatcggagaggctcaagaaaaaggaagattggactatgctaagagatagggtctcgctctgtcgctcaggctggagtgcagtgtcacaatcatagcttactgcagcctcccactcctgggctcaagtgatcctcttgcctcagactcccagttgcgagaaagaatcaaagctggcaaaggtgtgacttcagctattgacctgtgtcgttaccatggaaacaaggcactggaggccctggagagctttcctccctcggaggccagatctgctttagaaaacattgtgtttgctgtgaccagattttcatgacatcaaattaaaaagacactattgttagttagctgaaaatcctagggaatgaggttgattgggagcgctttcacgatgcgttaatgacttttaaaacatatgcatttttccttccttttatcacattgctaaatgagttctgctttctttttggaactgctacaaacaaaattagaagaaaaaaaggtcaagcagttttcacttgtcacgccagaagcacacttgaggctgcagtcgcagaaataattaatgagattcgctcctgtgacctcagcaaatggacaggaaataagtccttattgattggaccgagccagggatggcgccagggcggtggcctgtggtttttcctgctagagaggacaaagcaagttggaagctgcaggtgtcaagagaaatgctctcaataccaaccagggaggattgtctaatcaaaaactagtgaccaatttgtcataatggagagtagttcaatggattgagaaaaatatgttttatttgttggcttgtaattatgtctctggattattattattttttttttagatgtagttttgctcttgttgcccaggctggagtgcaatggtgcagttttgactcactgcaacctccgcctcctgggttcaagtgattctcctgcctcagcctcccgagtagctggaattacaggcacctgccaccacgcctggctaattttgtatttttagtagagatggggtttcactatgttggtcaggctagtctcgaactcctgacctcaggtgatccgcctgcctcggcctcccaaagtgctgggattagaggcttgagccactgcacctggcctcatgtctctggatttataatgcagtatgaatatactttgtgctttatggtttttataatgtctttttggagaaattgccgaaaagttgccaaatacttgaagtaggagattaaaatgttatcaaatgttaaattggttatattaggaatagtctgtttttctttcctgaagatcagtttttttattcaaacacatttcaaagaaccaaattttttttttctttaaggaaaaaggagctttttttcaagtgaaatgtattcatttgtaatactttggtttaaggcatactttaatttttacgagtttcagaaacagaatttttgtactagggaattcattggtgagagtgttcttttaacctcagaatgtcaaattttggtcttgaaccacagacatccaattacagaaagaatataagcaatctcacaggcctgcaatcggacactgtctctgtgtggttcataggagatgatttttgaggtttgcactcatgcaatttgagaacaccgttgacaagaaggctgagtttacataaatgatctagattgaaactcagctacctttcttcctcatgtggtgtaattacagccctatctggagacagcgaatacagcaaacagattttattacctagttcgctcaaacactacatgaagttattttagttaaagccctcccccaaaagttataaaaccattttatcagggcccaacatgtggcatgcaatgaagagaaaatgtaaagctacagaggttaatgtattgtattataaaatattttaagtgtactcaaaatatcataattgtacagtttatgccaccataatttgaggcctatagatttagcttaagagaacactgttctgtttgaaatgctttctgtcactgaaattggcttaattagtaaccatggataagatgctttagatcagactaggttttaatcattaacttccacaaagaagtcatactttgcgttaggtgtgctggttggatgtgcaggaacttcagcaagcagtaggttttactaagcagatggtcgggcactgcagggcaccaggcaggatcctagggcgcctcttattctgcgttagcatctggtttgctgtatgaccttgcacaagtcacttccttctgagcctcaattttctcatctgtacaatgagattcaaaagttgacctgaaagtcaagtgtgaaaaaaaaaaagagattaaacaagataattatgaaattctttccag

SEQ ID NO: 331659 - DNA, 3021 bp, Homo sapiens
attccatgcctccaatatggcgtcctccacataggcagtggctgtggtttctaccccgggtggccgggggcagtgctgagctgggactgttgtttgcccagcctgggctgcagaaagcagcagttaaagttcgtttctggtcactgctccaggaagccaccttactctgagggtcaagaattgccgcttccttttagttactgtaagttcctcctctgcccctggtttgtttcccgcggcacttctggatacccccaggtcccagacccttccagactcaaaccatgaactttcggcagctgctgttgcacttgccacgttatcttggagcctcgggttccccgcgtcgcctgtggtggtccccgtccctcgacaccatctcctcggtgggctcttggcgtggtcggtcctccaagtccccggcccactggaatcaggtagtgtcagaggcggagaagatcgtggggtaccccacgtccttcatgagccttcgctgcctgctgagcgacgagctcagcaacatcgctatgcaggtgcggaagctggtgggcactcagcaccctctgcttaccacagccagggggcttgtacatgacagctggaatagcctccagttgaggggcttggtggtgctccttatctctaaagcagctgggcccagcagcgtgaacacttcatgtcagaactatgacatggtcagtgggatctactcatgatcaggaatttcttggaagagatttgtggattaaacagatcggagaggctcaagaaaaaggaagattggactatgctaagttgcgagaaagaatcaaagctggcaaaggtgtgacttcagctattgacctgtgtcgttaccatggaaacaaggcactggaggccctggagagctttcctccctcggaggccagatctgctttagaaaacattgtgtttgctgtgaccagattttcatgacatcaaattaaaaagacactattgttagttagctgaaaatcctagggaatgaggttgattgggagcgctttcacgatgcgttaatgacttttaaaacatatgcatttttccttccttttatcacattgctaaatgagttctgctttctttttggaactgctacaaacaaaattagaagaaaaaaaggtcaagcagttttcacttgtcacgccagaagcacacttgaggctgcagtcgcagaaataattaatgagattcgctcctgtgacctcagcaaatggacaggaaataagtccttattgattggaccgagccagggatggcgccagggcggtggcctgtggtttttcctgctagagaggacaaagcaagttggaagctgcaggtgtcaagagaaatgctctcaataccaaccagggaggattgtctaatcaaaaactagtgaccaatttgtcataatggagagtagttcaatggattgagaaaaatatgttttatttgttggcttgtaattatgtctctggattattattattttttttttagatgtagttttgctcttgttgcccaggctggagtgcaatggtgcagttttgactcactgcaacctccgcctcctgggttcaagtgattctcctgcctcagcctcccgagtagctggaattacaggcacctgccaccacgcctggctaattttgtatttttagtagagatggggtttcactatgttggtcaggctagtctcgaactcctgacctcaggtgatccgcctgcctcggcctcccaaagtgctgggattagaggcttgagccactgcacctggcctcatgtctctggatttataatgcagtatgaatatactttgtgctttatggtttttataatgtctttttggagaaattgccgaaaagttgccaaatacttgaagtaggagattaaaatgttatcaaatgttaaattggttatattaggaatagtctgtttttctttcctgaagatcagtttttttattcaaacacatttcaaagaaccaaattttttttttctttaaggaaaaaggagctttttttcaagtgaaatgtattcatttgtaatactttggtttaaggcatactttaatttttacgagtttcagaaacagaatttttgtactagggaattcattggtgagagtgttcttttaacctcagaatgtcaaattttggtcttgaaccacagacatccaattacagaaagaatataagcaatctcacaggcctgcaatcggacactgtctctgtgtggttcataggagatgatttttgaggtttgcactcatgcaatttgagaacaccgttgacaagaaggctgagtttacataaatgatctagattgaaactcagctacctttcttcctcatgtggtgtaattacagccctatctggagacagcgaatacagcaaacagattttattacctagttcgctcaaacactacatgaagttattttagttaaagccctcccccaaaagttataaaaccattttatcagggcccaacatgtggcatgcaatgaagagaaaatgtaaagctacagaggttaatgtattgtattataaaatattttaagtgtactcaaaatatcataattgtacagtttatgccaccataatttgaggcctatagatttagcttaagagaacactgttctgtttgaaatgctttctgtcactgaaattggcttaattagtaaccatggataagatgctttagatcagactaggttttaatcattaacttccacaaagaagtcatactttgcgttaggtgtgctggttggatgtgcaggaacttcagcaagcagtaggttttactaagcagatggtcgggcactgcagggcaccaggcaggatcctagggcgcctcttattctgcgttagcatctggtttgctgtatgaccttgcacaagtcacttccttctgagcctcaattttctcatctgtacaatgagattcaaaagttgacctgaaagtcaagtgtgaaaaaaaaaaagagattaaacaagataattatgaaattctttccag

SEQ ID NO: 331660 - DNA, 2414 bp, Homo sapiens
tcttttctttaataaaaggctggacatcagaatttatcttatgactcatggccatgtgcttcccatactgaaatgccatattctgaacctcagctcctgtagtcttacatcaggaatttcttggaagagatttgtggattaaacagatcggagaggctcaagaaaaaggaagattggactatgctaagttgcgagaaagaatcaaagctggcaaaggtgtgacttcagctattgacctgtgtcgttaccatggaaacaaggcactggaggccctggagagctttcctccctcggaggccagatctgctttagaaaacattgtgtttgctgtgaccagattttcatgacatcaaattaaaaagacactattgttagttagctgaaaatcctagggaatgaggttgattgggagcgctttcacgatgcgttaatgacttttaaaacatatgcatttttccttccttttatcacattgctaaatgagttctgctttctttttggaactgctacaaacaaaattagaagaaaaaaaggtcaagcagttttcacttgtcacgccagaagcacacttgaggctgcagtcgcagaaataattaatgagattcgctcctgtgacctcagcaaatggacaggaaataagtccttattgattggaccgagccagggatggcgccagggcggtggcctgtggtttttcctgctagagaggacaaagcaagttggaagctgcaggtgtcaagagaaatgctctcaataccaaccagggaggattgtctaatcaaaaactagtgaccaatttgtcataatggagagtagttcaatggattgagaaaaatatgttttatttgttggcttgtaattatgtctctggattattattattttttttttagatgtagttttgctcttgttgcccaggctggagtgcaatggtgcagttttgactcactgcaacctccgcctcctgggttcaagtgattctcctgcctcagcctcccgagtagctggaattacaggcacctgccaccacgcctggctaattttgtatttttagtagagatggggtttcactatgttggtcaggctagtctcgaactcctgacctcaggtgatccgcctgcctcggcctcccaaagtgctgggattagaggcttgagccactgcacctggcctcatgtctctggatttataatgcagtatgaatatactttgtgctttatggtttttataatgtctttttggagaaattgccgaaaagttgccaaatacttgaagtaggagattaaaatgttatcaaatgttaaattggttatattaggaatagtctgtttttctttcctgaagatcagtttttttattcaaacacatttcaaagaaccaaattttttttttctttaaggaaaaaggagctttttttcaagtgaaatgtattcatttgtaatactttggtttaaggcatactttaatttttacgagtttcagaaacagaatttttgtactagggaattcattggtgagagtgttcttttaacctcagaatgtcaaattttggtcttgaaccacagacatccaattacagaaagaatataagcaatctcacaggcctgcaatcggacactgtctctgtgtggttcataggagatgatttttgaggtttgcactcatgcaatttgagaacaccgttgacaagaaggctgagtttacataaatgatctagattgaaactcagctacctttcttcctcatgtggtgtaattacagccctatctggagacagcgaatacagcaaacagattttattacctagttcgctcaaacactacatgaagttattttagttaaagccctcccccaaaagttataaaaccattttatcagggcccaacatgtggcatgcaatgaagagaaaatgtaaagctacagaggttaatgtattgtattataaaatattttaagtgtactcaaaatatcataattgtacagtttatgccaccataatttgaggcctatagatttagcttaagagaacactgttctgtttgaaatgctttctgtcactgaaattggcttaattagtaaccatggataagatgctttagatcagactaggttttaatcattaacttccacaaagaagtcatactttgcgttaggtgtgctggttggatgtgcaggaacttcagcaagcagtaggttttactaagcagatggtcgggcactgcagggcaccaggcaggatcctagggcgcctcttattctgcgttagcatctggtttgctgtatgaccttgcacaagtcacttccttctgagcctcaattttctcatctgtacaatgagattcaaaagttgacctgaaagtcaagtgtgaaaaaaaaaaagagattaaacaagataattatgaaattctttccag

SEQ ID NO: 331661 - DNA, 1577 bp, Homo sapiens
attccatgcctccaatatggcgtcctccacataggcagtggctgtggtttctaccccgggtggccgggggcagtgctgagctgggactgttgtttgcccagcctgggctgcagaaagcagcagttaaagttcgtttctggtcactgctccaggaagccaccttactctgagggtcaagaattgccgcttccttttagttactgtaagttcctcctctgcccctggtttgtttcccgcggcacttctggatacccccaggtcccagacccttccagactcaaaccatgaactttcggcagctgctgttgcacttgccacgttatcttggagcctcgggttccccgcgtcgcctgtggtggtccccgtccctcgacaccatctcctcggtgggctcttggcgtggtcggtcctccaagtccccggcccactggaatcaggtagtgtcagaggcggagaagatcgtggggtaccccacgtccttcatgagccttcgctgcctgctgagcgacgagctcagcaacatcgctatgcaggtgcggaagctggtgggcactcagcaccctctgcttaccacagccagggggcttgtacatgacagctggaatagcctccagttgaggggcttggtggtgctccttatctctaaagcagctgggcccagcagcgtgaacacttcatgtcagaactatgacatggtcagtgggatctactcatgtcaaagaagtttggcagagatcacggagctaattcatattgctctccttgtacatcgtgggatagtaaatttaaatgagttgcaatcatctgatggtccactgaaagacatgcaatttggaaataaaattgctatcctgagtggagactttcttctagcaaatgcctgcaatggactagctctgctacagaacaccaaggttgtggaacttttagcaagtgctcttatggacttggtacaaggagtatatcatgaaaattctacttcaaaggaaagttatatcacagatgatattggaatatcgacttggaaggagcagacttttctctcccatggtgccttactagcaaagagctgccaagctgcaatggaattagcaaagcatgatgctgaggttcagaatatggcatttcagtatgggaagcacatggccatgagtcataagataaattctgatgtccagccttttattaaagaaaagaccagtgactccatgacttttaatctaaactcagctcctgtagtcttacatcaggaatttcttggaagagatttgtggattaaacagatcggagagtcttcaagtacagaagttcaactttctaactttcaacaaatgctactttcaacactcttaagcaccgcatgataagcactgaacgatgagaatattgagagagcatgaagaggagatggttagaagagaggcaacattgacagtgaggaaatgacagatgtgctcagtgttgagctgtttgacctcaggaacaattctctaggactcccagtttgtgcttctgtgagtggaagaaaacacactcaaaagtgtttgatacagtctctcaaaaatagtcaacacagg

SEQ ID NO: 331662 - DNA, 191 bp, Homo sapiens
tcagctcctgtagtcttacatcaggaatttcttggaagagatttgtggattaaacagatcggagaggtaaaatgaaattactcctgttttaggtaccagtagtaattagtggattttagaacataattgatatttcttggtgatatatggctatagatgagccttaggcatattcacgtaacaggtaaaat

SEQ ID NO: 331663 - DNA, 3551 bp, Homo sapiens
attccatgcctccaatatggcgtcctccacataggcagtggctgtggtttctaccccgggtggccgggggcagtgctgagctgggactgttgtttgcccagcctgggctgcagaaagcagcagttaaagttcgtttctggtcactgctccaggaagccaccttactctgagggtcaagaattgccgcttccttttagttactgtaagttcctcctctgcccctggtttgtttcccgcggcacttctggatacccccaggtcccagacccttccagactcaaaccatgaactttcggcagctgctgttgcacttgccacgttatcttggagcctcgggttccccgcgtcgcctgtggtggtccccgtccctcgacaccatctcctcggtgggctcttggcgtggtcggtcctccaagtccccggcccactggaatcaggtagtgtcagaggcggagaagatcgtggggtaccccacgtccttcatgagccttcgctgcctgctgagcgacgagctcagcaacatcgctatgcaggtgcggaagctggtgggcactcagcaccctctgcttaccacagccagggggcttgtacatgacagctggaatagcctccagttgaggggcttggtggtgctccttatctctaaagcagctgggcccagcagcgtgaacacttcatgtcagaactatgacatggtcagtgggatctactcatgtcaaagaagtttggcagagatcacggagctaattcatattgctctccttgtacatcgtgggatagtaaatttaaatgagttgcaatcatctgatggtccactgaaagacatgcaatttggaaataaaattgctatcctgagtggagactttcttctagcaaatgcctgcaatggactagctctgctacagaacaccaaggttgtggaacttttagcaagtgctcttatggacttggtacaaggagtatatcatgaaaattctacttcaaaggaaagttatatcacagatgatattggaatatcgacttggaaggagcagacttttctctcccatggtgccttactagcaaagagctgccaagctgcaatggaattagcaaagcatgatgctgaggttcagaatatggcatttcagtatgggaagcacatggccatgagtcataagataaattctgatgtccagccttttattaaagaaaagaccagtgactccatgacttttaatctaaactcagctcctgtagtcttacatcaggaatttcttggaagagatttgtggattaaacagatcggagaggctcaagaaaaaggaagattggactatgctaagttgcgagaaagaatcaaagctggcaaaggtgtgacttcagctattgacctgtgtcgttaccatggaaacaaggcactggaggccctggagagctttcctccctcggaggccagatctgctttagaaaacattgtgtttgctgtgaccagattttcatgacatcaaattaaaaagacactattgttagttagctgaaaatcctagggaatgaggttgattgggagcgctttcacgatgcgttaatgacttttaaaacatatgcatttttccttccttttatcacattgctaaatgagttctgctttctttttggaactgctacaaacaaaattagaagaaaaaaaggtcaagcagttttcacttgtcacgccagaagcacacttgaggctgcagtcgcagaaataattaatgagattcgctcctgtgacctcagcaaatggacaggaaataagtccttattgattggaccgagccagggatggcgccagggcggtggcctgtggtttttcctgctagagaggacaaagcaagttggaagctgcaggtgtcaagagaaatgctctcaataccaaccagggaggattgtctaatcaaaaactagtgaccaatttgtcataatggagagtagttcaatggattgagaaaaatatgttttatttgttggcttgtaattatgtctctggattattattattttttttttagatgtagttttgctcttgttgcccaggctggagtgcaatggtgcagttttgactcactgcaacctccgcctcctgggttcaagtgattctcctgcctcagcctcccgagtagctggaattacaggcacctgccaccacgcctggctaattttgtatttttagtagagatggggtttcactatgttggtcaggctagtctcgaactcctgacctcaggtgatccgcctgcctcggcctcccaaagtgctgggattagaggcttgagccactgcacctggcctcatgtctctggatttataatgcagtatgaatatactttgtgctttatggtttttataatgtctttttggagaaattgccgaaaagttgccaaatacttgaagtaggagattaaaatgttatcaaatgttaaattggttatattaggaatagtctgtttttctttcctgaagatcagtttttttattcaaacacatttcaaagaaccaaattttttttttctttaaggaaaaaggagctttttttcaagtgaaatgtattcatttgtaatactttggtttaaggcatactttaatttttacgagtttcagaaacagaatttttgtactagggaattcattggtgagagtgttcttttaacctcagaatgtcaaattttggtcttgaaccacagacatccaattacagaaagaatataagcaatctcacaggcctgcaatcggacactgtctctgtgtggttcataggagatgatttttgaggtttgcactcatgcaatttgagaacaccgttgacaagaaggctgagtttacataaatgatctagattgaaactcagctacctttcttcctcatgtggtgtaattacagccctatctggagacagcgaatacagcaaacagattttattacctagttcgctcaaacactacatgaagttattttagttaaagccctcccccaaaagttataaaaccattttatcagggcccaacatgtggcatgcaatgaagagaaaatgtaaagctacagaggttaatgtattgtattataaaatattttaagtgtactcaaaatatcataattgtacagtttatgccaccataatttgaggcctatagatttagcttaagagaacactgttctgtttgaaatgctttctgtcactgaaattggcttaattagtaaccatggataagatgctttagatcagactaggttttaatcattaacttccacaaagaagtcatactttgcgttaggtgtgctggttggatgtgcaggaacttcagcaagcagtaggttttactaagcagatggtcgggcactgcagggcaccaggcaggatcctagggcgcctcttattctgcgttagcatctggtttgctgtatgaccttgcacaagtcacttccttctgagcctcaattttctcatctgtacaatgagattcaaaagttgacctgaaagtcaagtgtgaaaaaaaaaaagagattaaacaagataattatgaaattctttccag

SEQ ID NO: 331664 - DNA, 766 bp, Homo sapiens
agcggggtgtctcttctagcggcggaggacgtcagtggctgtcacggggggcttgtacatgacagctggaatagcctccagttgaggggcttggtggtgctccttatctctaaagcagctgggcccagcagcgtgaacacttcatgtcagaactatgacatggtcagtgggatctactcatgtcaaagaagtttggcagagatcacggagctaattcatattgctctccttgtacatcgtgggatagtaaatttaaatgagttgcaatcatctgatggtccactgaaagacatgcaatttggaaataaaattgctatcctgagtggagactttcttctagcaaatgcctgcaatggactagctctgctacagaacaccaaggttgtggaacttttagcaagtgctcttatggacttggtacaaggagtatatcatgaaaattctacttcaaaggaaagttatatcacagatgatattggaatatcgacttggaaggagcagacttttctctcccatggtgccttactagcaaagagctgccaagctgcaatggaattagcaaagcatgatgctgaggttcagaatatggcatttcagtatgggaagcacatggccatgagtcataaggctcaagaaaaaggaagattggactatgctaagtagaaacaggtttcaccatgttggccaggctggtcttgaactcctgacgtcatgatccacccaccttggcctcccaaagtgctgggattcctggcgtgaaccacca

SEQ ID NO: 331665 - DNA, 3281 bp, Homo sapiens
attccatgcctccaatatggcgtcctccacataggcagtggctgtggtttctaccccgggtggccgggggcagtgctgagctgggactgttgtttgcccagcctgggctgcagaaagcagcagttaaagttcgtttctggtcactgctccaggaagccaccttactctgagggtcaagaattgccgcttccttttagttactggggcttgtacatgacagctggaatagcctccagttgaggggcttggtggtgctccttatctctaaagcagctgggcccagcagcgtgaacacttcatgtcagaactatgacatggtcagtgggatctactcatgtcaaagaagtttggcagagatcacggagctaattcatattgctctccttgtacatcgtgggatagtaaatttaaatgagttgcaatcatctgatggtccactgaaagacatgcaatttggaaataaaattgctatcctgagtggagactttcttctagcaaatgcctgcaatggactagctctgctacagaacaccaaggttgtggaacttttagcaagtgctcttatggacttggtacaaggagtatatcatgaaaattctacttcaaaggaaagttatatcacagatgatattggaatatcgacttggaaggagcagacttttctctcccatggtgccttactagcaaagagctgccaagctgcaatggaattagcaaagcatgatgctgaggttcagaatatggcatttcagtatgggaagcacatggccatgagtcataagataaattctgatgtccagccttttattaaagaaaagaccagtgactccatgacttttaatctaaactcagctcctgtagtcttacatcaggaatttcttggaagagatttgtggattaaacagatcggagaggctcaagaaaaaggaagattggactatgctaagagatagggtctcgctctgtcgctcaggctggagtgcagtgtcacaatcatagcttactgcagcctcccactcctgggctcaagtgatcctcttgcctcagactcccagttgcgagaaagaatcaaagctggcaaaggtgtgacttcagctattgacctgtgtcgttaccatggaaacaaggcactggaggccctggagagctttcctccctcggaggccagatctgctttagaaaacattgtgtttgctgtgaccagattttcatgacatcaaattaaaaagacactattgttagttagctgaaaatcctagggaatgaggttgattgggagcgctttcacgatgcgttaatgacttttaaaacatatgcatttttccttccttttatcacattgctaaatgagttctgctttctttttggaactgctacaaacaaaattagaagaaaaaaaggtcaagcagttttcacttgtcacgccagaagcacacttgaggctgcagtcgcagaaataattaatgagattcgctcctgtgacctcagcaaatggacaggaaataagtccttattgattggaccgagccagggatggcgccagggcggtggcctgtggtttttcctgctagagaggacaaagcaagttggaagctgcaggtgtcaagagaaatgctctcaataccaaccagggaggattgtctaatcaaaaactagtgaccaatttgtcataatggagagtagttcaatggattgagaaaaatatgttttatttgttggcttgtaattatgtctctggattattattattttttttttagatgtagttttgctcttgttgcccaggctggagtgcaatggtgcagttttgactcactgcaacctccgcctcctgggttcaagtgattctcctgcctcagcctcccgagtagctggaattacaggcacctgccaccacgcctggctaattttgtatttttagtagagatggggtttcactatgttggtcaggctagtctcgaactcctgacctcaggtgatccgcctgcctcggcctcccaaagtgctgggattagaggcttgagccactgcacctggcctcatgtctctggatttataatgcagtatgaatatactttgtgctttatggtttttataatgtctttttggagaaattgccgaaaagttgccaaatacttgaagtaggagattaaaatgttatcaaatgttaaattggttatattaggaatagtctgtttttctttcctgaagatcagtttttttattcaaacacatttcaaagaaccaaattttttttttctttaaggaaaaaggagctttttttcaagtgaaatgtattcatttgtaatactttggtttaaggcatactttaatttttacgagtttcagaaacagaatttttgtactagggaattcattggtgagagtgttcttttaacctcagaatgtcaaattttggtcttgaaccacagacatccaattacagaaagaatataagcaatctcacaggcctgcaatcggacactgtctctgtgtggttcataggagatgatttttgaggtttgcactcatgcaatttgagaacaccgttgacaagaaggctgagtttacataaatgatctagattgaaactcagctacctttcttcctcatgtggtgtaattacagccctatctggagacagcgaatacagcaaacagattttattacctagttcgctcaaacactacatgaagttattttagttaaagccctcccccaaaagttataaaaccattttatcagggcccaacatgtggcatgcaatgaagagaaaatgtaaagctacagaggttaatgtattgtattataaaatattttaagtgtactcaaaatatcataattgtacagtttatgccaccataatttgaggcctatagatttagcttaagagaacactgttctgtttgaaatgctttctgtcactgaaattggcttaattagtaaccatggataagatgctttagatcagactaggttttaatcattaacttccacaaagaagtcatactttgcgttaggtgtgctggttggatgtgcaggaacttcagcaagcagtaggttttactaagcagatggtcgggcactgcagggcaccaggcaggatcctagggcgcctcttattctgcgttagcatctggtttgctgtatgaccttgcacaagtcacttccttctgagcctcaattttctcatctgtacaatgagattcaaaagttgacctgaaagtcaagtgtgaaaaaaaaaaagagattaaacaagataattatgaaattctttccag

SEQ ID NO: 331666 - DNA, 1255 bp, Homo sapiens
  misc_feature (1244)..(1246): n is a, c, g, or t
attccatgcctccaatatggcgtcctccacataggcagtggctgtggtttctaccccgggtggccgggggcagtgctgagctgggactgttgtttgcccagcctgggctgcagaaagcagcagttaaagttcgtttctggtcactgctccaggaagccaccttactctgagggtcaagaattgccgcttccttttagttactgtaagttcctcctctgcccctggtttgtttcccgcggcacttctggatacccccaggtcccagacccttccagactcaaaccatgaactttcggcagctgctgttgcacttgccacgttatcttggagcctcgggttccccgcgtcgcctgtggtggtccccgtccctcgacaccatctcctcggtgggctcttggcgtggtcggtcctccaagtccccggcccactggaatcaggtagtgtcagaggcggagaagatcgtggggtaccccacgtccttcatgagccttcgctgcctgctgagcgacgagctcagcaacatcgctatgcaggtgcggaagctggtgggcactcagcaccctctgcttaccacagccagggggcttgtacatgacagctggaatagcctccagttgaggggcttggtggtgctccttatctctaaagcagctgggcccagcagcgtgaacacttcatgtcagaactatgacatggtcagtgggatctactcatgtcaaagaagtttggcagagatcacggagctaattcatattgctctccttgtacatcgtgggatagtaaatttaaatgagttgcaatcatctgatggtccactgaaagacatgcaatttggaaataaaattgctatcctgagtggagactttcttctagcaaatgcctgcaatggactagctctgctacagaacaccaagtcattttcatttaatggacctattgctatatatcagatgggagactgtgagtcagcctggatcttgtctaaacacccaagagcattgtcatgatgtcactcctggaggttgttctattaagcattagtgatttatacttccggataaccagtggcacagatgtactctttacatagctgatgtatttccttatgttaactttgttttcctaaaggcgtaaatatgttgtttaaaatgaagtattttgtttgtacaaatatgctcaatttatgcatataaatctccctttacaccatctatatagtttaataaagatgctattgtctaaannngtttgtctt

SEQ ID NO: 331667 - DNA, 202 bp, Homo sapiens
taaccatgcagtgtcaagaaatgatttggatttgggtaaaagtaagcctaagtacaccaggggttcaatgccagtttttactttgatttcattttcatatttattgctaaaagctcttcctcacatatctccgggcatctgaacctcacagtccatcccactgcctggctgtctcatagttgggatatgtagaatgtcacaa

SEQ ID NO: 331668 - DNA, 133 bp, Homo sapiens
ctcctaaagtgttgggattacaggcgtgagccaccacgcctggtctaaatttttttttagagacaaagcctcattctgttgcccaggcttgagtgtagtggtgcaatcatggtgtactgtagcctcgacctcc

SEQ ID NO: 331669 - DNA, 1313 bp, Homo sapiens
gcagggctactaggacgcacgcgcgagatagaacctcgagtctcgtggagagattgaagatggcggcttctcaggcggtggaggaaatgcggagccgcgtggttctgggggagtttggggttcgcaatgtccatactactgactttcccggtaactattccggttatgatgatgcctgggaccaggaccgcttcgagaagaatttccgtgtggatgtagtacacatggatgaaaactcactggagtttgacatggtgggaattgacgcagccattgccaatgcttttcgacgaattctgctagctgaggtgccaactatggctgtggagaaggtcctggtgtacaataatacatccattgttcaggatgagattcttgctcaccgtctggggctcattcccattcatgctgatccccgtctttttgagtatcggaaccaaggagatgaagaaggcacagagatagatactctacagtttcgtctccaggtcagatgcactcggaacccccatgctgctaaagattcctctgaccccaacgaactgtacgtgaaccacaaagtgtataccaggcatatgacatggatccccctggggaaccaggctgatctctttccagagggcactatccgaccagtgcatgatgatatcctcatcgctcagctgcggcctggccaagaaattgacctgctcatgcactgtgtcaagggcattggcaaagatcatgccaagttttcaccagtggcaacagccagttacaggctcctgccagacatcaccctgcttgagcccgtggaaggggaggcagctgaggagttgagcaggtgcttctcacctggtgttattgaggtgcaggaagtccaaggtaaaaaggtggccagagttgccaacccccggctggataccttcagcagagaaatcttccggaatgagaagctaaagaaggttgtgaggcttgcccgggttcgagatcattatatcttctctgttgagtcaacgggggtgttgccaccagatgtgctggtgagtgaagccatcaaagtactgatggggaagtgccggcgcttcttggatgaactagatgcggttcagatggactgagcttggatgcttctgaggcaagctgaagctttgggttctgactgacccaccctacaggactgctgaacagagagcccagtgtgactagggatcctgagttttctgggacaattccagctttaatcaatacattttgttaaatgtgccataaaatgagactttttacgcctttataaggccttagatgtaaataaactcacccaaacaaaaaaa

SEQ ID NO: 331670 - DNA, 1446 bp, Homo sapiens
gcagggctactaggacgcacgcgcgagatagaacctcgagtctcgtggagagattgaagatggcggcttctcaggcggtggaggaaatgcggagccgcgtggttctgggggagtttggggttcgcaatgtccatactactgactttcccggtaactattccggttatgatgatgcctgggaccaggaccgcttcgagaagaatttccgtgtggatgtagtacacatggatgaaaactcactggagtttgacatggtgggaattgacgcagccattgccaatgcttttcgacgaattctgctagctgaggtgccaactatggctgtggagaaggtcctggtgtacaataatacatccattgttcaggatgagattcttgctcaccgtctggggctcattcccattcatgctgatccccgtctttttgagtatcggaaccaaggagatgaagaaggcacagagatagatactctacagtttcgtctccaggtcagatgcactcggaacccccatgctgctaaagattcctctgaccccaacgaactgtacgtgaaccacaaagtgtataccaggcatatgacatggatccccctggggaaccaggctgatctctttccagagggcactatccgaccagtgcatgatgatatcctcatcgctcagctgcggcctggccaagaaattgacctgctcatgcactgtgtcaagggcattggcaaagatcatgccaagttttcaccagtggcaacagccagttacaggctcctgccagacatcaccctgcttgagcccgtggaaggggaggcagctgaggagttgagcaggtgcttctcacctggtgttattgaggtgcaggaagtccaaggtaaaaaggtggccagagttgccaacccccggctggataccttcagcagagaaatcttccggaatgagaagctaaagaaggttgtgaggcttgcccgggttcgagatcattatatctgtgagtatgaagtggtgagatgagtgggcagtgctctttggtgctgcagcttccttccagtctagatgtgaagtttatgagtaagttttacaggcaagccctgcctagactaaagtgtctctttggtccccagtctctgttgagtcaacgggggtgttgccaccagatgtgctggtgagtgaagccatcaaagtactgatggggaagtgccggcgcttcttggatgaactagatgcggttcagatggactgagcttggatgcttctgaggcaagctgaagctttgggttctgactgacccaccctacaggactgctgaacagagagcccagtgtgactagggatcctgagttttctgggacaattccagctttaatcaatacattttgttaaatgtgccataaaatgagactttttacgcctttataaggccttagatgtaaataaactcacccaaacaaaaaaa

SEQ ID NO: 331671 - DNA, 1255 bp, Homo sapiens
gcagggctactaggacgcacgcgcgagatagaacctcgagtctcgtggagagattgaagatggcggcttctcaggcggtggaggaaatgcggagccgcgtggttctgggggagtttggggttcgcaatgtccatactactgactttcccggtaactattccggttatgatgatgcctgggaccaggaccgcttcgagaagaatttccgtgtggatgtagtacacatggatgaaaactcactggagtttgacatggtgggaattgacgcagccattgccaatgcttttcgacgaattctgctagctgaggtgccaactatggctgtggagaaggtcctggtgtacaataatacatccattgttcaggatgagattcttgctcaccgtctggggctcattcccattcatgctgatccccgtctttttgagtatcggaaccaaggagatgaagaaggcacagagatagatactctacagtttcgtctccaggtcagatgcactcggaacccccatgctgctaaagattcctctgaccccaacgaactgtacgtgaaccacaaagtgtataccaggcatatgacatggatccccctggggaaccaggctgatctctttccagagggcactatccgaccagtgcatgatgatatcctcatcgctcagctgcggcctggccaagaaattgacctgctcatgcactgtgtcaagggcattggcaaagatcatgccaagttttcaccagtggcaacagccagttacaggctcctgccagacatcaccctgcttgagcccgtggaaggggaggcagctgaggagttgagcaggtgcttctcacctggtgttattgaggtgcaggaagtccaagccggaatgagaagctaaagaaggttgtgaggcttgcccgggttcgagatcattatatcttctctgttgagtcaacgggggtgttgccaccagatgtgctggtgagtgaagccatcaaagtactgatggggaagtgccggcgcttcttggatgaactagatgcggttcagatggactgagcttggatgcttctgaggcaagctgaagctttgggttctgactgacccaccctacaggactgctgaacagagagcccagtgtgactagggatcctgagttttctgggacaattccagctttaatcaatacattttgttaaatgtgccataaaatgagactttttacgcctttataaggccttagatgtaaataaactcacccaaacaaaaaaa

SEQ ID NO: 331672 - DNA, 1540 bp, Homo sapiens
gcagggctactaggacgcacgcgcgagatagaacctcgagtctcgtggagagattgaagatggcggcttctcaggcggtggaggaaatgcggagccgcgtggttctgggggagtttggggttcgcaatgtccatactactgactttcccggtaactattccggttatgatgatgcctgggaccaggaccgcttcgagaagaatttccgtgtggatgtagtacacatggatgaaaactcactggagtttgacatggtgggaattgacgcagccattgccaatgcttttcgacgaattctgctagctgaggtgccaactatggctgtggagaaggtcctggtgtacaataatacatccattgttcaggatgagattcttgctcaccgtctggggctcattcccattcatgctgatccccgtctttttgagtatcggaaccaaggtgagaaaatgaaattttgggagaagtggactatctgggttcaaatcctggttgactgtgatgttgggtaagttacttatctttgtacatcagtgtctttcatctgtgagaacacttgccttgtctcccaagtttgccataattaaatgggaaacacgtaaagcattcagcatagtgctggcactcagacgtttactagttcttaggagctccctccatttgtgcaggagatgaagaaggcacagagatagatactctacagtttcgtctccaggtcagatgcactcggaacccccatgctgctaaagattcctctgaccccaacgaactgtacgtgaaccacaaagtgtataccaggcatatgacatggatccccctggggaaccaggctgatctctttccagagggcactatccgaccagtgcatgatgatatcctcatcgctcagctgcggcctggccaagaaattgacctgctcatgcactgtgtcaagggcattggcaaagatcatgccaagttttcaccagtggcaacagccagttacaggctcctgccagacatcaccctgcttgagcccgtggaaggggaggcagctgaggagttgagcaggtgcttctcacctggtgttattgaggtgcaggaagtccaaggtaaaaaggtggccagagttgccaacccccggctggataccttcagcagagaaatcttccggaatgagaagctaaagaaggttgtgaggcttgcccgggttcgagatcattatatcttctctgttgagtcaacgggggtgttgccaccagatgtgctggtgagtgaagccatcaaagtactgatggggaagtgccggcgcttcttggatgaactagatgcggttcagatggactgagcttggatgcttctgaggcaagctgaagctttgggttctgactgacccaccctacaggactgctgaacagagagcccagtgtgactagggatcctgagttttctgggacaattccagctttaatcaatacattttgttaaatgtgccataaaatgagactttttacgcctttataaggccttagatgtaaataaactcacccaaacaaaaaaa

SEQ ID NO: 331673 - DNA, 1273 bp, Homo sapiens
aaaacactgggcgagatagaatatttaataagagacatttgggcaaagggaggtttttggatgagaggataatacttgagggaattatctaagggggaggtatgaagagatattacacagagagcagatttcacttaaatgttttttcctgtccctctagaatttccgtgtggatgtagtacacatggatgaaaactcactggagtttgacatggtgggaattgacgcagccattgccaatgcttttcgacgaattctgctagctgaggtgccaactatggctgtggagaaggtcctggtgtacaataatacatccattgttcaggatgagattcttgctcaccgtctggggctcattcccattcatgctgatccccgtctttttgagtatcggaaccaaggagatgaagaaggcacagagatagatactctacagtttcgtctccaggtcagatgcactcggaacccccatgctgctaaagattcctctgaccccaacgaactgtacgtgaaccacaaagtgtataccaggcatatgacatggatccccctggggaaccaggctgatctctttccagagggcactatccgaccagtgcatgatgatatcctcatcgctcagctgcggcctggccaagaaattgacctgctcatgcactgtgtcaagggcattggcaaagatcatgccaagttttcaccagtggcaacagccagttacaggctcctgccagacatcaccctgcttgagcccgtggaaggggaggcagctgaggagttgagcaggtgcttctcacctggtgttattgaggtgcaggaagtccaaggtaaaaaggtggccagagttgccaacccccggctggataccttcagcagagaaatcttccggaatgagaagctaaagaaggttgtgaggcttgcccgggttcgagatcattatatcttctctgttgagtcaacgggggtgttgccaccagatgtgctggtgagtgaagccatcaaagtactgatggggaagtgccggcgcttcttggatgaactagatgcggttcagatggactgagcttggatgcttctgaggcaagctgaagctttgggttctgactgacccaccctacaggactgctgaacagagagcccagtgtgactagggatcctgagttttctgggacaattccagctttaatcaatacattttgttaaatgtgccataaaatgagactttttacgcctttataaggccttagatgtaaataaactcacccaaacaaaaaaa

SEQ ID NO: 331674 - DNA, 1080 bp, Homo sapiens
ggaggttggggttacggggataggtagggggtctgttgggtttttgcagataagtggttatttttccttgggcaggtgccaactatggctgtggagaaggtcctggtgtacaataatacatccattgttcaggatgagattcttgctcaccgtctggggctcattcccattcatgctgatccccgtctttttgagtatcggaaccaaggagatgaagaaggcacagagatagatactctacagtttcgtctccaggtcagatgcactcggaacccccatgctgctaaagattcctctgaccccaacgaactgtacgtgaaccacaaagtgtataccaggcatatgacatggatccccctggggaaccaggctgatctctttccagagggcactatccgaccagtgcatgatgatatcctcatcgctcagctgcggcctggccaagaaattgacctgctcatgcactgtgtcaagggcattggcaaagatcatgccaagttttcaccagtggcaacagccagttacaggctcctgccagacatcaccctgcttgagcccgtggaaggggaggcagctgaggagttgagcaggtgcttctcacctggtgttattgaggtgcaggaagtccaaggtaaaaaggtggccagagttgccaacccccggctggataccttcagcagagaaatcttccggaatgagaagctaaagaaggttgtgaggcttgcccgggttcgagatcattatatcttctctgttgagtcaacgggggtgttgccaccagatgtgctggtgagtgaagccatcaaagtactgatggggaagtgccggcgcttcttggatgaactagatgcggttcagatggactgagcttggatgcttctgaggcaagctgaagctttgggttctgactgacccaccctacaggactgctgaacagagagcccagtgtgactagggatcctgagttttctgggacaattccagctttaatcaatacattttgttaaatgtgccataaaatgagactttttacgcctttataaggccttagatgtaaataaactcacccaaacaaaaaaa

SEQ ID NO: 331675 - DNA, 1163 bp, Homo sapiens
gcagggctactaggacgcacgcgcgagatagaacctcgagtctcgtggagagattgaagatggcggcttctcaggcggtggaggaaatgcggagccgcgtggttctgggggagtttggggttcgcaatgtccatactactgactttcccggtaactattccggttatgatgatgcctgggaccaggaccgcttcgagaagaatttccgtgtggatgtagtacacatggatgaaaactcactggagtttgacatggtgggaattgacgcagccattgccaatgcttttcgacgaattctgctagctgaggtgccaactatggctgtggagaaggtcctggtgtacaataatacatccattgttcaggatgagattcttgctcaccgtctggggctcattcccattcatgctgatccccgtctttttgagtatcggaaccaaggagatgaagaaggcacagagatagatactctacagtttcgtctccaggtcagatgcactcggaacccccatgctgctaaagattcctctgaccccaacgaactgtacgtgaaccacaaagtgtataccaggcatatgacatggatccccctggggaaccaggctgatctctttccagagggcactatccgaccagtgcatgatgatatcctcatcgctcagctgcggcctggccaagaaattgacctgctcatgcactgtgtcaagggcattggtaaaaaggtggccagagttgccaacccccggctggataccttcagcagagaaatcttccggaatgagaagctaaagaaggttgtgaggcttgcccgggttcgagatcattatatcttctctgttgagtcaacgggggtgttgccaccagatgtgctggtgagtgaagccatcaaagtactgatggggaagtgccggcgcttcttggatgaactagatgcggttcagatggactgagcttggatgcttctgaggcaagctgaagctttgggttctgactgacccaccctacaggactgctgaacagagagcccagtgtgactagggatcctgagttttctgggacaattccagctttaatcaatacattttgttaaatgtgccataaaatgagactttttacgcctttataaggccttagatgtaaataaactcacccaaacaaaaaaa

SEQ ID NO: 331676 - DNA, 402 bp, Homo sapiens
aaaacactgggcgagatagaatatttaataagagacatttgggcaaagggaggtttttggatgagaggataatacttgagggaattatctaagggggaggtatgaagagatattacacagagagcagatttcacttaaatgttttttcctgtccctctagaatttccgtgtggatgtagtacacatggatgaaaactcactggagtttgacatggtgggaattgacgcagccattgccaatgcttttcgacgaattctgctagctgaggtattggcaggcatggtgacaaggctggagttgctttgggaactgcactgacacctcacttggagaattaagtgtctcaagctgtccttccctccttaattttcctggaattttgctgagcattttaccttctc

SEQ ID NO: 331677 - DNA, 348 bp, Homo sapiens
aatatcctgtgttaacagtgaaaaaatcttaaagttcttttcctaaaatcctaaatggcactgatattgaattccattatactcttagtttagctgcatttccgtcaggctgcacattatggtcactggcccaaaaagtaggaataaaaaaataggaaggaggacatccttgtaacaaactctccttcaccattctccttataatttcaggtaagaaagatttgctggctgcggtggctcacacctgtaatcccagcactttgggaggccaaggcgagtggatcacggggtcaagagagcgagaccatcctggctaacatggtgaaaccccgtctctactaaaaaaaa

SEQ ID NO: 331678 - DNA, 1128 bp, Homo sapiens
gcagggctactaggacgcacgcgcgagatagaacctcgagtctcgtggagagattgaagatggcggcttctcaggcggtggaggaaatgcggagccgcgtggttctgggggagtttggggttcgcaatgtccatactactgactttcccggtaactattccggttatgatgatgcctgggaccaggaccgcttcgagaagaatttccgtgtggatgtagtacacatggatgaaaactcactggagtttgacatggtgggaattgacgcagccattgccaatgcttttcgacgaattctgctagctgaggtgccaactatggctgtggagaaggtcctggtgtacaataatacatccattgttcaggatgagattcttgctcaccgtctggggctcattcccattcatgctgatccccgtctttttgagtatcggaaccaaggagatgaagaaggcacagagatagatactctacagtttcgtctccaggtcagatgcactcggaacccccatgctgctaaagattcctctgaccccaacgaactgtacgtgaaccacaaagtgtataccaggcatatgacatggatccccctggggaaccaggctgatctctttccagagggcactatccgaccagtgcatgatgatatcctcatcgctcagctgcggcctggccaagaaattgacctgctcatgcactgtgtcaagggcattggcaaagatcatgccaagttttcaccagtggcaacagccagttacaggctcctgccagacatcaccctgcttgagcccgtggaaggggaggcagctgaggagttgagcaggtgcttctcacctggtgttattgaggtgcaggaagtccaaggtaaaaaggtggccagagttgccaacccccggctggataccttcagcagagaaatcttccggaatgagaagctaaagaaggttgtgaggcttgcccgggttcgagatcattatatctgtaagaaagatttgctggctgcggtggctcacacctgtaatcccagcactttgggaggccaaggcgagtggatcacggggtcaagagagcgagaccatcctggctaacatggtgaaaccccgtctctactaaaaaaaaaaaaaaaaa

SEQ ID NO: 331679 - DNA, 1202 bp, Homo sapiens
gcagggctactaggacgcacgcgcgagatagaacctcgagtctcgtggagagattgaagatggcggcttctcaggcggtggaggaaatgcggagccgcgtggttctgggggagtttggggttcgcaatgtccatactactgactttcccggtaactattccggttatgatgatgcctgggaccaggaccgcttcgagaagaatttccgtgtggatgtagtacacatggatgaaaactcactggagtttgacatggtgggaattgacgcagccattgccaatgcttttcgacgaattctgctagctgaggtgccaactatggctgtggagaaggtcctggtgtacaataatacatccattgttcaggatgagattcttgctcaccgtctggggctcattcccattcatgctgatccccgtctttttgagtatcggaaccaaggagatgaagaaggcacagagatagatactctacagtttcgtctccaggtcagatgcactcggaacccccatgctgctaaagattcctctgaccccaacgaactgtacgtgaaccacaaagtgtataccaggcatatgacatggatccccctggggaaccaggctgatctctttccagagggcactatccgaccagtgcatgatgatatcctcatcgctcagctgcggcctggccaagaaattgacctgctcatgcactgtgtcaagggcattggcaaagatcatgccaagttttcaccagtggcaacagccagttacaggctcctgccagacatcaccctgcttgagcccgtggaaggggaggcagctgaggagttgagcaggtgcttctcacctggtgttattgaggtgcaggaagtccaaggtaaaaaggtggccagagttgccaacccccggctggataccttcagcagagaaatcttccggaatgagaagctaaagaagtgccggcgcttcttggatgaactagatgcggttcagatggactgagcttggatgcttctgaggcaagctgaagctttgggttctgactgacccaccctacaggactgctgaacagagagcccagtgtgactagggatcctgagttttctgggacaattccagctttaatcaatacattttgttaaatgtgccataaaatgagactttttacgcctttataaggccttagatgtaaataaactcacccaaacaaaaaaa

SEQ ID NO: 331680 - DNA, 1603 bp, Homo sapiens
gcagggctactaggacgcacgcgcgagatagaacctcgagtctcgtggagagattgaagatggcggcttctcaggcggtggaggaaatgcggagccgcgtggttctgggggagtttggggttcgcaatgtccatactactgactttcccggtaactattccggttatgatgatgcctgggaccaggaccgcttcgagaagaatttccgtgtggatgtagtacacatggatgaaaactcactggagtttgacatggtgggaattgacgcagccattgccaatgcttttcgacgaattctgctagctgaggtgccaactatggctgtggagaaggtcctggtgtacaataatacatccattgttcaggatgagattcttgctcaccgtctggggctcattcccattcatgctgatccccgtctttttgagtatcggaaccaaggagatgaagaaggcacagagatagatactctacagtttcgtctccaggtcagatgcactcggaacccccatgctgctaaagattcctctgaccccaacgaactgtacgtgaaccacaaagtgtataccaggcatatgacatggatccccctggggaaccaggctgatctctttccagagggcactatccgaccagtgcatgatgatatcctcatcgctcagctgcggcctggccaagaaattgacctgctcatgcactgtgtcaagggcattggcaaagatcatgccaagttttcaccagtggcaacagccagttacaggctcctgccagacatcaccctgcttgagcccgtggaaggggaggcagctgaggagttgagcaggtgcttctcacctggtgttattgaggtgcaggaagtccaaggtatggtatttgggatgctgttcaagttaggacctaaattatattttctttcaaggtgacagaaataaaaaccctgggctcctaaaagtataacctggtttgctaccaagtggcaaattagaaaaaggaataaaaaaacatggtttgttctcattaggtaaaaaggtggccagagttgccaacccccggctggataccttcagcagagaaatcttccggaatgagaagctaaagaaggttgtgaggcttgcccgggttcgagatcattatatctgtgagtatgaagtggtgagatgagtgggcagtgctctttggtgctgcagcttccttccagtctagatgtgaagtttatgagtaagttttacaggcaagccctgcctagactaaagtgtctctttggtccccagtctctgttgagtcaacgggggtgttgccaccagatgtgctggtgagtgaagccatcaaagtactgatggggaagtgccggcgcttcttggatgaactagatgcggttcagatggactgagcttggatgcttctgaggcaagctgaagctttgggttctgactgacccaccctacaggactgctgaacagagagcccagtgtgactagggatcctgagttttctgggacaattccagctttaatcaatacattttgttaaatgtgccataaaatgagactttttacgcctttataaggccttagatgtaaataaactcacccaaacaaaaaaa

SEQ ID NO: 331681 - DNA, 1628 bp, Homo sapiens
gcagggctactaggacgcacgcgcgagatagaacctcgagtctcgtggagagattgaagatggcggcttctcaggcggtggaggaaatgcggagccgcgtggttctgggggagtttggggttcgcaatgtccatactactgactttcccggtaactattccggttatgatgatgcctgggaccaggaccgcttcgagaagaatttccgtgtggatgtagtacacatggatgaaaactcactggagtttgacatggtgggaattgacgcagccattgccaatgcttttcgacgaattctgctagctgaggtgccaactatggctgtggagaaggtcctggtgtacaataatacatccattgttcaggatgagattcttgctcaccgtctggggctcattcccattcatgctgatccccgtctttttgagtatcggaaccaaggtgagaaaatgaaattttgggagaagtggactatctgggttcaaatcctggttgactgtgatgttgggtaagttacttatctttgtacatcagtgtctttcatctgtgagaacacttgccttgtctcccaagtttgccataattaaatgggaaacacgtaaagcattcagcatagtgctggcactcagacgtttactagttcttaggagctccctccatttgtgcaggagatgaagaaggcacagagatagatactctacagtttcgtctccaggtcagatgcactcggaacccccatgctgctaaagattcctctgaccccaacgaactgtacgtgaaccacaaaggtgagtagtggtagggtgaggaagaggccccactgtgggtagctgctaggtttagggactgagatcttctgacatgtttttcctccagtgtataccaggcatatgacatggatccccctggggaaccaggctgatctctttccagagggcactatccgaccagtgcatgatgatatcctcatcgctcagctgcggcctggccaagaaattgacctgctcatgcactgtgtcaagggcattggcaaagatcatgccaagttttcaccagtggcaacagccagttacaggctcctgccagacatcaccctgcttgagcccgtggaaggggaggcagctgaggagttgagcaggtgcttctcacctggtgttattgaggtgcaggaagtccaaggtaaaaaggtggccagagttgccaacccccggctggataccttcagcagagaaatcttccggaatgagaagctaaagaaggttgtgaggcttgcccgggttcgagatcattatatcttctctgttgagtcaacgggggtgttgccaccagatgtgctggtgagtgaagccatcaaagtactgatggggaagtgccggcgcttcttggatgaactagatgcggttcagatggactgagcttggatgcttctgaggcaagctgaagctttgggttctgactgacccaccctacaggactgctgaacagagagcccagtgtgactagggatcctgagttttctgggacaattccagctttaatcaatacattttgttaaatgtgccataaaatgagactttttacgcctttataaggccttagatgtaaataaactcacccaaacaaaaaaa

SEQ ID NO: 331682 - DNA, 442 bp, Homo sapiens
gcagggctactaggacgcacgcgcgagatagaacctcgagtctcgtggagagattgaagatggcggcttctcaggcggtggaggaaatgcggagccgcgtggttctgggggagtttggggttcgcaatgtccatactactgactttcccggtaactattccggttatgatgatgcctgggaccaggaccgcttcgagaagaatttccgtgtggatgtagtacacatggatgaaaactcactggagtttgacatggtgggaattgacgcagccattgccaatgcttttcgacgaattctgctagctgaggtattggcaggcatggtgacaaggctggagttgctttgggaactgcactgacacctcacttggagaattaagtgtctcaagctgtccttccctccttaattttcctggaattttgctgagcattttaccttctc

SEQ ID NO: 331683 - DNA, 453 bp, Homo sapiens
ttccggtagtgagaacccttccggtgggctaggtactgagcgcgcgagtacagagtgaaggtttaaatccaaggtcatggcaaaacatctgaagttcatcgccaggactgtgatggtacaggaagggaacgtggaaagcgcatacaggaccctaaacagaatcctcactatggatgggctcattgaggacattaagcatcggcggtattatgagaagccatgccgccggcgacagagggaaagctatgaaaggtgccggcggatctacaacatggaaatggctcgcaagatcaacttcttgatgcgaaagaatcgggcagatccgtggcagggctgctgaggcctgtgggtgggacacccagtgcgaaaccctcatccagttttctctccatctcttttctttgtacaatcccatttcctattaccattctctgcaataaactcaaatcacat

SEQ ID NO: 331684 - DNA, 893 bp, Homo sapiens
ttccggtagtgagaacccttccggtgggctaggtactgagcgcgcgaggtgaggagttgtgcagggtttggggaaaggaaggctggcttggcgagagggcaggtttgcgggctttcgcccccttttccaaagaccaacaaagagtccttccccaactcccaactcaaccccttttggaactatgtgtggtggttgggaccctgtggcgcatccttgtcgctcgtgtccttctcatgcccggcgacgcgtctttgtggtaacgccctgctgccatctcttttcttctctatgcgaggatttggactggcagtgagaataagagacaacgattcacgtctactttctaggatgacttccatgtgctccatctcgcgcgtccctgagcatgttgaatttccaaatcctaaataagccgcgcggtgtagtttgtattatgttgcgtttctctttctgctttcctcgccctttctccatcatcctttaggctctacagagtgaaggtttaaatccaaggtcatggcaaaacatctgaagttcatcgccaggactgtgatggtacaggaagggaacgtggaaagcgcatacaggaccctaaacagaatcctcactatggatgggctcattgaggacattaagcatcggcggtattatgagaagccatgccgccggcgacagagggaaagctatgaaaggtgccggcggatctacaacatggaaatggctcgcaagatcaacttcttgatgcgaaagaatcgggcagatccgtggcagggctgctgaggcctgtgggtgggacacccagtgcgaaaccctcatccagttttctctccatctcttttctttgtacaatcccatttcctattaccattctctgcaataaactcaaatcacat

SEQ ID NO: 331685 - DNA, 538 bp, Homo sapiens
ttccggtagtgagaacccttccggtgggctaggtactgagcgcgcgagtacagagtgaaggtttaaatccaaggtcatggcaaaacatctgaagttcatcgccaggactgtgatggtacaggaagggaacgtggaaagcgcatacaggaccctaaacagaatcctcactatggatgggctcattgaggacattaagcatcggcggtattatgagaagccatgccgccggcgacagagggaaagctatgaaaggtgccggcggatctacaacatggaaatggctcgcaagatcaacttcttgatgcgaaagaatcgggcagatccgtggcagggctgctgaggcctgtgggtgggacacccagtgcgaaaccctcatccagttttctctccatctcttttctttgtacaatcccatttcctattaccattctctgcaataaactcaaatcacatgtctgcaagaaggcctccaaatatagaaacaatcccaaaaaaaaaaaaaaaaaaaaaaaaaaaaaaaggggggggggccgggccc

SEQ ID NO: 331686 - DNA, 838 bp, Homo sapiens
ttccggtagtgagaacccttccggtgggctaggtactgagcgcgcgaggtgaggagttgtgcagggtttggggaaaggaaggctggcttggcgagagggcaggtttgcgggctttcgcccccttttccaaagaccaacaaagagtccttccccaactcccaactcaaccccttttggaactatgtgtggtggttgggaccctgtggcgcatccttgtcgctcgtgtccttctcatgcccggcgacgcgtctttgtggtaacgccctgctgccatctcttttcttctctatgcgaggatttggactggcagtgagaataagagacaacgattcacgtctactttctaggatgacttccatgtgctccatctcgcgcgtccctgagcatgttgaatttccaaatcctaaataagccgcgcggtgtagtttgtattatgttgcgtttctctttctgctttcctcgccctttctccatcatcctttaggctctacagagtgaaggtttaaatccaaggtcatggcaaaacatctgaagttcatcgccaggactgtgatggtacaggaagggaacgtggaaagcgcatacaggaccctaaacaggtaactgttaagggaccagaatcatgcctagactctctgggaagtgcggtggttattctctcccttcccctttcgttgattgttctcaaaacagtgccagcccaggtgttcacagtctcttaaaacgtctcagcccctcagtttattatcttaaaaatgaagttctgggccgggcgcggtggctcacgcctgtaatcccagcactttgggaggccgaggcgggtggatcacatgcggtc

SEQ ID NO: 331687 - DNA, 1532 bp, Homo sapiens
ttccggtagtgagaacccttccggtgggctaggtactgagcgcgcgaggtgaggagttgtgcagggtttggggaaaggaaggctggcttggcgagagggcaggtttgcgggctttcgcccccttttccaaagaccaacaaagagtccttccccaactcccaactcaaccccttttggaactatgtgtggtggttgggaccctgtggcgcatccttgtcgctcgtgtccttctcatgcccggcgacgcgtctttgtggtaacgccctgctgccatctcttttcttctctatgcgaggatttggactggcagtgagaataagagacaacgattcacgtctactttctaggatgacttccatgtgctccatctcgcgcgtccctgagcatgttgaatttccaaatcctaaataagccgcgcggtgtagtttgtattatgttgcgtttctctttctgctttcctcgccctttctccatcatcctttaggctctacagagtgaaggtttaaatccaaggtcatggcaaaacatctgaagttcatcgccaggactgtgatggtacaggaagggaacgtggaaagcgcatacaggaccctaaacagaatcctcactatggatgggctcattgaggacattaagcatcggcggtattatgagaagccatgccgccggcgacagagggaaagctatgaaaggtgccggcggatctacaacatggaaatggctcgcaagatcaacttcttgatgcgaaagaatcgggcagatccgtggcagggctgctgaggcctgtgggtgggacacccagtgcgaaaccctcatccagttttctctccatctcttttctttgtacaatcccatttcctattaccattctctgcaataaactcaaatcacatgtctgcaagaaggcctccaaatatagaaacaatcccattagtcagcagtggaccctgtcttttattaagtgaaagaagaaactgagtctgaaagtactctaggagtagaatggtatttgccagggactggaggagggggcagtgaggagttattgtttaatgggtacagagtttcagtttgggcagatgaaaaagttcaggagacgatggcctggcatggtggctcacgcctgttatcccaacactttgggaggctgaggcgggcggatcacttgaggccaggagtttgagaccagcttggccaatgtggtgaaaccccatctctactaaaaatacaaaaaaaaaattggccgggcgtggtggtgcacgcctgtaatcccagatacttgggtggctgaggcaggagaattgcttgaactggggaggcagaggttgcagtgagccaagatcatgccactgcactccaacctgggcgacagagtgagactccatctcaaaacaaaaaaacggagatggatgatgaatggtgatggcggttgctcaaaaagttgaatgtacttaatgccactgaactatacccttaaatggtcacgatggtaaattttgtgttttactacaataaaaacttttttgaaagtc

SEQ ID NO: 331688 - DNA, 1947 bp, Homo sapiens
ttccggtagtgagaacccttccggtgggctaggtactgagcgcgcgaggtgaggagttgtgcagggtttggggaaaggaaggctggcttggcgagagggcaggtttgcgggctttcgcccccttttccaaagaccaacaaagagtccttccccaactcccaactcaaccccttttggaactatgtgtggtggttgggaccctgtggcgcatccttgtcgctcgtgtccttctcatgcccggcgacgcgtctttgtggtaacgccctgctgccatctcttttcttctctatgcgaggatttggactggcagtgagaataagagacaacgattcacgtctactttctaggatgacttccatgtgctccatctcgcgcgtccctgagcatgttgaatttccaaatcctaaataagccgcgcggtgtagtttgtattatgttgcgtttctctttctgctttcctcgccctttctccatcatcctttaggctctacagagtgaaggtttaaatccaaggtcatggcaaaacatctgaagttcatcgccaggactgtgatggtacaggaagggaacgtggaaagcgcatacaggaccctaaacagaatcctcactatggatgggctcattgaggacattaagcatcggcggtattatgagaagccatgccgccggcgacagagggaaagctatgaaaggtgccggcggatctacaacatggaaatggctcgcaagatcaacttcttgatgcgaaagaatcgggcagatccgtggcagggctgctgaggcctgtgggtgggacacccagtgcgaaaccctcatccagttttctctccatctcttttctttgtacaatcccatttcctattaccattctctgcaataaactcaaatcacatgtctgcaagaaggcctccaaatatagaaacaatcccattagtcagcagtggaccctgtcttttattaagtgaaagaagaaactgagtctgaaagtactctaggagtagaatggtatttgccagggactggaggagggggcagtgaggagttattgtttaatgggtacagagtttcagtttgggcagatgaaaaagttcaggagtttgagaccagcttggccaatgtggtgaaaccccatctctactaaaaatacaaaaaaaaaattggccgggcgtggtggtgcacgcctgtaatcccagatacttgggtggctgaggcaggagaattgcttgaactggggaggcagaggttgcagtgagccaagatcatgccactgcactccaacctgggcgacagagtgagactccatctcaaaacaaaaaaacggagatggatgatgaatggtgatggcggttgctcaaaaagttgaatgtacttaatgccactgaactatacccttaaatggtcacgatggtaaattttgtgttttactacaataaaaacttttttgaaagtccaggagaagtaaggaattttttttttcttttttttaagaggaagtctcgctcttgttgcccaggctggagggcagtgggacaatctcagctcactgcaagctccgccgcctgggttcacgccattctcctgcctcagcctccccagcagctgggactacaggcacacgccgccacgcccggctaatttttgtgtttttagtagagatggggtttatctgtgttggccaggatagtctcgatctcctggtctcgtgatccccctgccttggcctcccaaagtgttgggattacaggcgtgagccactgcgcccggccggaaaatttttttaatgtagtgaaatatgtctaccatttcctacccaatttttttgaatccccaagcaaaatcttactgagaaagcatctattactttttattaaactgttccatgttaggtagagaggagaagatgcatgtatgtatttggaataaattctgcttctgaaaacacctatc

SEQ ID NO: 331689 - DNA, 1896 bp, Homo sapiens
ttccggtagtgagaacccttccggtgggctaggtactgagcgcgcgaggtgaggagttgtgcagggtttggggaaaggaaggctggcttggcgagagggcaggtttgcgggctttcgcccccttttccaaagaccaacaaagagtccttccccaactcccaactcaaccccttttggaactatgtgtggtggttgggaccctgtggcgcatccttgtcgctcgtgtccttctcatgcccggcgacgcgtctttgtggtaacgccctgctgccatctcttttcttctctatgcgaggatttggactggcagtgagaataagagacaacgattcacgtctactttctaggatgacttccatgtgctccatctcgcgcgtccctgagcatgttgaatttccaaatcctaaataagccgcgcggtgtagtttgtattatgttgcgtttctctttctgctttcctcgccctttctccatcatcctttaggctctacagagtgaaggtttaaatccaaggtcatggcaaaacatctgaagttcatcgccaggactgtgatggtacaggaagggaacgtggaaagcgcatacaggaccctaaacagaatcctcactatggatgggctcattgaggacattaagcatcggcggtattatgagaagccatgccgccggcgacagagggaaagctatgaaaggtgccggcggatctacaacatggaaatggctcgcaagatcaacttcttgatgcgaaagaatcgggcagatccgtggcagggctgctgaggcctgtgggtgggacacccagtgcgaaaccctcatccagttttctctccatctcttttctttgtacaatcccatttcctattaccattctctgcaataaactcaaatcacatgtctgcaagaaggcctccaaatatagaaacaatcccattagtcagcagtggaccctgtcttttattaagtgaaagaagaaactgagtctgaaagtactctaggagtagaatggtatttgccagggactggaggagggggcagtgaggagttattgtttaatgggtacagagtttcagtttgggcagatgaaaaagttcaggagacgatggcctggcatggtggctcacgcctgttatcccaacactttgggaggctgaggcgggcggatcacttgaggccaggagtttgagaccagcttggccaatgtggtgaaaccccatctctactaaaaatacaaaaaaaaaattggccgggcgtggtggtgcacgcctgtaatcccagatacttgggtggctgaggcaggagaattgcttgaactggggaggcagaggttgcagtgagccaagatcatgccactgcactccaacctgggcgacagagtgagactccatctcaaaacaaaaaaacggagatggatgatgaatggtgatggcggttgctcaaaaagttgaatgtacttaatgccactgaactatacccttaaatggtcacgatggtaaattttgtgttttactacaataaaaacttttttgaaagtccaggagaagtaaggaattttttttttcttttttttaagaggaagtctcgctcttgtcccccagactggagtgcaatggtgcagtctaggctcactgcaacctcggcctcctgggttcgggtgattctcctgcctcagcctcccaaagtgttgggattacaggcgtgagccactgcgcccggccggaaaatttttttaatgtagtgaaatatgtctaccatttcctacccaatttttttgaatccccaagcaaaatcttactgagaaagcatctattactttttattaaactgttccatgttaggtagagaggagaagatgcatgtatgtatttggaataaattctgcttctgaaaacacctatc

SEQ ID NO: 331690 - DNA, 1515 bp, Homo sapiens
ttccggtagtgagaacccttccggtgggctaggtactgagcgcgcgaggtgaggagttgtgcagggtttggggaaaggaaggctggcttggcgagagggcaggtttgcgggctttcgcccccttttccaaagaccaacaaagagtccttccccaactcccaactcaaccccttttggaactatgtgtggcgcatccttgtcgctcgtgtccttctcatgcccggcgacgcgtctttgtggtaacgccctgctgccatctcttttcttctctatgcgaggatttggactggcagtgagaataagagacaacgattcacgtctactttctaggatgacttccatgtgctccatctcgcgcgtccctgagcatgttgaatttccaaatcctaaataagccgcgcggtgtagtttgtattatgttgcgtttctctttctgctttcctcgccctttctccatcatcctttaggctctacagagtgaaggtttaaatccaaggtcatggcaaaacatctgaagttcatcgccaggactgtgatggtacaggaagggaacgtggaaagcgcatacaggaccctaaacagaatcctcactatggatgggctcattgaggacattaagcatcggcggtattatgagaagccatgccgccggcgacagagggaaagctatgaaaggtgccggcggatctacaacatggaaatggctcgcaagatcaacttcttgatgcgaaagaatcgggcagatccgtggcagggctgctgaggcctgtgggtgggacacccagtgcgaaaccctcatccagttttctctccatctcttttctttgtacaatcccatttcctattaccattctctgcaataaactcaaatcacatgtctgcaagaaggcctccaaatatagaaacaatcccattagtcagcagtggaccctgtcttttattaagtgaaagaagaaactgagtctgaaagtactctaggagtagaatggtatttgccagggactggaggagggggcagtgaggagttattgtttaatgggtacagagtttcagtttgggcagatgaaaaagttcaggagacgatggcctggcatggtggctcacgcctgttatcccaacactttgggaggctgaggcgggcggatcacttgaggccaggagtttgagaccagcttggccaatgtggtgaaaccccatctctactaaaaatacaaaaaaaaaattggccgggcgtggtggtgcacgcctgtaatcccagatacttgggtggctgaggcaggagaattgcttgaactggggaggcagaggttgcagtgagccaagatcatgccactgcactccaacctgggcgacagagtgagactccatctcaaaacaaaaaaacggagatggatgatgaatggtgatggcggttgctcaaaaagttgaatgtacttaatgccactgaactatacccttaaatggtcacgatggtaaattttgtgttttactacaataaaaacttttttgaaagtc

SEQ ID NO: 331691 - DNA, 1092 bp, Homo sapiens
ttccggtagtgagaacccttccggtgggctaggtactgagcgcgcgagtacagagtgaaggtttaaatccaaggtcatggcaaaacatctgaagttcatcgccaggactgtgatggtacaggaagggaacgtggaaagcgcatacaggaccctaaacagaatcctcactatggatgggctcattgaggacattaagcatcggcggtattatgagaagccatgccgccggcgacagagggaaagctatgaaaggtgccggcggatctacaacatggaaatggctcgcaagatcaacttcttgatgcgaaagaatcgggcagatccgtggcagggctgctgaggcctgtgggtgggacacccagtgcgaaaccctcatccagttttctctccatctcttttctttgtacaatcccatttcctattaccattctctgcaataaactcaaatcacatgtctgcaagaaggcctccaaatatagaaacaatcccattagtcagcagtggaccctgtcttttattaagtgaaagaagaaactgagtctgaaagtactctaggagtagaatggtatttgccagggactggaggagggggcagtgaggagttattgtttaatgggtacagagtttcagtttgggcagatgaaaaagttcaggagacgatggcctggcatggtggctcacgcctgttatcccaacactttgggaggctgaggcgggcggatcacttgaggccaggagtttgagaccagcttggccaatgtggtgaaaccccatctctactaaaaatacaaaaaaaaaattggccgggcgtggtggtgcacgcctgtaatcccagatacttgggtggctgaggcaggagaattgcttgaactggggaggcagaggttgcagtgagccaagatcatgccactgcactccaacctgggcgacagagtgagactccatctcaaaacaaaaaaacggagatggatgatgaatggtgatggcggttgctcaaaaagttgaatgtacttaatgccactgaactatacccttaaatggtcacgatggtaaattttgtgttttactacaataaaaacttttttgaaagtc

SEQ ID NO: 331692 - DNA, 941 bp, Homo sapiens
ttccggtagtgagaacccttccggtgggctaggtactgagcgcgcgaggtgaggagttgtgcagggtttggggaaaggaaggctggcttggcgagagggcaggtttgcgggctttcgcccccttttccaaagaccaacaaagagtccttccccaactcccaactcaaccccttttggaactatgtgtggtggttgggaccctgtggcgcatccttgtcgctcgtgtccttctcatgcccggcgacgcgtctttgtggtaacgccctgctgccatctcttttcttctctatgcgaggatttggactggcagtgagaataagagacaacgattcacgtctactttctaggatgacttccatgtgctccatctcgcgcgtccctgagcatgttgaatttccaaatcctaaataagccgcgcggtgtagtttgtattatgttgcgtttctctttctgctttcctcgccctttctccatcatcctttaggctctacagagtgaaggtttaaatccaaggtcatggcaaaacatctgaagttcatcgccaggactgtgatggtacaggaagggaacgtggaaagcgcatacaggaccctaaacagaatcctcactatggatgggctcattgaggacattaagcatcggcggtattatgagaagccatgccgccggcgacagagggaaagctatgaaaggtgccggcggatctacaacatggaaatggctcgcaagatcaacttcttgatgcgaaagaatcgggcagatccgtggcagggctgctgaggcctgtgggtgggacacccagtgcgaaaccctcatccagttttctctccatctcttttctttgtacaatcccatttcctattaccattctctgcaataaactcaaatcacataaaaaaaaaaaaaaaaaaaaaaaaaaaaaaggggggggggccgggccc

SEQ ID NO: 331693 - DNA, 949 bp, Homo sapiens
  misc_feature (908)..(908): n is a, c, g, or t
ttccggtagtgagaacccttccggtgggctaggtactgagcgcgcgaggtgaggagttgtgcagggtttggggaaaggaaggctggcttggcgagagggcaggtttgcgggctttcgcccccttttccaaagaccaacaaagagtccttccccaactcccaactcaaccccttttggaactatgtgtggtggttgggaccctgtggcgcatccttgtcgctcgtgtccttctcatgcccggcgacgcgtctttgtggtaacgccctgctgccatctcttttcttctctatgcgaggatttggactggcagtgagaataagagacaacgattcacgtctactttctaggatgacttccatgtgctccatctcgcgcgtccctgagcatgttgaatttccaaatcctaaataagccgcgcggtgtagtttgtattatgttgcgtttctctttctgctttcctcgccctttctccatcatcctttaggctctacagagtgaaggtttaaatccaaggtcatggcaaaacatctgaagttcatcgccaggactgtgatggtacaggaagggaacgtggaaagcgcatacaggaccctaaacagaatcctcactatggatgggctcattgaggacattaagcatcggcggtattatgagaagccatgccgccggcgacagagggaaagctatgaaaggtgccggcggatctacaacatggaaatggctcgcaagatcaacttcttgatgcgaaagaatcgggcagatccgtggcagggctgctgaggcctgtgggtgggacacccagtgcgaaaccctcatccagttttctctccatctcttttctttgtacaatcccatttcctattaccattctctgcaataaactcaaatcacatcgatcggccgaaganattcttctaaaaatccctatcccgtctcaccactctagcaa

SEQ ID NO: 331694 - DNA, 953 bp, Homo sapiens
  misc_feature (896)..(896): n is a, c, g, or t
ttccggtagtgagaacccttccggtgggctaggtactgagcgcgcgaggtgaggagttgtgcagggtttggggaaaggaaggctggcttggcgagagggcaggtttgcgggctttcgcccccttttccaaagaccaacaaagagtccttccccaactcccaactcaaccccttttggaactatgtgtggtggttgggaccctgtggcgcatccttgtcgctcgtgtccttctcatgcccggcgacgcgtctttgtggtaacgccctgctgccatctcttttcttctctatgcgaggatttggactggcagtgagaataagagacaacgattcacgtctactttctaggatgacttccatgtgctccatctcgcgcgtccctgagcatgttgaatttccaaatcctaaataagccgcgcggtgtagtttgtattatgttgcgtttctctttctgctttcctcgccctttctccatcatcctttaggctctacagagtgaaggtttaaatccaaggtcatggcaaaacatctgaagttcatcgccaggactgtgatggtacaggaagggaacgtggaaagcgcatacaggaccctaaacagaatcctcactatggatgggctcattgaggacattaagcatcggcggtattatgagaagccatgccgccggcgacagagggaaagctatgaaaggtgccggcggatctacaacatggaaatggctcgcaagatcaacttcttgatgcgaaagaatcgggcagatccgtggcagggctgctgaggcctgtgggtgggacacccagtgcgaaaccctcatccagttttctctccatctcttttctttgtacaatcccatttcctattaccattctctgcaataaactcaaatcacatcangatgcgtgatgcacctactcaaatacttcgcaccccccacacaatcataagcgagcc

SEQ ID NO: 331695 - DNA, 875 bp, Homo sapiens
ttccggtagtgagaacccttccggtgggctaggtactgagcgcgcgaggtgaggagttgtgcagggtttggggaaaggaaggctggcttggcgagagggcaggtttgcgggctttcgcccccttttccaaagaccaacaaagagtccttccccaactcccaactcaaccccttttggaactatgtgtggtggttgggaccctgtggcgcatccttgtcgctcgtgtccttctcatgcccggcgacgcgtctttgtggtaacgccctgctgccatctcttttcttctctatgcgaggatttggactggcagtgagaataagagacaacgattcacgtctactttctaggatgacttccatgtgctccatctcgcgcgtccctgagcatgttgaatttccaaatcctaaataagccgcgcggtgtagtttgtattatgttgcgtttctctttctgctttcctcgccctttctccatcatcctttaggctctacagagtgaaggtttaaatccaaggtcatggcaaaacatctgaagttcatcgccaggactgtgatggtacaggaagggaacgtggaaagcgcatacaggaccctaaacagaatcctcactatggatgggctcattgaggacattaagcatcggcggtattatgagaagccatgccgccggcgacagagggaaagctatgaaaggtgccggcggatctacaacatggaaatggctcgcaagatcaacttcttgatgcgaaagaatcgggcagatccgtggcagggctgctgaggcctgtgggtgggacacccagtggctccatcaattttcctcccctctttcttgggcaacccattctttacacttcggaaccccgcgtgtgtagc

SEQ ID NO: 331696 - DNA, 827 bp, Homo sapiens
ttccggtagtgagaacccttccggtgggctaggtactgagcgcgcgaggtgaggagttgtgcagggtttggggaaaggaaggctggcttggcgagagggcaggtttgcgggctttcgcccccttttccaaagaccaacaaagagtccttccccaactcccaactcaaccccttttggaactatgtgtggtggttgggaccctgtggcgcatccttgtcgctcgtgtccttctcatgcccggcgacgcgtctttgtggtaacgccctgctgccatctcttttcttctctatgcgaggatttggactggcagtgagaataagagacaacgattcacgtctactttctaggatgacttccatgtgctccatctcgcgcgtccctgagcatgttgaatttccaaatcctaaataagccgcgcggtgtagtttgtattatgttgcgtttctctttctgctttcctcgccctttctccatcatcctttaggctctacagagtgaaggtttaaatccaaggtcatggcaaaacatctgaaaatcctcactatggatgggctcattgaggacattaagcatcggcggtattatgagaagccatgccgccggcgacagagggaaagctatgaaaggtgccggcggatctacaacatggaaatggctcgcaagatcaacttcttgatgcgaaagaatcgggcagatccgtggcagggctgctgaggcctgtgggtgggacacccagtgcgaaaccctcatccagttttctctccatctcttttctttgtacaatcccatttcctattaccattctctgcaataaactcaaatcacat

SEQ ID NO: 331697 - DNA, 688 bp, Homo sapiens
aaaactccagttgacacaaaatagactacgaaagtggctttaacatatctgaacacacaatagctaagacccaaactgggattagataccccactatgcttagccctaaacctcaacagttaaatcaacaaaactgctcgccagaacactacgagccacagcttaaaactcaaaggacctggcggtgcttcatatccctctagaggagcctgttctgtaatcgataaaccccgatcaacctcaccacctcttgctcagcctatataccgccatcttcagcaaaccctgatgaaggctacaaagtaagcgcaagtacccacgtaaagacgttaggtcaaggtgtagcccatgaggtggcaagaaatgggctacattttctaccccagccctaaacaatcctcactatggatgggctcattgaggacattaagcatcggcggtattatgagaagccatgccgccggcgacagagggaaagctatgaaaggtgccggcggatctacaacatggaaatggctcgcaagatcaacttcttgatgcgaaagaatcgggcagatccgtggcagggctgctgaggcctgtgggtgggacacccagtgcgaaaccctcatccagttttctctccatctcttttctttgtacaatcccatttcctattaccattctctgcaataaactcaaatcacat

SEQ ID NO: 331698 - DNA, 1371 bp, Homo sapiens
ttccggtagtgagaacccttccggtgggctaggtactgagcgcgcgaggtgaggagttgtgcagggtttggggaaaggaaggctggcttggcgagagggcaggtttgcgggctttcgcccccttttccaaagaccaacaaagagtccttccccaactcccaactcaaccccttttggaactatgtgtggtggttgggaccctgtggcgcatccttgtcgctcgtgtccttctcatgcccggcgacgcgtctttgtggtaacgccctgctgccatctcttttcttctctatgcgaggatttggactggcagtgagaataagagacaacgattcacgtctactttctaggatgacttccatgtgctccatctcgcgcgtccctgagcatgttgaatttccaaatcctaaataagccgcgcggtgtagtttgtattatgttgcgtttctctttctgctttcctcgccctttctccatcatcctttaggctctacagagtgaaggtttaaatccaaggtcatggcaaaacatctgaagttcatcgccaggactgtgatggtacaggaagggaacgtggaaagcgcatacaggaccctaaacagactgcgtggtctcgcctcactgcaacctctgtctcccgggagaattgcttgaactggggaggcagaggttgcagtgagccaagatcatgccactgcactccaacctgggcgacagagtgagactccatctcaaaacaaaaaaacggagatggatgatgaatggtgatggcggttgctcaaaaagttgaatgtacttaatgccactgaactatacccttaaatggtcacgatggtaaattttgtgttttactacaataaaaacttttttgaaagtccaggagaagtaaggaattttttttttcttttttttaagaggaagtctcgctcttgttgcccaggctggagggcagtgggacaatctcagctcactgcaagctccgccgcctgggttcacgccattctcctgcctcagcctccccagcagctgggactacaggcacacgccgccacgcccggctaatttttgtgtttttagtagagatggggtttatctgtgttggccaggatagtctcgatctcctggtctcgtgatccccctgccttggcctcccaaagtgttgggattacaggcgtgagccactgcgcccggccggaaaatttttttaatgtagtgaaatatgtctaccatttcctacccaatttttttgaatccccaagcaaaatcttactgagaaagcatctattactttttattaaactgttccatgttaggtagagaggagaagatgcatgtatgtatttggaataaattctgcttctgaaaacacctatc

SEQ ID NO: 331699 - DNA, 875 bp, Homo sapiens
ttccggtagtgagaacccttccggtgggctaggtactgagcgcgcgaggtgaggagttgtgcagggtttggggaaaggaaggctggcttggcgagagggcaggtttgcgggctttcgcccccttttccaaagaccaacaaagagtccttccccaactcccaactcaaccccttttggaactatgtgtggtggttgggaccctgtggcgcatccttgtcgctcgtgtccttctcatgcccggcgacgcgtctttgtggtaacgccctgctgccatctcttttcttctctatgcgaggatttggactggcagtgagaataagagacaacgattcacgtctactttctaggatgacttccatgtgctccatctcgcgcgtccctgagcatgttgaatttccaaatcctaaataagccgcgcggtgtagtttgtattatgttgcgtttctctttctgctttcctcgccctttctccatcatcctttaggctctacagagtgaaggtttaaatccaaggtcatggcaaaacatctgaaaatcctcactatggatgggctcattgaggacattaagcatcggcggtattatgagaagccatgccgccggcgacagagggaaagctatgaaaggtgccggcggatctacaacatggaaatggctcgcaagatcaacttcttgatgcgaaagaatcgggcagatccgtggcagggctgctgaggcctgtgggtgggacacccagtgcgaaaccctcatccagttttctctccatctcttttctttgtacaatcccatttcctattaccattctctgcaataaactcaaatcacataaaaaaaaaaaaaaaaaaaaaaaaaaaaaaggggggggggccgggccc

SEQ ID NO: 331700 - DNA, 557 bp, Homo sapiens
ttccggtagtgagaacccttccggtgggctaggtactgagcgcgcgaggtgaggagttgtgcagggtttggggaaaggaaggctggcttggcgagagggcaggtttgcgggctttcgcccccttttccaaagaccaacaaagagtccttccccaactcccaactcaaccccttttggaactatgtgtggtggttgggaccctgtggcgcatccttgtcgctcgtgtccttctcatgcccggctaatttttgtgtttttagtagagatggggtttatctgtgttggccaggatagtctcgatctcctggtctcgtgatccccctgccttggcctcccaaagtgttgggattacaggcgtgagccactgcgcccggccggaaaatttttttaatgtagtgaaatatgtctaccatttcctacccaatttttttgaatccccaagcaaaatcttactgagaaagcatctattactttttattaaactgttccatgttaggtagagaggagaagatgcatgtatgtatttggaataaattctgcttctgaaaacacctatc

SEQ ID NO: 331701 - DNA, 364 bp, Homo sapiens
ctcgccctccatctccacgataacgggggggaacggctgtctgcagagactctcttattatccccgctacaatcctcactatggatgggctcattgaggacattaagcatcggcggtattatgagaagccatgccgccggcgacagagggaaagctatgaaaggtgccggcggatctacaacatggaaatggctcgcaagatcaacttcttgatgcgaaagaatcgggcagatccgtggcagggctgctgaggcctgtgggtgggacacccagtgcgaaaccctcatccagttttctctccatctcttttctttgtacaatcccatttcctattaccattctctgcaataaactcaaatcacat

SEQ ID NO: 331702 - DNA, 2029 bp, Homo sapiens
ttccggtagtgagaacccttccggtgggctaggtactgagcgcgcgaggtgaggagttgtgcagggtttggggaaaggaaggctggcttggcgagagggcaggtttgcgggctttcgcccccttttccaaagaccaacaaagagtccttccccaactcccaactcaaccccttttggaactatgtgtggtggttgggaccctgtggcgcatccttgtcgctcgtgtccttctcatgcccggcgacgcgtctttgtggtaacgccctgctgccatctcttttcttctctatgcgaggatttggactggcagtgagaataagagacaacgattcacgtctactttctaggatgacttccatgtgctccatctcgcgcgtccctgagcatgttgaatttccaaatcctaaataagccgcgcggtgtagtttgtattatgttgcgtttctctttctgctttcctcgccctttctccatcatcctttaggctctacagagtgaaggtttaaatccaaggtcatggcaaaacatctgaagttcatcgccaggactgtgatggtacaggaagggaacgtggaaagcgcatacaggaccctaaacagaatcctcactatggatgggctcattgaggacattaagcatcggcggtattatgagaagccatgccgccggcgacagagggaaagctatgaaaggtgccggcggatctacaacatggaaatggctcgcaagatcaacttcttgatgcgaaagaatcgggcagatccgtggcagggctgctgaggcctgtgggtgggacacccagtgcgaaaccctcatccagttttctctccatctcttttctttgtacaatcccatttcctattaccattctctgcaataaactcaaatcacatgtctgcaagaaggcctccaaatatagaaacaatcccattagtcagcagtggaccctgtcttttattaagtgaaagaagaaactgagtctgaaagtactctaggagtagaatggtatttgccagggactggaggagggggcagtgaggagttattgtttaatgggtacagagtttcagtttgggcagatgaaaaagttcaggagacgatggcctggcatggtggctcacgcctgttatcccaacactttgggaggctgaggcgggcggatcacttgaggccaggagtttgagaccagcttggccaatgtggtgaaaccccatctctactaaaaatacaaaaaaaaaattggccgggcgtggtggtgcacgcctgtaatcccagatacttgggtggctgaggcaggagaattgcttgaactggggaggcagaggttgcagtgagccaagatcatgccactgcactccaacctgggcgacagagtgagactccatctcaaaacaaaaaaacggagatggatgatgaatggtgatggcggttgctcaaaaagttgaatgtacttaatgccactgaactatacccttaaatggtcacgatggtaaattttgtgttttactacaataaaaacttttttgaaagtccaggagaagtaaggaattttttttttcttttttttaagaggaagtctcgctcttgttgcccaggctggagggcagtgggacaatctcagctcactgcaagctccgccgcctgggttcacgccattctcctgcctcagcctccccagcagctgggactacaggcacacgccgccacgcccggctaatttttgtgtttttagtagagatggggtttatctgtgttggccaggatagtctcgatctcctggtctcgtgatccccctgccttggcctcccaaagtgttgggattacaggcgtgagccactgcgcccggccggaaaatttttttaatgtagtgaaatatgtctaccatttcctacccaatttttttgaatccccaagcaaaatcttactgagaaagcatctattactttttattaaactgttccatgttaggtagagaggagaagatgcatgtatgtatttggaataaattctgcttctgaaaacacctatc

SEQ ID NO: 331703 - DNA, 684 bp, Homo sapiens
ttccggtagtgagaacccttccggtgggctaggtactgagcgcgcgagtacagagtgaaggtttaaatccaaggtcatggcaaaacatctgaagttcatcgccaggactgtgatggtacaggaagggaacgtggaaagcgcatacaggaccctaaacagaatcctcactatggatgggctcattgaggacattaagcatcggcggtattatgagaagccatgccgccggcgacagagggaaagctatgaaaggtgccggcggatctacaacatggaaatggctcgcaagatcaacttcttgatgcgaaagaatcgggcagatccgtggcagggctgctgaggcctgtgggtgggacacccagtgcgaaaccctcatccagttttctctccatctcttttctttgtacaatcccatttcctattaccattctctgcaataaactcaaatcacataaaaaaaaaaaaacgaacaacaccaaaaaaaccacaccaacacccaacacaaaccgaaccaacacgccagccccaccccaacaaaaactttgttgcccccttggtcaccatcgcttttaaacttggggcagttcttttactggtgccccaattcgggctatcttggcaatttgcctactggggtgctcgcttcaatttacttggcgggcctcttacaacctccgctttgca

SEQ ID NO: 331704 - DNA, 785 bp, Homo sapiens
ttaaagatgaaacatgtatgataggatggattctttctgtattctgagagtgtacagtacaggattattataatgaaagtttatatcaacagggtttcgttggctctgccatatattataagcaaaagagattggtaaagtgccacagtattccagataacttttcagttgcggcctttcttctcgttctttaatttgaaacctagatacatgcagtaaaaactaggagaatgacttttacccttggggacagccaagttttgttgataaacctatttcctagcatgccttcaggaagttgtgccagaccctagattgtgaaggacccactgttcttctgttgtacgagctccctgaaccattgttcagaggaccaatgtcacatcgcttcatgggcatggcccatggagcatctgggtgatatctgtctacagtattggctcttctgcgaggctgatacacaaggcctctcttccacatgatcatttgcaaacctcccccagcccctaccatccaatgtggaaggaaaacaagaactgcctgaagaagagtccaagctacagatacacagcgtgtgcattgcggctgtcaccttcctcctcccacttctgtatcctcagagatgctgcgtggatgtttccttaacctcagctgacttccctgtgaatgtctaatgctagttcagggcctccaggcattgatttgtacagtggtaactcccaatgaggcttctgttatcatttggtgtgctttctctgtcattaaaagaaatgattttcccaggc

SEQ ID NO: 331705 - DNA, 1603 bp, Homo sapiens
agttcgccgcttgcaccgggaccgatgccatctgagacgcacgcgatgctggcgacgctggcgagggtggcagctctgcgcagaacctgcctcttctccggccggggcggcgggagggggctgtggactggccgcccgcagtcagatatgaacaatataaagccattggaaggggtaaaaattctggatctaacaagagtcctggcgggaccttttgctactatgaatttaggagatcttggagcagaagttataaaagtggagagaccaggagctggtgatgatacacgaacttgggggccaccttttgttgggacagaaagtacatattatctcagtgttaaccgaaataaaaaaagtattgctgttaatatcaaggatccaaaaggggtgaaaatcatcaaagagggtatggtcagacaggtccaatttctcagcgagctggttatgatgctgttgcctcggctgtttctggtctgatgcacatcacagggcctgagaatggagatccagttcgcccaggagtagctatgactgatcttgccactggcctatatgcatatggagctattatggctggattgatacaaaaatacaaaactgggaaaggactgttcattgattgtaacctactgtcatcccaggtggcgtgtttgtctcacatagctgcaaattatcttattggtcaaaaggaagcaaaacgttggggtacagctcatggcagtatcgttccttaccaggcttttaaaaccaaggatggctatattgtagttggagcaggaaataaccagcagtttgccaccgtctgcaagatcttggatttgcctgagttgattgataattccaagtataaaactaaccaccttcgggtacacaatagaaaagagcttattaaaatattatctgaacggtttgaagaagaactgaccagcaagtggttatatctttttgaaggcagtggagtcccgtatggcccaatcaacaacatgaagaatgtatttgcagaacctcagaacgctgtctctggcttccaaagcctgctgcattccttggcccatggccccttccttcatcttcaaggatcagcaagggtattacacaatggcctcgttatggagatggagcatccaactgtggggaagatttccgtcccaggcccagctgtgagatacagtaagttcaagatgtcagaggccaggccgccccccctgctcgggcagcacacaacgcacatcctgaaggaggtcctgagatacgatgacagggccatcggggagctgctcagcgctggagtggtggaccaacatgaaactcactgacaaaggaaaagggctcttcctcataacctcgatccgaatacactggcaaaggcaacactttgcttggacccttctccccagttctgataccactaaaaagaagatttagagtaactccagatttcttacatggcatctccagaatggctctggtattaatgaatctagtgccttttaaatgtatcccacgttttgttccctaccatcttttttttcagatgatgatttcattatggatttgtgggatttttaaaaataaagttttaatttttttcctggaaaaa

SEQ ID NO: 331706 - DNA, 1083 bp, Homo sapiens
  misc_feature (1)..(1): n is a, c, g, or t
  misc_feature (16)..(16): n is a, c, g, or t
  misc_feature (19)..(19): n is a, c, g, or t
  misc_feature (21)..(21): n is a, c, g, or t
ncccaatttcgccacngtngncaaatcttggatttgcctgagttgattgataattccaagtataaaactaaccaccttcgggtacacaatagaaaagagcttattaaaatattatctgaacggtttgaagaagaactgaccagcaagtggttatatctttttgaaggcagtggagtcccgtatggcccaatcaacaacatgaagaatgtatttgcagaacctcaggtattacacaatggcctcgttatggagatggagcatccaactgtggggaagatttccgtcccaggcccagctgtgagatacagtaagttcaagatgtcagaggccaggccgccccccctgctcgggcagcacacaacgcacatcctgaaggaggtcctgagatacgatgacagggccatcggggagctgctcagcgctggagtggtggaccaacatgaaactcactgacaaaggaaaagggctcttcctcataacctcgatccgaatacactggcaaaggcaacactttgcttggacccttctccccagttctgataccactaaaaagaagatttagagtaactccagatttcttacatggcatctccagaatggctctggtattaatgaatctagtgccttttaaatgtatcccacgttttgttccctaccatcttttttttcagatgatgatttcattatggatttgtgggatttttaaaaataaagttttaatttttttcctggaaaaaaaaaataaaactacatttttttatccttataattcaattatcggctcgacttgctatctaagtattatatccccacatttcacaaacaccacgacctaaagcggtggagttctctgaagctgcaagcaataaaagtctcccgcgcgaaaccctttcgcacgcgcaacaagtcctgctgaaaacgatgagcctatatagataggggggcagcaacaacacacccaaccctctccttataccctctccacaccggacagacacacggtacacactctacttgaacacccacccaggcacgccccaacacccctcctcccacttatcactcaacagacccacacctaca

SEQ ID NO: 331707 - DNA, 562 bp, Homo sapiens
caaagtcttgaggcccggggaaagcagcaacagttcttattgctaaactgcccaagcggaacggcctgtggaatccaaggcaaatgatagctgtaggtttccaagggacaccttcctcaaatggacaatattggaaccttattacatatagagcaagtgtggccactgtgacccatttgaagtcaaaatcatcaggagtgccctgacctggtaaaccgaatcgctaaatgcataccccgtttccgcaatataaaaatgtggggttccacgcaacctggttttcacttgagcttctggcacattggtatgtaaagcaaaccctgtcacatgcggcccttaggttgagcccagccagcccttgaatagttcatggcctgtccttaatagagattcactcctttccgggggaggagggcaggtacctgcacaccaacacactcctgtggataaggaaagacaatcgcttcgttttgttccctaccatcttttttttcagatgatgatttcattatggatttgtgggatttttaaaaataaagttttaatttttttcctggaaaaa

SEQ ID NO: 331708 - DNA, 1277 bp, Homo sapiens
gcacgagacagaaagtacatattatctcagtgttaaccgaaataaaaaaagtattgctgttaatatcaaggatccacaaggtgtgtcatcgagcttgcagctgtttgtgatgtgtttgtggacgagattgctcctcacatcatctattgttccatcacagggtatggtcagacaggtccaatttctcagcgagctggttatgatgctgttgcctcggctgtttctggtctgatgcacatcacagggcctgagaatggagatccagttcgcccaggagtagctatgactgatcttgccactggcctatatgcatatggagctattatggctggattgatacaaaaatacaaaactgggaaaggactgttcattgattgtaacctactgtcatcccaggtggcgtgtttgtctcacatagctgcaaattatcttattggtcaaaaggaagcaaaacgttggggtacagctcatggcagtatcgttccttaccaggcttttaaaaccaaggatggctatattgtagttggagcaggaaataaccagcagtttgccaccgtctgcaagatcttggatttgcctgagttgattgataattccaagtataaaactaaccaccttcgggtacacaatagaaaagagcttattaaaatattatctgaacggtttgaagaagaactgaccagcaagtggttatatctttttgaaggcagtggagtcccgtatggcccaatcaacaacatgaagaatgtatttgcagaacctcaggtattacacaatggcctcgttatggagatggagcatccaactgtggggaagatttccgtcccaggcccagctgtgagatacagtaagttcaagatgtcagaggccaggccgccccccctgctcgggcagcacacaacgcacatcctgaaggaggtcctgagatacgatgacagggccatcggggagctgctcagcgctggagtggtggaccaacatgaaactcactgacaaaggaaaagggctcttcctcataacctcgatccgaatacactggcaaaggcaacactttgcttggacccttctccccagttctgataccactaaaaagaagatttagagtaactccagatttcttacatggcatctccagaatggctctggtattaatgaatctagtgccttttaaatgtatcccacgttttgttccctaccatcttttttttcagatgatgatttcattatggatttgtgggatttttaaaaataaagttttaatttttttcctggaaaaa

SEQ ID NO: 331709 - DNA, 712 bp, Homo sapiens
aaggaaagcacaagagcaggtgagggcagccaagagacttggcagtggatttcaggcctgagaaagctgcttaatttcaaggataacctgaaggactctgcccttgagactggcccctggcctcacctgaagacagaggccatcagacatcccagcagcggaagcctggacagtctgaataaatgggaatagccttctggaaaatgaagaatgcttggatttgcaagaactgtattcagccaaggctggattatctgcaaagaggcccagctgtgagatacagtaagttcaagatgtcagaggccaggccgccccccctgctcgggcagcacacaacgcacatcctgaaggaggtcctgagatacgatgacagggccatcggggagctgctcagcgctggagtggtggaccaacatgaaactcactgacaaaggaaaagggctcttcctcataacctcgatccgaatacactggcaaaggcaacactttgcttggacccttctccccagttctgataccactaaaaagaagatttagagtaactccagatttcttacatggcatctccagaatggctctggtattaatgaatctagtgccttttaaatgtatcccacgttttgttccctaccatcttttttttcagatgatgatttcattatggatttgtgggatttttaaaaataaagttttaatttttttcctggaaaaa

SEQ ID NO: 331710 - DNA, 609 bp, Homo sapiens
ctggatctctgcataggaagggtggggtagttcaggctgctgaactaaatgagtgggtgctctaaatgcctggagatttgcctgcatgtgaagcagagagggcctccctgtaccaggatctctgcacaggaaggatggggcatgtcaggctgctgatacaggcccagctgtgagatacagtaagttcaagatgtcagaggccaggccgccccccctgctcgggcagcacacaacgcacatcctgaaggaggtcctgagatacgatgacagggccatcggggagctgctcagcgctggagtggtggaccaacatgaaactcactgacaaaggaaaagggctcttcctcataacctcgatccgaatacactggcaaaggcaacactttgcttggacccttctccccagttctgataccactaaaaagaagatttagagtaactccagatttcttacatggcatctccagaatggctctggtattaatgaatctagtgccttttaaatgtatcccacgttttgttccctaccatcttttttttcagatgatgatttcattatggatttgtgggatttttaaaaataaagttttaatttttttcctggaaaaa

SEQ ID NO: 331711 - DNA, 1972 bp, Homo sapiens
agttcgccgcttgcaccgggaccgatgccatctgagacgcacgcgatgctggcgacgctggcgagggtggcagctctgcgcagaacctgcctcttctccggccggggcggcgggagggggctgtggactggccgcccgcagtcagatatgaacaatataaagccattggaaggggtaaaaattctggatctaacaagagtcctggcgggaccttttgctactatgaatttaggagatcttggagcagaagttataaaagtggagagaccaggagctggtgatgatacacgaacttgggggccaccttttgttgggacagaaagtacatattatctcagtgttaaccgaaataaaaaaagtattgctgttaatatcaaggatccaaaaggggtgaaaatcatcaaagagcttgcagctgtttgtgatgtgtttgtggaaaactatgtccctggcaaactgtctgcaatgggcctgggatatgaagatatagacgagattgctcctcacatcatctattgttccatcacagggtatggtcagacaggtccaatttctcagcgagctggttatgatgctgttgcctcggctgtttctggtctgatgcacatcacagggcctgagaatggagatccagttcgcccaggagtagctatgactgatcttgccactggcctatatgcatatggagctattatggctggattgatacaaaaatacaaaactgggaaaggactgttcattgattgtaacctactgtcatcccaggtggcgtgtttgtctcacatagctgcaaattatcttattggtcaaaaggaagcaaaacgttggggtacagctcatggcagtatcgttccttaccaggcttttaaaaccaaggatggctatattgtagttggagcaggaaataaccagcagtttgccaccgtctgcaagatcttggatttgcctgagttgattgataattccaagtataaaactaaccaccttcgggtacacaatagaaaagagcttattaaaatattatctgaacggtttgaagaagaactgaccagcaagtggttatatctttttgaaggcagtggagtcccgtatggcccaatcaacaacatgaagaatgtatttgcagaacctcaggtattacacaatggcctcgttatggagatggagcatccaactgtggggaagatttccgtcccaggcccagctgtgagatacagtaagttcaagatgtcagaggccaggccgccccccctgctcgggcagcacacaacgcacatcctgaaggaggtcctgagatacgatgacagggccatcggggagctgctcagcgctggagtggtggaccaacatgaaactcactgacaaaggaaaagggctcttcctcataacctcgatccgaatacactggcaaaggcaacactttgcttggacccttctccccagttctgataccactaaaaagaagatttagagtaactccagatttcttacatggcatctccagaatggctctggtattaatgaatctagtgccttttaaatgtatcccacgttttgttccctaccatcttttttttcagatgatgatttcattatggatttgtgggatttttaaaaataaagttttaatttttttcctggaaaaaaaaaaacaaagaaaacaaacaaccgaaaaacatcaccctaacgccccgcgcatcactaaaagtactagtccctactggcagagcaacttcccgggtggatgtatttgatagacagccctattgctttcgcggtaagcatcggaaatggagatcattcttcgaacgccgccgatattggctatccgtcaggatacgacgcagtctctcacccccttcccgtcatcacagtctaaaacctagtatatgccgcgccgcccgcacttgattgctcatccaccggcactagtctagttgtgacacataactgaaaacgaagcgatttctgt

SEQ ID NO: 331712 - DNA, 2018 bp, Homo sapiens
  misc_feature (1815)..(1815): n is a, c, g, or t
  misc_feature (1929)..(1929): n is a, c, g, or t
agttcgccgcttgcaccgggaccgatgccatctgagacgcacgcgatgctggcgacgctggcgagggtggcagctctgcgcagaacctgcctcttctccggccggggcggcgggagggggctgtggactggccgcccgcagtcagatatgaacaatataaagccattggaaggggtaaaaattctggatctaacaagagtcctggcgggaccttttgctactatgaatttaggagatcttggagcagaagttataaaagtggagagaccaggagctggtgatgatacacgaacttgggggccaccttttgttgggacagaaagtacatattatctcagtgttaaccgaaataaaaaaagtattgctgttaatatcaaggatccaaaaggggtgaaaatcatcaaagagcttgcagctgtttgtgatgtgtttgtggaaaactatgtccctggcaaactgtctgcaatgggcctgggatatgaagatatagacgagattgctcctcacatcatctattgttccatcacagggtatggtcagacaggtccaatttctcagcgagctggttatgatgctgttgcctcggctgtttctggtctgatgcacatcacagggcctgagaatggagatccagttcgcccaggagtagctatgactgatcttgccactggcctatatgcatatggagctattatggctggattgatacaaaaatacaaaactgggaaaggactgttcattgattgtaacctactgtcatcccaggtggcgtgtttgtctcacatagctgcaaattatcttattggtcaaaaggaagcaaaacgttggggtacagctcatggcagtatcgttccttaccaggcttttaaaaccaaggatggctatattgtagttggagcaggaaataaccagcagtttgccaccgtctgcaagatcttggatttgcctgagttgattgataattccaagtataaaactaaccaccttcgggtacacaatagaaaagagcttattaaaatattatctgaacggtttgaagaagaactgaccagcaagtggttatatctttttgaaggcagtggagtcccgtatggcccaatcaacaacatgaagaatgtatttgcagaacctcaggtattacacaatggcctcgttatggagatggagcatccaactgtggggaagatttccgtcccaggcccagctgtgagatacagtaagttcaagatgtcagaggccaggccgccccccctgctcgggcagcacacaacgcacatcctgaaggaggtcctgagatacgatgacagggccatcggggagctgctcagcgctggagtggtggaccaacatgaaactcactgacaaaggaaaagggctcttcctcataacctcgatccgaatacactggcaaaggcaacactttgcttggacccttctccccagttctgataccactaaaaagaagatttagagtaactccagatttcttacatggcatctccagaatggctctggtattaatgaatctagtgccttttaaatgtatcccacgttttgttccctaccatcttttttttcagatgatgatttcattatggatttgtgggatttttaaaaataaagttttaatttttttcctggaaaaaaagccccagacagggttaagcacaagatctattcacaggcaagcgtgtaaggggccgggtctgtccgagcgtccgtgtgtggctcgtccgcgaggaggggtgtccagggaggggccgttctggggggtgggttaggcagggccctgctagaggagcgtggggggtggcnccggggggtgagtaaggggtggggggtgtccgtttatactgggggtggggggggcgcgtgcggccatagcgcgcgccaaccggccacgtacggcccgagaaccagctagtgttnaggtgaggggtgtaatgatagggacttacacgccccccggtcccccgcgccccccctgtcccctgcgagcccggcagaatcagccgcac

SEQ ID NO: 331713 - DNA, 1404 bp, Homo sapiens
agttcgccgcttgcaccgggaccgatgccatctgagacgcacgcgatgctggcgacgctggcgagggtggcagctctgcgcagaacctgcctcttctccggccggggcggcgggagggggctgtggactggccgcccgcagtcagatatgaacaatataaagccattggaaggggtaaaaattctggatctaacaagagtcctggcgggaccttttgctactatgaatttaggagatcttggagcagaagttataaaagtggagagaccaggagctggtgatgatacacgaacttgggggccaccttttgttgggacagaaagtacatattatctcagtgttaaccgaaataaaaaaagtattgctgttaatatcaaggatccaaaaggggtgaaaatcatcaaagagcttgcagctgtttgtgatgtgtttgtggaaaactatgtccctggcaaactgtctgcaatgggcctgggatatgaagatatagacgagattgctcctcacatcatctattgttccatcacagggtatggtcagacaggtccaatttctcagcgagctggttatgatgctgttgcctcggctgtttctggtctgatgcacatcacagggcctgagaatggagatccagttcgcccaggagtagctatgactgatcttgccactggcctatatgcatatggagctattatggctggattgatacaaaaatacaaaactgggaaaggactgttcattgattgtaacctactgtcatcccaggtggcgtgtttgtctcacatagctgcaaattatcttattggtcaaaaggaagcaaaacgttggggtacagctcatggcagtatcgttccttaccaggcttttaaaaccaaggatggctatattgtagttggagcaggaaataaccagcagtttgccaccgtctgcaagatcttggatttgcctgagttgattgataattccaagtataaaactaaccaccttcgggtacacaatagaaaagagcttattaaaatattatctgaacggtttgaagaagaactgaccagcaagtggttatatctttttgaaggcactgctcagcgctggagtggtggaccaacatgaaactcactgacaaaggaaaagggctcttcctcataacctcgatccgaatacactggcaaaggcaacactttgcttggacccttctccccagttctgataccactaaaaagaagatttagagtaactccagatttcttacatggcatctccagaatggctctggtattaatgaatctagtgccttttaaatgtatcccacgttttgttccctaccatcttttttttcagatgatgatttcattatggatttgtgggatttttaaaaataaagttttaatttttttcctggaaaaa

SEQ ID NO: 331714 - DNA, 986 bp, Homo sapiens
  misc_feature (865)..(866): n is a, c, g, or t
  misc_feature (885)..(885): n is a, c, g, or t
agttcgccgcttgcaccgggaccgatgccatctgagacgcacgcgatgctggcgacgctggcgagggtggcagctctgcgcagaacctgcctcttctccggccggggcggcgggagggggctgtggactggccgcccgcagtcagatatgaacaatataaagccattggaaggggtaaaaattctggatctaacaagagtcctggcgggaccttttgctactatgaatttaggagatcttggagcagaagttataaaagtggagagaccaggagctggtgatgatacacgaacttgggggccaccttttgttgggacagaaagtacatattatctcagtgttaaccgaaataaaaaaagtattgctgttaatatcaaggatccaaaaggggtgaaaatcatcaaagagcttgcagctgtttgtgatgtgtttgtggaaaactatgtccctggcaaactgtctgcaatgggcctgggatatgaagatatagacgagattgctcctcacatcatctattgttccatcacagggtatggtcagacaggtccaatttctcagcgagctggttatgatgctgttgcctcggctgtttctggtctgatgcacatcacagggcctgagaatggagatccagttcgcccaggagtagctatgactgatcttgccactggcctatatgcatatggagctattatggctggattgatacaaaaatacaaaactgggaaaggactgttcattgattgtaacctactgtcatcccaggtggcgtgtttgtctcacatagctgcaaattatcttattggtcaaaaggaagcaaaacgttggggtacagctcatggcagtatcgttccttaccagcttnntaaacccaggatggctatnattgaagtggagcaggtaccacagagttgccaaccgttgcaagatcttgaattggcctgagtgaatgataattccgtttctaccacccttcgggacccctt

SEQ ID NO: 331715 - DNA, 406 bp, Homo sapiens
gcctggagatgtgcctgagtgtggagcagagaaggtctccctacaccaagttctctgctcgggaggggcaggatgactaaggcaagcatcctggagatttgcctgggcatggagcagaaagggcctctctgcatctggatctctgcataggaagggtggggtagttcaggctgctgaactaaatgagtgggtgctctaaatgcctggagatttgcctgcatgtgaagcagagagggcctccctgtaccaggatctctgcacaggaaggatggggcatgtcaggctgctgatacaggtgagtgggtgctctgaatgcctggatgtctgcctgtgaatggagcggcaagagctctgctgtaccacagtctatgcccaggaagggtggtgcggctcaggctgcgaaacc

SEQ ID NO: 331716 - DNA, 493 bp, Homo sapiens
tcttgctgttgagaagtcagcgttctaactgttgttacttcataggcccagctgtgagatacagtaagttcaagatgtcagaggccaggccgccccccctgctcgggcagcacacaacgcacatcctgaaggaggtcctgagatacgatgacagggccatcggggagctgctcagcgctggagtggtggaccaacatgaaactcactgacaaaggaaaagggctcttcctcataacctcgatccgaatacactggcaaaggcaacactttgcttggacccttctccccagttctgataccactaaaaagaagatttagagtaactccagatttcttacatggcatctccagaatggctctggtattaatgaatctagtgccttttaaatgtatcccacgttttgttccctaccatcttttttttcagatgatgatttcattatggatttgtgggatttttaaaaataaagttttaatttttttcctggaaaaa

SEQ ID NO: 331717 - DNA, 1646 bp, Homo sapiens
agttcgccgcttgcaccgggaccgatgccatctgagacgcacgcgatgctggcgacgctggcgagggtggcagctctgcgcagaacctgcctcttctccggccggggcggcgggagggggctgtggactggccgcccgcagtcagatatgaacaatataaagccattggaaggggtaaaaattctggatctaacaagagtcctggcgggaccttttgctactatgaatttaggagatcttggagcagaagttataaaagtggagagaccaggagctggtgatgatacacgaacttgggggccaccttttgttgggacagaaagtacatattatctcagtgttaaccgaaataaaaaaagtattgctgttaatatcaaggatccaaaaggggtgaaaatcatcaaagagcttgcagctgtttgtgatgtgtttgtggaaaactatgtccctggcaaactgtctgcaatgggcctgggatatgaagatatagacgagattgctcctcacatcatctattgttccatcacagggtatggtcagacaggtccaatttctcagcgagctggttatgatgctgttgcctcggctgtttctggtctgatgcacatcacagggcctgagaatggagatccagttcgcccaggagtagctatgactgatcttgccactggcctatatgcatatggagctattatggctggattgatacaaaaatacaaaactgggaaaggactgttcattgattgtaacctactgtcatcccaggtggcgtgtttgtctcacatagctgcaaattatcttattggtcaaaaggaagcaaaacgttggggtacagctcatggcagtatcgttccttaccaggcttttaaaaccaaggatggctatattgtagttggagcaggaaataaccagcagtttgccaccgtctgcaagatcttggatttgcctgagttgattgataattccaagtataaaactaaccaccttcgggtacacaatagaaaagagcttattaaaatattatctgaacggtttgaagaagaactgaccagcaagtggttatatctttttgaaggcagtggagtcccgtatggcccaatcaacaacatgaagaatgtatttgcagaacctcaggtattacacaatggcctcgttatggagatggagcatccaactgtggggaagatttccgtcccaggcccagctgtgagatacagtaagttcaagatgtcagaggccaggccgccccccctgctcgggcagcacacaacgcacatcctgaaggaggtcctgagatacgatgacagggccatcggggagctgctcagcgctggagtggtggaccaacatgaaactcactgacaaaggaaaagggctcttcctcataacctcgatccgaatacactggcaaaggcaacactttgcttggacccttctccccagttctgataccactaaaaagaagatttagagtaactccagatttcttacatggcatctccagaatggctctggtattaatgaatctagtgccttttaaatgtatcccacgttttgttccctaccatcttttttttcagatgatgatttcattatggatttgtgggatttttaaaaataaagttttaatttttttcctggaaaaa

SEQ ID NO: 331718 - DNA, 1580 bp, Homo sapiens
agttcgccgcttgcaccgggaccgatgccatctgagacgcacgcgatgctggcgacgctggcgagggtggcagctctgcgcagaacctgcctcttctccggccggggcggcgggagggggctgtggactggccgcccgcagtcagatatgaacaatataaagccattggaaggggtaaaaattctggatctaacaagagtcctggcgggaccttttgctactatgaatttaggagatcttggagcagaagttataaaagtggagagaccaggagctggtgatgatacacgaacttgggggccaccttttgttgggacagaaagtacatattatctcagtgttaaccgaaataaaaaaagtattgctgttaatatcaaggatccaaaaggggtgaaaatcatcaaagagcttgcagctgtttgtgatgtgtttgtggaaaactatgtccctggcaaactgtctgcaatgggcctgggatatgaagatatagacgagattgctcctcacatcatctattgttccatcacagggtatggtcagacaggtccaatttctcagcgagctggttatgatgctgttgcctcggctgtttctggtctgatgcacatcacagggcctgaggtggcgtgtttgtctcacatagctgcaaattatcttattggtcaaaaggaagcaaaacgttggggtacagctcatggcagtatcgttccttaccaggcttttaaaaccaaggatggctatattgtagttggagcaggaaataaccagcagtttgccaccgtctgcaagatcttggatttgcctgagttgattgataattccaagtataaaactaaccaccttcgggtacacaatagaaaagagcttattaaaatattatctgaacggtttgaagaagaactgaccagcaagtggttatatctttttgaaggcagtggagtcccgtatggcccaatcaacaacatgaagaatgtatttgcagaacctcagaacgctgtctctggcttccaaagcctgctgcattccttggcccatggccccttccttcatcttcaaggatcagcaagggtattacacaatggcctcgttatggagatggagcatccaactgtggggaagatttccgtcccaggcccagctgtgagatacagtaagttcaagatgtcagaggccaggccgccccccctgctcgggcagcacacaacgcacatcctgaaggaggtcctgagatacgatgacagggccatcggggagctgctcagcgctggagtggtggaccaacatgaaactcactgacaaaggaaaagggctcttcctcataacctcgatccgaatacactggcaaaggcaacactttgcttggacccttctccccagttctgataccactaaaaagaagatttagagtaactccagatttcttacatggcatctccagaatggctctggtattaatgaatctagtgccttttaaatgtatcccacgttttgttccctaccatcttttttttcagatgatgatttcattatggatttgtgggatttttaaaaataaagttttaatttttttcctggaaaaa

SEQ ID NO: 331719 - DNA, 1992 bp, Homo sapiens
agttcgccgcttgcaccgggaccgatgccatctgagacgcacgcgatgctggcgacgctggcgagggtggcagctctgcgcagaacctgcctcttctccggccggggcggcgggagggggctgtggactggccgcccgcagtcagatatgaacaatataaagccattggaaggggtaaaaattctggatctaacaagagtcctggcgggaccttttgctactatgaatttaggagatcttggagcagaagttataaaagtggagagaccaggagctggtgatgatacacgaacttgggggccaccttttgttgggacagaaagtacatattatctcagtgttaaccgaaataaaaaaagtattgctgttaatatcaaggatccaaaaggggtgaaaatcatcaaagagcttgcagctgtttgtgatgtgtttgtggaaaactatgtccctggcaaactgtctgcaatgggcctgggatatgaagatatagacgagattgctcctcacatcatctattgttccatcacagggtatggtcagacaggtccaatttctcagcgagctggttatgatgctgttgcctcggctgtttctggtctgatgcacatcacagggcctgagaatggagatccagttcgcccaggagtagctatgactgatcttgccactggcctatatgcatatggagctattatggctggattgatacaaaaatacaaaactgggaaaggactgttcattgattgtaacctactgtcatcccaggtggcgtgtttgtctcacatagctgcaaattatcttattggtcaaaaggaagcaaaacgttggggtacagctcatggcagtatcgttccttaccaggcttttaaaaccaaggatggctatattgtagttggagcaggaaataaccagcagtttgccaccgtctgcaagatcttggatttgcctgagttgattgataattccaagtataaaactaaccaccttcgggtacacaatagaaaagagcttattaaaatattatctgaacggtttgaagaagaactgaccagcaagtggttatatctttttgaaggcagtggagtcccgtatggcccaatcaacaacatgaagaatgtatttgcagaacctcaggtattacacaatggcctcgttatggagatggagcatccaactgtggggaagatttccgtcccaggcccagctgtgagatacagtaagttcaagatgtcagaggccaggccgccccccctgctcgggcagcacacaacgcacatcctgaaggaggtcctgagatacgatgacagggccatcggggagctgctcagcgctggagtggtggaccaacatgaaactcactgacaaaggaaaagggctcttcctcataacctcgatccgaatacactggcaaaggcaacactttgcttggacccttctccccagttctgataccactaaaaagaagatttagagtaactccagatttcttacatggcatctccagaatggctctggtattaatgaatctagtgccttttaaatgtatcccacgttttgttccctaccatcttttttttcagatgatgatttcattatggatttgtgggatttttaaaaataaagttttaatttttttcctggaaaaaaaaaataaaactacatttttttatccttataattcaattatcggctcgacttgctatctaagtattatatccccacatttcacaaacaccacgacctaaagcggtggagttctctgaagctgcaagcaataaaagtctcccgcgcgaaaccctttcgcacgcgcaacaagtcctgctgaaaacgatgagcctatatagataggggggcagcaacaacacacccaaccctctccttataccctctccacaccggacagacacacggtacacactctacttgaacacccacccaggcacgccccaacacccctcctcccacttatcactcaacagacccacacctaca

SEQ ID NO: 331720 - DNA, 1120 bp, Homo sapiens
agttcgccgcttgcaccgggaccgatgccatctgagacgcacgcgatgctggcgacgctggcgagggtggcagctctgcgcagaacctgcctcttctccggccggggcggcgggagggggctgtggactggccgcccgcagtcagatatgaacaatataaagccattggaaggggtaaaaattctggatctaacaagagtcctggcgggaccttttgctactatgaatttaggagatcttggagcagaagttataaaagtggagagaccaggagctggtgatgatacacgaacttgggggccaccttttgttgggacagaaagtacatattatctcagtgttaaccgaaataaaaaaagtattgctgttaatatcaaggatccaaaaggggtgaaaatcatcaaagagcttgcagctgtttgtgatgtgtttgtggaaaactatgtccctggcaaactgtctgcaatgggcctgggatatgaagatatagacgagattgctcctcacatcatctattgttccatcacagggtatggtcagacaggtccaatttctcagcgagctggttatgatgctgttgcctcggctgtttctggtctgatgcacatcacagggcctgagaatggagatccagttcgcccaggagtagctatgactgatcttgccactggcctatatgcatatggagctattatggctggattgatacaaaaatacaaaactgggaaaggactgttcattgattgtaacctactgtcatcccaggtggcgtgtttgtctcacatagctgcaaattatcttattggtcaaaaggaagcaaaacgttggggtacagctcatggcagtatcgttccttaccagatgaggaagagagtttgttacttccctgaggaaacacagcctgtaagcggatgagttggaatcggatgcaagtttggaaggaagtatcctctccccaaatgtggggcagagagacgcttgggctgacctaattgttaaagcctcagtcagtgttatgctgaatttgtcgcttacatgtctgcacattactttcaattgaaagtagaaaaatgaaatagagatctaataaacattaccacaatgttaagactgaaaaaat

SEQ ID NO: 331721 - DNA, 447 bp, Homo sapiens
ggtaaccggtccgaaattcccgggtcgactattataactaaattcgcgcccgcgtcgacatctttatatgtatagaagtactctattaatgggctcagagatgttggggataaagtatactgtaataatttatctgtttgaaaattactataaaacggtgttttctgatcggtttttgtttcctgcttaccatatgattgtaaattgttttatgtattaatcagttaatgctaattatttttgctgatgtcatatgttaaagagctataaattccaacaaccaactggtgtgtaaaaataatttaaaatttcctttactgaaaggtatttcccatttttgtggggaaaagaagccaaatttattactttgtgttggggtttttaaaatattaagaaatgtctaagttattgtttgcaaaacaataaatatgattttaaattctctta

SEQ ID NO: 331722 - DNA, 1356 bp, Homo sapiens
acaagttagcaaccgaaggcgtccttagcagcagtggccgctgagatgtacgaacttccggttctccgggcagctgccactgctgtagcttctgccacctgccacgaccgggcctctccctggcgtttggtcacctctgcttcattctccaccgcgcctatggtccctcttggagccagcgtggcgggcctggcggctcccgggtggtgagagagcggtccgggaacgatgaaggcctcgcagtgctgctgctgtctcagccacctcttggcttccgtcctcctcctgctgttgctgcctgaactaagcgggcccctggcagtcctgctgcaggcagccgaggccgcgccaggtcttgggcctcctgaccctagaccacggacattaccgccgctgccaccgggccctacccctgcccagcagccgggccgtggtctggctgaagctgcggggccgcggggctccgagggaggcaatggcagcaaccctgtggccgggcttgagacggacgatcacggagggaaggccggggaaggctcggtgggtggcggccttgctgtgagccccaaccctggcgacaagcccatgacccagcgggccctgaccgtgttgatggtggtgagcggcgcggtgctggtgtacttcgtggtcaggacggtcaggatgagaagaagaaaccgaaagactaggagatatggagttttggacactaacatagaaaatatggaattgacacctttagaacaggatgatgaggatgatgacaacacgttgtttgatgccaatcatcctcgaagataagaatgtgccttttgatgaaagaactttatctttctacaatgaagagtggaatttctatgtttaaggaataagaagccactatatcaatgttgggggggtatttaagttacatatattttaacaacctttaatttgctgttgcaataaataccgtatccttttattatatctttatatgtatagaagtactctattaatgggctcagagatgttggggataaagtatactgtaataatttatctgtttgaaaattactataaaacggtgttttctgatcggtttttgtttcctgcttaccatatgattgtaaattgttttatgtattaatcagttaatgctaattatttttgctgatgtcatatgttaaagagctataaattccaacaaccaactggtgtgtaaaaataatttaaaatttcctttactgaaaggtatttcccatttttgtggggaaaagaagccaaatttattactttgtgttggggtttttaaaatattaagaaatgtctaagttattgtttgcaaaacaataaatatgattttaaattctctta

SEQ ID NO: 331723 - DNA, 1424 bp, Homo sapiens
acaagttagcaaccgaaggcgtccttagcagcagtggccgctgagatgtacgaacttccggttctccgggcagctgccactgctgtagcttctgccacctgccacgaccgggcctctccctggcgtttggtcacctctgcttcattctccaccgcgcctatggtccctcttggagccagcgtggcgggcctggcggctcccgggtggtgagagagcggtccgggaacgatgaaggcctcgcagtgctgctgctgtctcagccacctcttggcttccgtcctcctcctgctgttgctgcctgaactaagcgggcccctggcagtcctgctgcaggcagccgaggccgcgccaggtcttgggcctcctgaccctagaccacggacattaccgccgctgccaccgggccctacccctgcccagcagccgggccgtggtctggctgaagctgcggggccgcggggctccgagggaggcaatggcagcaaccctgtggccgggcttgagacggacgatcacggagggaaggccggggaaggctcggtgggtggcggccttgctgtgagccccaaccctggcgacaagcccatgacccagcgggccctgaccgtgttgatggtggtgagcggcgcggtgctggtgtacttcgtggtcaggacggtcaggatgagaagaagaaaccgaaagactaggagatatggagttttggacactaacatagaaaatatggaattgacacctttagaacaggatgatgaggatgatgacaacacgttgtttgatgccaatcatcctcgaagataagaatgtgccttttgatgaaagaactttatctttctacaatgaagagtggaatttctatgtttaaggaataagaagccactatatcaatgttgggggggtatttaagttacatatattttaacaacctttaatttgctgttgcaataaataccgtatccttttattatatctttatatgtatagaagtactctattaatgggctcagagatgttggggataaagtatactgtaataatttatctgtttgaaaattactataaaacggtgttttctgatcggtttttgtttcctgcttaccatatgattgtaaattgttttatgtattaatcagttaatgctaattatttttgctgatgtcatatgttaaagagctataaattccaacaaccctgggggtgaagggggagggttgagcgaaggtaggcgcgtccggggtgggatgtcggcgtttttttataggcgcccttgagtggggcgggtttttcttttggggggggtgtattgaatcttcggcaataataggcgcggcgggggggttggttgggcgaggggggcgcgctttcccaaaaggggggtgcttgcgtttcccaaaattggggggttttggtgagagtttggggat

SEQ ID NO: 331724 - DNA, 1413 bp, Homo sapiens
acaagttagcaaccgaaggcgtccttagcagcagtggccgctgagatgtacgaacttccggttctccgggcagctgccactgctgtagcttctgccacctgccacgaccgggcctctccctggcgtttggtcacctctgcttcattctccaccgcgcctatggtccctcttggagccagcgtggcgggcctggcggctcccgggtggtgagagagcggtccgggaacgatgaaggcctcgcagtgctgctgctgtctcagccacctcttggcttccgtcctcctcctgctgttgctgcctgaactaagcgggcccctggcagtcctgctgcaggcagccgaggccgcgccaggtcttgggcctcctgaccctagaccacggacattaccgccgctgccaccgggccctacccctgcccagcagccgggccgtggtctggctgaagctgcggggccgcggggctccgagggaggcaatggcagcaaccctgtggccgggcttgagacggacgatcacggagggaaggccggggaaggctcggtgggtggcggccttgctgtgagccccaaccctggcgacaagcccatgacccagcgggccctgaccgtgttgatggtggtgagcggcgcggtgctggtgtacttcgtggtcaggacggtcaggatgagaagaagaaaccgaaagactaggagatatggagttttggacactaacatagaaaatatggaattgacacctttagaacaggatgatgaggatgatgacaacacgttgtttgatgccaatcatcctcgaagataagaatgtgccttttgatgaaagaactttatctttctacaatgaagagtggaatttctatgtttaaggaataagaagccactatatcaatgttgggggggtatttaagttacatatattttaacaacctttaatttgctgttgcaataaataccgtatccttttattatatctttatatgtatagaagtactctattaatgggctcagagatgttggggataaagtatactgtaataatttatctgtttgaaaattactataaaacggtgttttctgatcggtttttgtttcctgcttaccatatgattgtaaattgttttatgtattaatcagttaatgctaattatttttgctgatgtcatatgttaaagagctataaattccaacaaccaactggtgtgtaaaaataatttaaaatttcctttactgaaaggtatttcccatttttgtggggaaaagaagccaaatttattactttgtgttggggtttttaaaatattaagaaatgtctaagttattgtttgcaaaacaataaatatgattttaaattctcttaaagtggtccaaattatgtgtttataaaataaacataagactatagaattaaaaatta

SEQ ID NO: 331725 - DNA, 1309 bp, Homo sapiens
ggctggtaccggcccggagagtagggctgccactgctgtagcttctgccacctgccacgaccgggcctctccctggcgtttggtcacctctgcttcattctccaccgcgcctatggtccctcttggagccagcgtggcgggcctggcggctcccgggtggtgagagagcggtccgggaacgatgaaggcctcgcagtgctgctgctgtctcagccacctcttggcttccgtcctcctcctgctgttgctgcctgaactaagcgggcccctggcagtcctgctgcaggcagccgaggccgcgccaggtcttgggcctcctgaccctagaccacggacattaccgccgctgccaccgggccctacccctgcccagcagccgggccgtggtctggctgaagctgcggggccgcggggctccgagggaggcaatggcagcaaccctgtggccgggcttgagacggacgatcacggagggaaggccggggaaggctcggtgggtggcggccttgctgtgagccccaaccctggcgacaagcccatgacccagcgggccctgaccgtgttgatggtggtgagcggcgcggtgctggtgtacttcgtggtcaggacggtcaggatgagaagaagaaaccgaaagactaggagatatggagttttggacactaacatagaaaatatggaattgacacctttagaacaggatgatgaggatgatgacaacacgttgtttgatgccaatcatcctcgaagataagaatgtgccttttgatgaaagaactttatctttctacaatgaagagtggaatttctatgtttaaggaataagaagccactatatcaatgttgggggggtatttaagttacatatattttaacaacctttaatttgctgttgcaataaataccgtatccttttattatatctttatatgtatagaagtactctattaatgggctcagagatgttggggataaagtatactgtaataatttatctgtttgaaaattactataaaacggtgttttctgatcggtttttgtttcctgcttaccatatgattgtaaattgttttatgtattaatcagttaatgctaattatttttgctgatgtcatatgttaaagagctataaattccaacaaccaactggtgtgtaaaaataatttaaaatttcctttactgaaaggtatttcccatttttgtggggaaaagaagccaaatttattactttgtgttggggtttttaaaatattaagaaatgtctaagttattgtttgcaaaacaataaatatgattttaaattctctta

SEQ ID NO: 331726 - DNA, 1414 bp, Homo sapiens
acaagttagcaaccgaaggcgtccttagcagcagtggccgctgagatgtacgaacttccggttctccgggcagctgccactgctgtagcttctgccacctgccacgaccgggcctctccctggcgtttggtcacctctgcttcattctccaccgcgcctatggtccctcttggagccagcgtggcgggcctggcggctcccgggtggtgagagagcggtccgggaacgatgaaggcctcgcagtgctgctgctgtctcagccacctcttggcttccgtcctcctcctgctgttgctgcctgaactaagcgggcccctggcagtcctgctgcaggcagccgaggccgcgccaggtcttgggcctcctgaccctagaccacggacattaccgccgctgccaccgggccctacccctgcccagcagccgggccgtggtctggctgaagctgcggggccgcggggctccgagggaggcaatggcagcaaccctgtggccgggcttgagacggacgatcacggagggaaggccggggaaggctcggtgggtggcggccttgctgtgagccccaaccctggcgacaagcccatgacccagcgggccctgaccgtgttgatggtggtgagcggcgcggtgctggtgtacttcgtggtcaggacggtcaggatgagaagaagaaaccgaaagactaggagatatggagttttggacactaacatagaaaatatggaattgacacctttagaacaggatgatgaggatgatgacaacacgttgtttgatgccaatcatcctcgaagactgctgtggaattcctgagaaagagcaactgagggatagcaacatggatttcactgaataagaatgtgccttttgatgaaagaactttatctttctacaatgaagagtggaatttctatgtttaaggaataagaagccactatatcaatgttgggggggtatttaagttacatatattttaacaacctttaatttgctgttgcaataaataccgtatccttttattatatctttatatgtatagaagtactctattaatgggctcagagatgttggggataaagtatactgtaataatttatctgtttgaaaattactataaaacggtgttttctgatcggtttttgtttcctgcttaccatatgattgtaaattgttttatgtattaatcagttaatgctaattatttttgctgatgtcatatgttaaagagctataaattccaacaaccaactggtgtgtaaaaataatttaaaatttcctttactgaaaggtatttcccatttttgtggggaaaagaagccaaatttattactttgtgttggggtttttaaaatattaagaaatgtctaagttattgtttgcaaaacaataaatatgattttaaattctctta

SEQ ID NO: 331727 - DNA, 968 bp, Homo sapiens
acaagttagcaaccgaaggcgtccttagcagcagtggccgctgagatgtacgaacttccggttctccgggcagctgccactgctgtagcttctgccacctgccacgaccgggcctctccctggcgtttggtcacctctgcttcattctccaccgcgcctatggtccctcttggagccagcgtggcgggcctggcggctcccgggtggtgagagagcggtccgggaacgatgaaggcctcgcagtgctgctgctgtctcagccacctcttggcttccgtcctcctcctgctgttgctgcctgaactaagcgggcccctggcagtcctgctgcaggcagccgaggccgcgccaggtcttgggcctcctgaccctagaccacggacattaccgccgctgccaccgggccctacccctgcccagcagccgggccgtggtctggctgaagctgcggggccgcggggctccgagggaggcaatggcagcaaccctgtggccgggcttgagacggacgatcacggagggaaggccggggaaggctcggtgggtggcggccttgctgtgagccccaaccctggcgacaagcccatgacccagcgggccctgaccgtgttgatggtggtgagcggcgcggtgctggtgtacttcgtggtcaggacggtcaggatgagaagaagaaaccgaaagactaggagatatggagttttggacactaacatagaaaatatggaattgacacctttagaacaggatgatgaggatgatgacaacacgttgtttgatgccaatcatcctcgaagataagaatgtgccttttgatgaaagaactttatctttctacaatgaagagtggaatttctatgtttaaggaataagaagccactatatcaatgttgggggggtatttaagttacatatattttaacaacctttaatttgctgttgcaataaataccgtatccttttattat

SEQ ID NO: 331728 - DNA, 485 bp, Homo sapiens
aatggtggctgtcagaggctggagagtggggagaatgggaagatgctggtcaaagggtacacgttccaggtagaatggggggaaactgagaggtgatggaaatgttaattagcttgattcaatcattccacattgtatacctgtactacagcatcactttatcaatatccaaagaaaaggtaccgctgaaatccttctccccacattacagtggctctgctgctaggcactgacaccccagcccacagcaggtgccaaagcagtaatcagaagctgataggctgatgacaaggctgtcacctcagctcctgggcagaccacgcacgcagtagggacagtggttctgaagaggtctaggcaggcagaggcagcgactgtatgccacatctgaatgaaacttcacattcccgagtgggtaactttctctaatgaagccaatgtaaacttgttactttgcctctgaggaaatctatgctggaacagct

SEQ ID NO: 331729 - DNA, 432 bp, Homo sapiens
gtccacgcagcgtttaagagctgtaacactcaccacgaaagtctgcaacttcactcctgaaactggtgagaccacggacccactggaagggatgagcaactccagagacaccgtctttaagagctgtaacactcactgcgaatgtctgcaacttcactcttgaagtcagcgagaccacgaacccaccagaaggaagaaactccagacacatctgaacatttgaaggaacaaaccctggacacaccatctttaagaactgtaacgctcactgtgagggtctgtggtttcattttgaagtcaccaagaccaagaacccaccaattctggacacactatgattatggggattgttctactgagacctttcttttgaaatcttaattggctctgggtattaatcagtacattctatacaataaaatactttctctt

SEQ ID NO: 331730 - DNA, 447 bp, Homo sapiens
tcttctttcaaggttaaggaagtattagcccataaatgggaggatatttgggggcaggggacgctggcctgctggtcactccgatacctcctggcttggtacagcttctcttctctccatccacaaatttttcaaagctacaaaggtctagggtttttctttttcacaacactttgggccttgtacgaagggacagggttgtgtggggaggcaggcaagactgtcacttgaacatcagaaactgtctgaggttttatttaatacgatacctttaggattccatttacagcaccaaatccaatttattgtaaaaccaatttcagtgatctgtgttgtggtcatgaaagagagagaaaggtcctctcaacaactagaaatactgactactttcagctggaggagctttttcttcctctgctcagcctgtgatagaggcaccagtaaatc

SEQ ID NO: 331731 - DNA, 403 bp, Homo sapiens
atggtagagctgtgacagtatctgcagtcccggcctggcccgggagaaagaaagaaagatgggagaggcagcgacacagcagcctccctttccagagcccaggacagtttagggcccaatttggcaatagttgatgtaggttggtttacgggttctattccccaaagcctcaatgcatcattaccaccttgcctcactcagccctcaactccccagtttgcgacccatttgagcctcccgggacgaaattacttcttcctccttctgcctgccattcaaatgctaatcaagtattgagaaaaagttctttccttaaaatcacttacatagtaaatgactggcagcctctcaacctattttgaggtatttatatcttctcaagttttaaggcaaatttgaagca

SEQ ID NO: 331732 - DNA, 393 bp, Homo sapiens
tcttgtctggtgcacagttcatgggtttctagtatctgctttttatttctgtaagattagtagttatatcccttctttttctgattttagtaatttgaatcttctttcgtcttagctgatgtagctagaaatttgtcgatttcattatcttttcaaagaaccaactcttgggtttgttgactgtatttttctgttttctctcttctgtcatctttgttactcctgtctgctgcttaggggttcagtgtggtcttcttttttctagtttcttaatttgaaaagttagtttacagctgtaaacatccctccgagtgcagccttcgctgatcccctagcgtcatcatttctgtttgtctggaggtgtttctgattccctctgatttcttgttggag

SEQ ID NO: 331733 - DNA, 490 bp, Homo sapiens
  misc_feature (340)..(340): n is a, c, g, or t
  misc_feature (361)..(361): n is a, c, g, or t
  misc_feature (375)..(375): n is a, c, g, or t
  misc_feature (380)..(380): n is a, c, g, or t
  misc_feature (408)..(408): n is a, c, g, or t
  misc_feature (415)..(415): n is a, c, g, or t
gcccaacacaaagaaaacgatttctattttggaaatggcaaagtacaccctgatatgtattgggttaaatggacattctttttctgagggaagcagcccggtgactgtagctcaaaaaaataatttttaagagtagaagtcatcaaaaaggaacaagcaaaaaagtgctataagaagtttgattctttgtggatacttggagataatccttccctttgtgaaatatgttcaattaaaaaaaaagatgattgaagaaattcaacaaacaaaaatctttgtggtgatataagaagacctttattttattatttatttatttagtattatttattattttttngagacagggtctcactctgtngcccaggccagaangcaangccacgatctcagctcactgcaaccttngcttccnggatcaagtgattcttcaacctcagcctccagagtagcagggactacaggcgtgagccatcacgcccagctaatt

SEQ ID NO: 331734 - DNA, 460 bp, Homo sapiens
ctgactgcaccctccacctcccgggagtcaagcgattctcctgcctcagcctcccgaatagctgggtctacaggcatgtgccaccacacctagctaatttttgtatttttagtagagacgggggtttcatcatgttggccaggatggtctcgatctcttgacattgtgatctgcccgcctcggcctcccagagtgttgggattacaggcgtcagccatctctccagagctgattttttttggagggaggggtttgaattacttttttctttctctctttagcatcattgtagacccatggatttttatgtatccaatgtgtgtttttggttttttaaattttgagacagtcttgctctgtcacccaggctggagtgcagtggtgtgaccttggcttactacaacctccgcctcccgggttcaagctattctcctggctcagcctcccaagcagctgggat

SEQ ID NO: 331735 - DNA, 425 bp, Homo sapiens
gccccaggggtcaggtgttggcacttggaccatgccatgaaggaagggaccagttgggtaagctgagacaagtagggatggatttcgaatggagagaccaatgtgaacaaaggtcctgaggcgatagtggggaacgccatgctgggggagactgtgggacacccatgggtgatgtggagacgtgggttggagccagtgttggagtgaggttggggacagagcctgggaacccctggaagagaccggaagagcctggctgaggccttcaggcctcatcctgatgggaaatcagtgtggggctttgggttagagggatcaggacaatcattgtctcaggcagagggtgaagccactgtgcatgctgggtgggaacagggagagagtgtttcaaagaccccctgcagcagtccaggtagcagctggtg

SEQ ID NO: 331736 - DNA, 496 bp, Homo sapiens
ttcaagtccagcctgggcaacatagcaagaccccagtctctgattttttttaacttgttttttcttgttattactatctgtcagctgcaagagctcttcccagttctctgtgtgctcctctctggcaagtgataggctagctacctttctgagagctaaaggaggatatacagaagtagaaaactttttgttgccctcacatgggcttcttcaactggtccttaagcagggttcgaaactaggggaaaaccttatgcatgtctgatggtcacactggagactgggtccatatcaggacacaagtgccatttgtccttgagtctacagagctggaagattcagcctctcaaggagctcatggtctccatggtgagacaggctgtaagcaaaaatagtttaatcaaaatgcagaatagcatgtactaggggccaggtagacaaacagattatgtgttacagaatcgagaggaaggagagaccactgcaggctggagga

SEQ ID NO: 331737 - DNA, 612 bp, Homo sapiens
ttcccggcttccagcccagacaccagccagccagtggcgttcctggctcctcgggattttccttttcctccgaagctgctgattcatccccaggctggagtcaggctcagctgtggggctgggagcatgggctctcaggctgctgctgagtggaggaactgggcctcctgggaggtgtcctccagcctctctggatgctccatgggtgggggtcgggagtggtgagggaagggtggcgcatctcagagccctcgcaaatttctggccagaaatgtgggggtatgggcgcagcttggccaaggccatgctgcaagggccaggtggccgtccttcctcactcctgtctggcctccctctgcagggtgcttcaaggatgaccgcatcgtcttctggacttggatgttctccacctacttcatggagaaatgggctccccggcaggacgacatgcttttctatgtgcgccggaagctggcgtactccggcagcgaaagcggtgcagacgggaggaagatgaggaaacggagggctcggagatgaagtgattcgcctaacgtatttcatccactaaatcgcagtgtgggaggagctaataaaatacattttgcatgc

SEQ ID NO: 331738 - DNA, 2782 bp, Homo sapiens
ttcccggcttccagcccagacaccagccagccagtggcgttcctggctcctcgggattttccttttcctccgaagctgctgattcatccccaggctggagtcaggctcagctgtggggctgggagcatgggctctcaggctgctgctgagtggaggaactgggcctcctgggaggtgtcctccagcctctctggatgctccatgggtgggggtcgggagtggtgagggaagggtggcgcatctcagagccctcgcaaatttctggccagaaatgtgggggtatgggcgcagcttggccaaggccatgctgcaagggccaggtggccgtccttcctcactcctgtctggcctccctctgcagggtgcttcaaggatgaccgcatcgtcttctggacttggatgttctccacctacttcatggagaaatgggctccccggcaggacgacatgcttttctatgtgcgccggaagctggcgtactccggcagcgaaagcggtgcagacgggaggaaggcagctgagcctgaggtggaggtggaggtgtaccggcgggactccaagaagctgccaggcctgggagaccctgacatcgactgggaggagagcgtctgcctgaatctcatcctgcagaagcaagtgttcgcgtcccccagtaaacaccccatggacagcaagggggaggagtccaagatcagctaccccaacatcttcttcatgattgacagcttcgaggaggtgttcagcgacatgaccgtaggggaaggagagatggtctgtgtggagctggtggctagtgacaaaaccaacacgttccagggggtcatctttcagggctccatccgctacgaggcgctcaagaaggtgtatgacaaccgggtgagcgtggccgcccgcatggcacagaagatgtcgtttggcttctacaagtacagcaacatggagtttgtgcgcatgaagggcccccagggcaagggccacgccgagatggcggtcagccgagtgtctacaggtgacacatccccctgtgggactgaagaggactccagcccagcttcgcccatgcacgagcgggtgacctccttcagcacaccccccaccccagaacggaacaaccggcctgccttcttctccccatccctcaagaggaaggtgccccggaaccggatcgctgagatgaagaagtcgcactcggccaacgacagcgaggagttcttccgggaggacgacggtggagccgatctgcacaatgcaaccaacctgcggtctcggtccctgtcgggcacaggacggtccctggtcgggtcctggctgaagctgaacagagcagatggaaacttccttctctatgcacacttaacctacgtcacgttgccgctgcatcggattttaacagacatcctggaagttcggcagaagcccatcctgatgacctagccgcgtgcggagcctgcgcagagccccggccgggcccagccctcggagtgctgccaagtgcctacctgtccaccgccaccggggtctgcgatggcacgccagtgctggagccgcagccaggcgaggccactcgactcccggggccggggccgactccacgaacaccagcccaaactgaagtgcctcttccctcccctgctggcgctgctccgccctgtgccccccgcccatcgccccccacccatctctggagagccctctgcacccaaagaggactagagatgccgagcggccatgagagagagcggaaggagcagctgatgcccagagcggggccagagcggcgggtctatgttcacgtccccccagcagcaggcggaaccacccagccagggcactcagtgcattggactgtccacatgttcttgaggaaagccggtggaagattctggaatgccgtgcggatgaacttcagcacccgagtcagtcccagctcatcctccccagtttaccactttgttctaataggagatgggaacacgagaagtttgatggctttgccctgggctgggaatacctcacccacgcccagttccagaaaggcctccagctgagcagacggccccgatcccgccagaacggccttttgcttccagccaaagaacaccgccaacacgcacacctccaacctgggacatcccacgctgggcctcgcacggaggaacctgcagaatttggattctgagggtagtcgggaggcctcggtagccaggcagaacaggatatctgccaaagggtgtctgatgtggggtggggctggcatcctcccaggaaggttctaggtgggaccccgtcttctgggggcgggggtgtcttttcatcttccctggtttcctagaactcacttcctttgacggcgtgtgttggtcccatctctcagaccagctcactgaggcagaggagttgctcagaggctcacatgggcacccccattggttcgtgtgagcagctgcccagccccaggcctgccctcggcctggtccagcatgaaggcgtttccatctgcaaggatgcacggtaccctccccgagagcaggcctgtcccctacccaactgggaataaactggaagctgggtctctttgttgctatgtttttttgtttgaagttcccaggaatatttgaggggttccggtgatgtgtttagggatcttctctgtgggggaaaaggaagaggagggtcttgttctcccatctgtttattctttgggctctgggaacaggggactactttggggctttctccagacttttgtatgttgttattaaaagcgagctattgcatttca

SEQ ID NO: 331739 - DNA, 4453 bp, Homo sapiens
ttcccggcttccagcccagacaccagccagccagtggcgttcctggctcctcgggattttccttttcctccgaagctgctgattcatccccaggctggagtcaggctcagctgtggggctgggagcatgggctctcaggctgctgctgagtggaggaactgggcctcctgggaggtgtcctccagcctctctggatgctccatggggtgcttcaaggatgaccgcatcgtcttctggacttggatgttctccacctacttcatggagaaatgggctccccggcaggacgacatgcttttctatgtgcgccggaagctggcgtactccggcagcgaaagcggtgcagacgggaggaaggcagctgagcctgaggtggaggtggaggtgtaccggcgggactccaagaagctgccaggcctgggagaccctgacatcgactgggaggagagcgtctgcctgaatctcatcctgcagaagctggactacatggtgacctgtgcggtgtgcacacgtgctgacggcggggacattcacatccataagaagaaatctcagcaagtgttcgcgtcccccagtaaacaccccatggacagcaagggggaggagtccaagatcagctaccccaacatcttcttcatgattgacagcttcgaggaggtgttcagcgacatgaccgtaggggaaggagagatggtctgtgtggagctggtggctagtgacaaaaccaacacgttccagggggtcatctttcagggctccatccgctacgaggcgctcaagaaggtgtatgacaaccgggtgagcgtggccgcccgcatggcacagaagatgtcgtttggcttctacaagtacagcaacatggagtttgtgcgcatgaagggcccccagggcaagggccacgccgagatggcggtcagccgagtgtctacaggtgacacatccccctgtgggactgaagaggactccagcccagcttcgcccatgcacgagcgggtgacctccttcagcacaccccccaccccagaacggaacaaccggcctgccttcttctccccatccctcaagaggaaggtgccccggaaccggatcgctgagatgaagaagtcgcactcggccaacgacagcgaggagttcttccgggaggacgacggtggagccgatctgcacaatgcaaccaacctgcggtctcggtccctgtcgggcacaggacggtccctggtcgggtcctggctgaagctgaacagagcagatggaaacttccttctctatgcacacttaacctacgtcacgttgccgctgcatcggattttaacagacatcctggaagttcggcagaagcccatcctgatgacctagccgcgtgcggagcctgcgcagagccccggccgggcccagccctcggagtgctgccaagtgcctacctgtccaccgccaccggggtctgcgatggcacgccagtgctggagccgcagccaggcgaggccactcgactcccggggccggggccgactccacgaacaccagcccaaactgaagtgcctcttccctcccctgctggcgctgctccgccctgtgccccccgcccatcgccccccacccatctctggagagccctctgcacccaaagaggactagagatgccgagcggccatgagagagagcggaaggagcagctgatgcccagagcggggccagagcggcgggtctatgttcacgtccccccagcagcaggcggaaccacccagccagggcactcagtgcattggactgtccacatgttcttgaggaaagccggtggaagattctggaatgccgtgcggatgaacttcagcacccgagtcagtcccagctcatcctccccagtttaccactttgttctaataggagatgggaacacgagaagtttgatggctttgccctgggctgggaatacctcacccacgcccagttccagaaaggcctccagctgagcagacggccccgatcccgccagaacggccttttgcttccagccaaagaacaccgccaacacgcacacctccaacctgggacatcccacgctgggcctcgcacggaggaacctgcagaatttggattctgagggtagtcgggaggcctcggtagccaggcagaacaggatatctgccaaagggtgtctgatgtggggtggggctggcatcctcccaggaaggttctaggtgggaccccgtcttctgggggcgggggtgtcttttcatcttccctggtttcctagaactcacttcctttgacggcgtgtgttggtcccatctctcagaccagctcactgaggcagaggagttgctcagaggctcacatgggcacccccattggttcgtgtgagcagctgcccagccccaggcctgccctcggcctggtccagcatgaaggcgtttccatctgcaaggatgcacggtaccctccccgagagcaggcctgtcccctacccaactgggaataaactggaagctgggtctctttgttgctatgtttttttgtttgaagttcccaggaatatttgaggggttccggtgatgtgtttagggatcttctctgtgggggaaaaggaagaggagggtcttgttctcccatctgtttattctttgggctctgggaacaggggactactttggggctttctccagacttttgtatgttgttattaaaagcgagctattgcatttcattctgcctcagtttgcccacctgtgaaatggggctgataccacctacctcactgaagtcccagggttcaagtgtgtggctgggtcagggcgtggtcacccgtcattctgcataggtcgggttggatgttagactcctgggatgccctcctcccccctcgccctttgtaataacctaatctgagaccgtgcttggtggggggatgtgaactttctctctcccccagcagtgtctgctcaggcctgacagctcagctctgcacgatttcatgttcctaaacccatgtcttagggcagcacagagccaggtcatgtcatgccccaaagtgtggggacagagcctcagggagccccgagcatggtccagccccatttgagtgctctccggggatgccaaatgctgcttccaagtttgagtccatgtggctaaaatacacccatttcttcaggaactcttcccctggttgttctggggatcttgggagaaacacagccctgacagctcgtccgtgggaagatgaggcagtccaggttgtgaggagcacagcggcccgccctctgttctcagaggtgaggggcgggagaaggttgtctcctctggggccagcatttggccaagctcggaggcttggccagcactgctggatggctcagagcaagctgggctccccgtctgtaagatggcaaaaatgctgcccccctcacagggtgaccatgaggaccagtcacagtgatgtgtgaaagggctcgctggtcacagaaacgtgtacaaatcatgctattttagagatcagccctcaatttgtaaggcatgtgaacagggcacgcggtgggctggtggtttcatagccgacacacagcgcctaccatgtgcagctgcctgtccgaccccatcttacagacgagaaaaccagcacacaggcaccaaggaactgtccggaactaacagcaggggccggcgatgggagtcaaacccaggcacgcggcctggcctgcatgctgagccacatggtgctgtccggacagatggacagacactcggtggagtctgcctttctcaggccctaaatccctctccaaagggtacttgcgatgccggatttaaaacttgctcagagccacttagccacttgagaaccagacagtaaggtgttactcccaggtttgtttttccaaagtaacagatgacatgtggaataaagtaatagagtaacaagtggcagggccagaaccagggtccccaaagtcctggtgttggcacatttgtacttcttgtaagaccatctttaatttttctgggaacacacctgccttttgtgtaatgcggggaagactaatgcatggtgacacctagttttcctcaacaggacacttgatcccaaaacccctttaagaccttaggtttcctcagcggaaaactgtactttaatcccaaaccccctttaagacatattggggctgggcgcagtggctcacgcctgtaatcccagcactttgggaggctgagatgggtggatcacctgagatcaggagttcaagaccagcctgactaacatgctgaaaccccatgtctactaaagatagaaaaattagctggacatggtggcaggcacctgtaatcccagctactcggaaggctgaggaaggagaatcacttgaacctagtaggcagaggttgcagtgagccgagatcacgccattgcattctagcctgggcaacgagagcgaaactctgtctcaaaaaaaaaaaa

SEQ ID NO: 331740 - DNA, 4402 bp, Homo sapiens
gggctgcgggccgggccgcccgccctccccgccgccgccgcccccgagcctgcgggcggcgccgaggccgaggagcgctcgctgcagcacatgctgcgtgccatagcggaggagcgcggccgtcttagcctgcgccgcgaggtctgcggcctcgggtgcttcaaggatgaccgcatcgtcttctggacttggatgttctccacctacttcatggagaaatgggctccccggcaggacgacatgcttttctatgtgcgccggaagctggcgtactccggcagcgaaagcggtgcagacgggaggaaggcagctgagcctgaggtggaggtggaggtgtaccggcgggactccaagaagctgccaggcctgggagaccctgacatcgactgggaggagagcgtctgcctgaatctcatcctgcagaagctggactacatggtgacctgtgcggtgtgcacacgtgctgacggcggggacattcacatccataagaagaaatctcagcaagtgttcgcgtcccccagtaaacaccccatggacagcaagggggaggagtccaagatcagctaccccaacatcttcttcatgattgacagcttcgaggaggtgttcagcgacatgaccgtaggggaaggagagatggtctgtgtggagctggtggctagtgacaaaaccaacacgttccagggggtcatctttcagggctccatccgctacgaggcgctcaagaaggtgtatgacaaccgggtgagcgtggccgcccgcatggcacagaagatgtcgtttggcttctacaagtacagcaacatggagtttgtgcgcatgaagggcccccagggcaagggccacgccgagatggcggtcagccgagtgtctacaggtgacacatccccctgtgggactgaagaggactccagcccagcttcgcccatgcacgagcgggtgacctccttcagcacaccccccaccccagaacggaacaaccggcctgccttcttctccccatccctcaagaggaaggtgccccggaaccggatcgctgagatgaagaagtcgcactcggccaacgacagcgaggagttcttccgggaggacgacggtggagccgatctgcacaatgcaaccaacctgcggtctcggtccctgtcgggcacaggacggtccctggtcgggtcctggctgaagctgaacagagcagatggaaacttccttctctatgcacacttaacctacgtcacgttgccgctgcatcggattttaacagacatcctggaagttcggcagaagcccatcctgatgacctagccgcgtgcggagcctgcgcagagccccggccgggcccagccctcggagtgctgccaagtgcctacctgtccaccgccaccggggtctgcgatggcacgccagtgctggagccgcagccaggcgaggccactcgactcccggggccggggccgactccacgaacaccagcccaaactgaagtgcctcttccctcccctgctggcgctgctccgccctgtgccccccgcccatcgccccccacccatctctggagagccctctgcacccaaagaggactagagatgccgagcggccatgagagagagcggaaggagcagctgatgcccagagcggggccagagcggcgggtctatgttcacgtccccccagcagcaggcggaaccacccagccagggcactcagtgcattggactgtccacatgttcttgaggaaagccggtggaagattctggaatgccgtgcggatgaacttcagcacccgagtcagtcccagctcatcctccccagtttaccactttgttctaataggagatgggaacacgagaagtttgatggctttgccctgggctgggaatacctcacccacgcccagttccagaaaggcctccagctgagcagacggccccgatcccgccagaacggccttttgcttccagccaaagaacaccgccaacacgcacacctccaacctgggacatcccacgctgggcctcgcacggaggaacctgcagaatttggattctgagggtagtcgggaggcctcggtagccaggcagaacaggatatctgccaaagggtgtctgatgtggggtggggctggcatcctcccaggaaggttctaggtgggaccccgtcttctgggggcgggggtgtcttttcatcttccctggtttcctagaactcacttcctttgacggcgtgtgttggtcccatctctcagaccagctcactgaggcagaggagttgctcagaggctcacatgggcacccccattggttcgtgtgagcagctgcccagccccaggcctgccctcggcctggtccagcatgaaggcgtttccatctgcaaggatgcacggtaccctccccgagagcaggcctgtcccctacccaactgggaataaactggaagctgggtctctttgttgctatgtttttttgtttgaagttcccaggaatatttgaggggttccggtgatgtgtttagggatcttctctgtgggggaaaaggaagaggagggtcttgttctcccatctgtttattctttgggctctgggaacaggggactactttggggctttctccagacttttgtatgttgttattaaaagcgagctattgcatttcattctgcctcagtttgcccacctgtgaaatggggctgataccacctacctcactgaagtcccagggttcaagtgtgtggctgggtcagggcgtggtcacccgtcattctgcataggtcgggttggatgttagactcctgggatgccctcctcccccctcgccctttgtaataacctaatctgagaccgtgcttggtggggggatgtgaactttctctctcccccagcagtgtctgctcaggcctgacagctcagctctgcacgatttcatgttcctaaacccatgtcttagggcagcacagagccaggtcatgtcatgccccaaagtgtggggacagagcctcagggagccccgagcatggtccagccccatttgagtgctctccggggatgccaaatgctgcttccaagtttgagtccatgtggctaaaatacacccatttcttcaggaactcttcccctggttgttctggggatcttgggagaaacacagccctgacagctcgtccgtgggaagatgaggcagtccaggttgtgaggagcacagcggcccgccctctgttctcagaggtgaggggcgggagaaggttgtctcctctggggccagcatttggccaagctcggaggcttggccagcactgctggatggctcagagcaagctgggctccccgtctgtaagatggcaaaaatgctgcccccctcacagggtgaccatgaggaccagtcacagtgatgtgtgaaagggctcgctggtcacagaaacgtgtacaaatcatgctattttagagatcagccctcaatttgtaaggcatgtgaacagggcacgcggtgggctggtggtttcatagccgacacacagcgcctaccatgtgcagctgcctgtccgaccccatcttacagacgagaaaaccagcacacaggcaccaaggaactgtccggaactaacagcaggggccggcgatgggagtcaaacccaggcacgcggcctggcctgcatgctgagccacatggtgctgtccggacagatggacagacactcggtggagtctgcctttctcaggccctaaatccctctccaaagggtacttgcgatgccggatttaaaacttgctcagagccacttagccacttgagaaccagacagtaaggtgttactcccaggtttgtttttccaaagtaacagatgacatgtggaataaagtaatagagtaacaagtggcagggccagaaccagggtccccaaagtcctggtgttggcacatttgtacttcttgtaagaccatctttaatttttctgggaacacacctgccttttgtgtaatgcggggaagactaatgcatggtgacacctagttttcctcaacaggacacttgatcccaaaacccctttaagaccttaggtttcctcagcggaaaactgtactttaatcccaaaccccctttaagacatattggggctgggcgcagtggctcacgcctgtaatcccagcactttgggaggctgagatgggtggatcacctgagatcaggagttcaagaccagcctgactaacatgctgaaaccccatgtctactaaagatagaaaaattagctggacatggtggcaggcacctgtaatcccagctactcggaaggctgaggaaggagaatcacttgaacctagtaggcagaggttgcagtgagccgagatcacgccattgcattctagcctgggcaacgagagcgaaactctgtctcaaaaaaaaaaaa

SEQ ID NO: 331741 - DNA, 2382 bp, Homo sapiens
ttgtgatcttcttctccccatccctcaagaggaaggtgccccggaaccggatcgctgagatgaagaagtcgcactcgtccaagaagctgccaggcctgggagaccctgacatcgactgggaggagagcgtctgcctgaatctcatcctgcagaagctggactacatggtgacctgtgcggtgtgcacacgtgctgacggcggggacattcacatccataagaagaaatctcagcaagtgttcgcgtcccccagtaaacaccccatggacagcaagggggaggagtccaagatcagctaccccaacatcttcttcatgattgacagcttcgaggaggtgttcagcgacatgaccgtaggggaaggagagatggtctgtgtggagctggtggctagtgacaaaaccaacacgttccagggggtcatctttcagggctccatccgctacgaggcgctcaagaaggtgtatgacaaccgggtgagcgtggccgcccgcatggcacagaagatgtcgtttggcttctacaagtacagcaacatggagtttgtgcgcatgaagggcccccagggcaagggccacgccgagatggcggtcagccgagtgtctacaggtgacacatccccctgtgggactgaagaggactccagcccagcttcgcccatgcacgagcgggtgacctccttcagcacaccccccaccccagaacggaacaaccggcctgccttcttctccccatccctcaagaggaaggtgccccggaaccggatcgctgagatgaagaagtcgcactcggccaacgacagcgaggagttcttccgggaggacgacggtggagccgatctgcacaatgcaaccaacctgcggtctcggtccctgtcgggcacaggacggtccctggtcgggtcctggctgaagctgaacagagcagatggaaacttccttctctatgcacacttaacctacgtcacgttgccgctgcatcggattttaacagacatcctggaagttcggcagaagcccatcctgatgacctagccgcgtgcggagcctgcgcagagccccggccgggcccagccctcggagtgctgccaagtgcctacctgtccaccgccaccggggtctgcgatggcacgccagtgctggagccgcagccaggcgaggccactcgactcccggggccggggccgactccacgaacaccagcccaaactgaagtgcctcttccctcccctgctggcgctgctccgccctgtgccccccgcccatcgccccccacccatctctggagagccctctgcacccaaagaggactagagatgccgagcggccatgagagagagcggaaggagcagctgatgcccagagcggggccagagcggcgggtctatgttcacgtccccccagcagcaggcggaaccacccagccagggcactcagtgcattggactgtccacatgttcttgaggaaagccggtggaagattctggaatgccgtgcggatgaacttcagcacccgagtcagtcccagctcatcctccccagtttaccactttgttctaataggagatgggaacacgagaagtttgatggctttgccctgggctgggaatacctcacccacgcccagttccagaaaggcctccagctgagcagacggccccgatcccgccagaacggccttttgcttccagccaaagaacaccgccaacacgcacacctccaacctgggacatcccacgctgggcctcgcacggaggaacctgcagaatttggattctgagggtagtcgggaggcctcggtagccaggcagaacaggatatctgccaaagggtgtctgatgtggggtggggctggcatcctcccaggaaggttctaggtgggaccccgtcttctgggggcgggggtgtcttttcatcttccctggtttcctagaactcacttcctttgacggcgtgtgttggtcccatctctcagaccagctcactgaggcagaggagttgctcagaggctcacatgggcacccccattggttcgtgtgagcagctgcccagccccaggcctgccctcggcctggtccagcatgaaggcgtttccatctgcaaggatgcacggtaccctccccgagagcaggcctgtcccctacccaactgggaataaactggaagctgggtctctttgttgctatgtttttttgtttgaagttcccaggaatatttgaggggttccggtgatgtgtttagggatcttctctgtgggggaaaaggaagaggagggtcttgttctcccatctgtttattctttgggctctgggaacaggggactactttggggctttctccagacttttgtatgttgttattaaaagcgagctattgcatttca

SEQ ID NO: 331742 - DNA, 1804 bp, Homo sapiens
caaagccaggctgagtccacagagccagtgggcagaagagactggctggggacccaggcccggccctggcgcctgcctgggtggacctgctgggtgacctccttcagcacaccccccaccccagaacggaacaaccggcctgccttcttctccccatccctcaagaggaaggtgccccggaaccggatcgctgagatgaagaagtcgcactcggccaacgacagcgaggagttcttccgggaggacgacggtggagccgatctgcacaatgcaaccaacctgcggtctcggtccctgtcgggcacaggacggtccctggtcgggtcctggctgaagctgaacagagcagatggaaacttccttctctatgcacacttaacctacgtcacgttgccgctgcatcggattttaacagacatcctggaagttcggcagaagcccatcctgatgacctagccgcgtgcggagcctgcgcagagccccggccgggcccagccctcggagtgctgccaagtgcctacctgtccaccgccaccggggtctgcgatggcacgccagtgctggagccgcagccaggcgaggccactcgactcccggggccggggccgactccacgaacaccagcccaaactgaagtgcctcttccctcccctgctggcgctgctccgccctgtgccccccgcccatcgccccccacccatctctggagagccctctgcacccaaagaggactagagatgccgagcggccatgagagagagcggaaggagcagctgatgcccagagcggggccagagcggcgggtctatgttcacgtccccccagcagcaggcggaaccacccagccagggcactcagtgcattggactgtccacatgttcttgaggaaagccggtggaagattctggaatgccgtgcggatgaacttcagcacccgagtcagtcccagctcatcctccccagtttaccactttgttctaataggagatgggaacacgagaagtttgatggctttgccctgggctgggaatacctcacccacgcccagttccagaaaggcctccagctgagcagacggccccgatcccgccagaacggccttttgcttccagccaaagaacaccgccaacacgcacacctccaacctgggacatcccacgctgggcctcgcacggaggaacctgcagaatttggattctgagggtagtcgggaggcctcggtagccaggcagaacaggatatctgccaaagggtgtctgatgtggggtggggctggcatcctcccaggaaggttctaggtgggaccccgtcttctgggggcgggggtgtcttttcatcttccctggtttcctagaactcacttcctttgacggcgtgtgttggtcccatctctcagaccagctcactgaggcagaggagttgctcagaggctcacatgggcacccccattggttcgtgtgagcagctgcccagccccaggcctgccctcggcctggtccagcatgaaggcgtttccatctgcaaggatgcacggtaccctccccgagagcaggcctgtcccctacccaactgggaataaactggaagctgggtctctttgttgctatgtttttttgtttgaagttcccaggaatatttgaggggttccggtgatgtgtttagggatcttctctgtgggggaaaaggaagaggagggtcttgttctcccatctgtttattctttgggctctgggaacaggggactactttggggctttctccagacttttgtatgttgttattaaaagcgagctattgcatttca

SEQ ID NO: 331743 - DNA, 2494 bp, Homo sapiens
ttcccggcttccagcccagacaccagccagccagtggcgttcctggctcctcgggattttccttttcctccgaagctgctgattcatccccaggctggagtcaggctcagctgtggggctgggagcatgggctctcaggctgctgctgagtggaggaactgggcctcctgggaggtgtcctccagcctctctggatgctccatggggtgcttcaaggatgaccgcatcgtcttctggacttggatgttctccacctacttcatggagaaatgggctccccggcaggacgacatgcttttctatgtgcgccggaagctggcgtactccggcagcgaaagcggtgcagacgggaggaaggcagctgagcctgaggtggaggtggaggtgtaccggcgggactccaagaagctgccaggcctgggagaccctgacatcgactgggaggagagcgtctgcctgaatctcatcctgcagaagctggactacatggtgacctgtgcggtgtgcacacgtgctgacggcggggacattcacatccataagaagaaatctcagcaagtgttcgcgtcccccagtaaacaccccatggacagcaagggggaggagtccaagatcagctaccccaacatcttcttcatgattgacagcttcgaggaggtgttcagcgacatgaccgtaggggaaggagagatggtctgtgtggagctggtggctagtgacaaaaccaacacgttccagggggtcatctttcagggctccatccgctacgaggcgctcaagaaggtgtatgacaaccgggtgagcgtggccgcccgcatggcacagaagatgtcgtttggcttctacaagtacagcaacatggagtttgtgcgcatgaagggcccccagggcaagggccacgccgagatggcggtcagccgagtgtctacaggtgacacatccccctgtgggactgaagaggactccagcccagcttcgcccatgcacgagcgggtgacctccttcagcacaccccccaccccagaacggaacaaccggcctgccttcttctccccatccctcaagaggaaggtgccccggaaccggatcgctgagatgaagaagtcgcactcggccaacgacagcgaggagttcttccgggaggacgacggtggagccgatctgcacaatgcaaccaacctgcggtctcggtccctgtcgggcacaggacggtccctggtcgggtcctggctgaagctgaacagagcagatggaaacttccttctctatgcacacttaacctacgtcacgttgccgctgcatcggattttaacagacatcctggaagttcggcagaagcccatcctgatgacctagccgcgtgcggagcctgcgcagagccccggccgggcccagccctcggagtgctgccaagtgcctacctgtccaccgccaccggggtctgcgatggcacgccagtgctggagccgcagccaggcgaggccactcgactcccggggccggggccgactccacgaacaccagcccaaactgaagtgcctcttccctcccctgctggcgctgctccgccctgtgccccccgcccatcgccccccacccatctctggagagccctctgcacccaaagaggactagagatgccgagcggccatgagagagagcggaaggagcagctgatgcccagagcggggccagagcggcgggtctatgttcacgtccccccagcagcaggcggaaccacccagccagggcactcagtgcattggactgtccacatgttcttgaggaaagccggtggaagattctggaatgccgtgcggatgaacttcagcacccgagtcagtcccagctcatcctccccagtttaccactttgttctaataggagatgggaacacgagaagtttgatggctttgccctgggctgggaatacctcacccacgcccagttccagaaaggcctccagctgagcagacggccccgatcccgccagaacggccttttgcttccagccaaagaacaccgccaacacgcacacctccaacctgggacatcccacgctgggcctcgcacggaggaacctgcagaatttggattctgagggtagtcgggaggcctcggtagccaggcagaacaggatatctgccaaagggtgtctgatgtggggtggggctggcatcctcccaggaaggttctaggtgggaccccgtcttctgggggcgggggtgtcttttcatcttccctggtttcctagaactcacttcctttgacggcgtgtgttggtcccatctctcagaccagctcactgaggcagaggagttgctcagaggctcacatgggcacccccattggttcgtgtgagcagctgcccagccccaggcctgccctcggcctggtccagcatgaaggcgtttccatctgcaaggatgcacggtaccctccccgagagcaggcctgtcccctacccaactgggaataaactggaagctgggtc

SEQ ID NO: 331744 - DNA, 1046 bp, Homo sapiens
gggctgcgggccgggccgcccgccctccccgccgccgccgcccccgagcctgcgggcggcgccgaggccgaggagcgctcgctgcagcacatgctgcgtgccatagcggaggagcgcggccgtcttagcctgcgccgcgaggtctgcggcctcgggtgcttcaaggatgaccgcatcgtcttctggacttggatgttctccacctacttcatggagaaatgggctccccggcaggacgacatgcttttctatgtgcgccggaagctggcgtactccggcagcgaaagcggtgcagacgggaggaaggcagctgagcctgaggtggaggtggaggtgtaccggcgggactccaagaagctgccaggcctgggagaccctgacatcgactgggaggagagcgtctgcctgaatctcatcctgcagaagctggactacatggtgacctgtgcggtgtgcacacgtgctgacggcggggacattcacatccataagaagaaatctcagcaagtgttcgcgtcccccagtaaacaccccatggacagcaagggggaggagtccaagatcagctaccccaacatcttcttcatgattgacagcttcgaggagctttgacggcgtgtgttggtcccatctctcagaccagctcactgaggcagaggagttgctcagaggctcacatgggcacccccattggttcgtgtgagcagctgcccagccccaggcctgccctcggcctggtccagcatgaaggcgtttccatctgcaaggatgcacggtaccctccccgagagcaggcctgtcccctacccaactgggaataaactggaagctgggtctctttgttgctatgtttttttgtttgaagttcccaggaatatttgaggggttccggtgatgtgtttagggatcttctctgtgggggaaaaggaagaggagggtcttgttctcccatctgtttattctttgggctctgggaacaggggactactttggggctttctccagacttttgtatgttgttattaaaagcgagctattgcatttca

SEQ ID NO: 331745 - DNA, 1187 bp, Homo sapiens
  misc_feature (1069)..(1069): n is a, c, g, or t
  misc_feature (1099)..(1099): n is a, c, g, or t
  misc_feature (1132)..(1132): n is a, c, g, or t
ttcccggcttccagcccagacaccagccagccagtggcgttcctggctcctcgggattttccttttcctccgaagctgctgattcatccccaggctggagtcaggctcagctgtggggctgggagcatgggctctcaggctgctgctgagtggaggaactgggcctcctgggaggtgtcctccagcctctctggatgctccatggggtgcttcaaggatgaccgcatcgtcttctggacttggatgttctccacctacttcatggagaaatgggctccccggcaggacgacatgcttttctatgtgcgccggaagctggcgtactccggcagcgaaagcggtgcagacgggaggaaggcagctgagcctgaggtggaggtggaggtgtaccggcgggactccaagaagctgccaggcctgggagaccctgacatcgactgggaggagagcgtctgcctgaatctcatcctgcagaagctggactacatggtgacctgtgcggtgtgcacacgtgctgacggcggggacattcacatccataagaagaaatctcagcaagtgttcgcgtcccccagtaaacaccccatggacagcaagggggaggagtccaagatcagctaccccaacatcttcttcatgattgacagcttcgaggaggtgttcagcgacatgaccgtaggggaaggagagatggtctgtgtggagctggtggctagtgacaaaaccaacacgttccagggggtcatctttcagggctccatccgctacgaggcgctcaagaaggtgtatgacaaccgggtgagcgtggccgcccgcatggcacagaagatgtcgtttggcttctacaagtacagcaacatggagtttgtgcgcatgaagggcccccagggcaagggccacgccgagatggcggtcagccgagtgtctacaggtgacacatccccctgtgggactgaagaggactccagcccagcttcgcccatgcacgagcgggacctccttcagcacaaccccaccccacaattttatgacttccatttcgcaattgttgaattataactgcgactgnaacaaacaggttcatagagatgaatttttngagaaacatatatctacatgttgtataattggnttttttttccatgtaagtgaacataaaaacgccttttccgggtgctttcttcaaa

SEQ ID NO: 331746 - DNA, 1052 bp, Homo sapiens
ttcccggcttccagcccagacaccagccagccagtggcgttcctggctcctcgggattttccttttcctccgaagctgctgattcatccccaggctggagtcaggctcagctgtggggctgggagcatgggctctcaggctgctgctgagtggaggaactgggcctcctgggaggtgtcctccagcctctctggatgctccatggggtgcttcaaggatgaccgcatcgtcttctggacttggatgttctccacctacttcatggagaaatgggctccccggcaggacgacatgcttttctatgtgcgccggaagctggcgtactccggcagcgaaagcggtgcagacgggaggaaggcagctgagcctgaggtggaggtggaggtgtaccggcgggactccaagaagctgccaggcctgggagaccctgacatcgactgggaggagagcgtctgcctgaatctcatcctgcagaagctggactacatggtgacctgtgcggtgtgcacacgtgctgacggcggggacattcacatccataagaagaaatctcagcaagtgttcgcgtcccccagtaaacaccccatggacagcaagggggaggagtccaagatcagctaccccaacatcttcttcatgattgacagcttcgaggaggtgttcagcgacatgaccgtaggggaaggagagatggtctgtgtggagctggtggctagtgacaaaaccaacacgttccagggggtcatctttcagggctccatccgctacgaggcgctcaagaaggtgtatgacaaccgggtgagcgtggccgcccgcatggcacagaagatgtcgtttggcttctacaagtacagcaacatggagtttgtgcgcatgaagggcccccagggcaagggccacgccgagatggcggtcagccgagtgtctacaggtgacacatccccctgtgggactgaagaggactccagcccagcttcgcccatgcacgagcgggacctccttcagcacaccccataacccagaacgtaacatccttcatgaattccacgtag

SEQ ID NO: 331747 - DNA, 493 bp, Homo sapiens
tggcgcctgcctgggtggacctgctgggtgagcgtgggcacgtggccggccttccccggtgagtcagatggggatgatggtgactgagggtcagccagcgcatgcagaggcctaggccacccagctctttgccccgcggtttgtaggaggttctgctgcaggagaggcgttcctgcctcgcacagccggaaaccagacttgccagcttgccccaggtcacaaggtctcttgggatagcactgggcttggggccctgctctgcctaggccactctccttccccagggcgggaggctgaggtcagcagcagctttgttcccagaagcctttggtggggcacaggcaggagaaggtctccagcccactggctgctttgctctacctggttcttccagagggactgcccagagctgtagttcttggaagagtacaggtgtgctgggcaggggggtgcccttggcacaggtccaggggcagtcttgcccagccattgt

SEQ ID NO: 331748 - DNA, 283 bp, Homo sapiens
ttgtgaagtcccaacaactcgacagggtgggtgttcttaccccttttacagatgaggaaacggagggctcggagatgaagtgattcgcctaacgtatttcatccactaaatcgcagtgtgggaggagctaataaaatacattttgcatgcttccttctctgtttttcacaagcttttgctgttcgtaaaatgtttaatcaactccatatgccagacatggaaacgcttttgttttccttcaaaaacaagaaatgagagggccgtgtagctaggtctggaactt

SEQ ID NO: 331749 - DNA, 2575 bp, Homo sapiens
gggctgcgggccgggccgcccgccctccccgccgccgccgcccccgagcctgcgggcggcgccgaggccgaggagcgctcgctgcagcacatgctgcgtgccatagcggaggagcgcggccgtcttagcctgcgccgcgaggtctgcggcctcgggtgcttcaaggatgaccgcatcgtcttctggacttggatgttctccacctacttcatggagaaatgggctccccggcaggacgacatgcttttctatgtgcgccggaagctggcgtactccggcagcgaaagcggtgcagacgggaggaaggcagctgagcctgaggtggaggtggaggtgtaccggcgggactccaagaagctgccaggcctgggagaccctgacatcgactgggaggagagcgtctgcctgaatctcatcctgcagaagcaagtgttcgcgtcccccagtaaacaccccatggacagcaagggggaggagtccaagatcagctaccccaacatcttcttcatgattgacagcttcgaggaggtgttcagcgacatgaccgtaggggaaggagagatggtctgtgtggagctggtggctagtgacaaaaccaacacgttccagggggtcatctttcagggctccatccgctacgaggcgctcaagaaggtgtatgacaaccgggtgagcgtggccgcccgcatggcacagaagatgtcgtttggcttctacaagtacagcaacatggagtttgtgcgcatgaagggcccccagggcaagggccacgccgagatggcggtcagccgagtgtctacaggtgacacatccccctgtgggactgaagaggactccagcccagcttcgcccatgcacgagcgggtgacctccttcagcacaccccccaccccagaacggaacaaccggcctgccttcttctccccatccctcaagaggaaggtgccccggaaccggatcgctgagatgaagaagtcgcactcggccaacgacagcgaggagttcttccgggaggacgacggtggagccgatctgcacaatgcaaccaacctgcggtctcggtccctgtcgggcacaggacggtccctggtcgggtcctggctgaagctgaacagagcagatggaaacttccttctctatgcacacttaacctacgtcacgttgccgctgcatcggattttaacagacatcctggaagttcggcagaagcccatcctgatgacctagccgcgtgcggagcctgcgcagagccccggccgggcccagccctcggagtgctgccaagtgcctacctgtccaccgccaccggggtctgcgatggcacgccagtgctggagccgcagccaggcgaggccactcgactcccggggccggggccgactccacgaacaccagcccaaactgaagtgcctcttccctcccctgctggcgctgctccgccctgtgccccccgcccatcgccccccacccatctctggagagccctctgcacccaaagaggactagagatgccgagcggccatgagagagagcggaaggagcagctgatgcccagagcggggccagagcggcgggtctatgttcacgtccccccagcagcaggcggaaccacccagccagggcactcagtgcattggactgtccacatgttcttgaggaaagccggtggaagattctggaatgccgtgcggatgaacttcagcacccgagtcagtcccagctcatcctccccagtttaccactttgttctaataggagatgggaacacgagaagtttgatggctttgccctgggctgggaatacctcacccacgcccagttccagaaaggcctccagctgagcagacggccccgatcccgccagaacggccttttgcttccagccaaagaacaccgccaacacgcacacctccaacctgggacatcccacgctgggcctcgcacggaggaacctgcagaatttggattctgagggtagtcgggaggcctcggtagccaggcagaacaggatatctgccaaagggtgtctgatgtggggtggggctggcatcctcccaggaaggttctaggtgggaccccgtcttctgggggcgggggtgtcttttcatcttccctggtttcctagaactcacttcctttgacggcgtgtgttggtcccatctctcagaccagctcactgaggcagaggagttgctcagaggctcacatgggcacccccattggttcgtgtgagcagctgcccagccccaggcctgccctcggcctggtccagcatgaaggcgtttccatctgcaaggatgcacggtaccctccccgagagcaggcctgtcccctacccaactgggaataaactggaagctgggtctctttgttgctatgtttttttgtttgaagttcccaggaatatttgaggggttccggtgatgtgtttagggatcttctctgtgggggaaaaggaagaggagggtcttgttctcccatctgtttattctttgggctctgggaacaggggactactttggggctttctccagacttttgtatgttgttattaaaagcgagctattgcatttca

SEQ ID NO: 331750 - DNA, 4609 bp, Homo sapiens
ttcccggcttccagcccagacaccagccagccagtggcgttcctggctcctcgggattttccttttcctccgaagctgctgattcatccccaggctggagtcaggctcagctgtggggctgggagcatgggctctcaggctgctgctgagtggaggaactgggcctcctgggaggtgtcctccagcctctctggatgctccatgggtgggggtcgggagtggtgagggaagggtggcgcatctcagagccctcgcaaatttctggccagaaatgtgggggtatgggcgcagcttggccaaggccatgctgcaagggccaggtggccgtccttcctcactcctgtctggcctccctctgcagggtgcttcaaggatgaccgcatcgtcttctggacttggatgttctccacctacttcatggagaaatgggctccccggcaggacgacatgcttttctatgtgcgccggaagctggcgtactccggcagcgaaagcggtgcagacgggaggaaggcagctgagcctgaggtggaggtggaggtgtaccggcgggactccaagaagctgccaggcctgggagaccctgacatcgactgggaggagagcgtctgcctgaatctcatcctgcagaagctggactacatggtgacctgtgcggtgtgcacacgtgctgacggcggggacattcacatccataagaagaaatctcagcaagtgttcgcgtcccccagtaaacaccccatggacagcaagggggaggagtccaagatcagctaccccaacatcttcttcatgattgacagcttcgaggaggtgttcagcgacatgaccgtaggggaaggagagatggtctgtgtggagctggtggctagtgacaaaaccaacacgttccagggggtcatctttcagggctccatccgctacgaggcgctcaagaaggtgtatgacaaccgggtgagcgtggccgcccgcatggcacagaagatgtcgtttggcttctacaagtacagcaacatggagtttgtgcgcatgaagggcccccagggcaagggccacgccgagatggcggtcagccgagtgtctacaggtgacacatccccctgtgggactgaagaggactccagcccagcttcgcccatgcacgagcgggtgacctccttcagcacaccccccaccccagaacggaacaaccggcctgccttcttctccccatccctcaagaggaaggtgccccggaaccggatcgctgagatgaagaagtcgcactcggccaacgacagcgaggagttcttccgggaggacgacggtggagccgatctgcacaatgcaaccaacctgcggtctcggtccctgtcgggcacaggacggtccctggtcgggtcctggctgaagctgaacagagcagatggaaacttccttctctatgcacacttaacctacgtcacgttgccgctgcatcggattttaacagacatcctggaagttcggcagaagcccatcctgatgacctagccgcgtgcggagcctgcgcagagccccggccgggcccagccctcggagtgctgccaagtgcctacctgtccaccgccaccggggtctgcgatggcacgccagtgctggagccgcagccaggcgaggccactcgactcccggggccggggccgactccacgaacaccagcccaaactgaagtgcctcttccctcccctgctggcgctgctccgccctgtgccccccgcccatcgccccccacccatctctggagagccctctgcacccaaagaggactagagatgccgagcggccatgagagagagcggaaggagcagctgatgcccagagcggggccagagcggcgggtctatgttcacgtccccccagcagcaggcggaaccacccagccagggcactcagtgcattggactgtccacatgttcttgaggaaagccggtggaagattctggaatgccgtgcggatgaacttcagcacccgagtcagtcccagctcatcctccccagtttaccactttgttctaataggagatgggaacacgagaagtttgatggctttgccctgggctgggaatacctcacccacgcccagttccagaaaggcctccagctgagcagacggccccgatcccgccagaacggccttttgcttccagccaaagaacaccgccaacacgcacacctccaacctgggacatcccacgctgggcctcgcacggaggaacctgcagaatttggattctgagggtagtcgggaggcctcggtagccaggcagaacaggatatctgccaaagggtgtctgatgtggggtggggctggcatcctcccaggaaggttctaggtgggaccccgtcttctgggggcgggggtgtcttttcatcttccctggtttcctagaactcacttcctttgacggcgtgtgttggtcccatctctcagaccagctcactgaggcagaggagttgctcagaggctcacatgggcacccccattggttcgtgtgagcagctgcccagccccaggcctgccctcggcctggtccagcatgaaggcgtttccatctgcaaggatgcacggtaccctccccgagagcaggcctgtcccctacccaactgggaataaactggaagctgggtctctttgttgctatgtttttttgtttgaagttcccaggaatatttgaggggttccggtgatgtgtttagggatcttctctgtgggggaaaaggaagaggagggtcttgttctcccatctgtttattctttgggctctgggaacaggggactactttggggctttctccagacttttgtatgttgttattaaaagcgagctattgcatttcattctgcctcagtttgcccacctgtgaaatggggctgataccacctacctcactgaagtcccagggttcaagtgtgtggctgggtcagggcgtggtcacccgtcattctgcataggtcgggttggatgttagactcctgggatgccctcctcccccctcgccctttgtaataacctaatctgagaccgtgcttggtggggggatgtgaactttctctctcccccagcagtgtctgctcaggcctgacagctcagctctgcacgatttcatgttcctaaacccatgtcttagggcagcacagagccaggtcatgtcatgccccaaagtgtggggacagagcctcagggagccccgagcatggtccagccccatttgagtgctctccggggatgccaaatgctgcttccaagtttgagtccatgtggctaaaatacacccatttcttcaggaactcttcccctggttgttctggggatcttgggagaaacacagccctgacagctcgtccgtgggaagatgaggcagtccaggttgtgaggagcacagcggcccgccctctgttctcagaggtgaggggcgggagaaggttgtctcctctggggccagcatttggccaagctcggaggcttggccagcactgctggatggctcagagcaagctgggctccccgtctgtaagatggcaaaaatgctgcccccctcacagggtgaccatgaggaccagtcacagtgatgtgtgaaagggctcgctggtcacagaaacgtgtacaaatcatgctattttagagatcagccctcaatttgtaaggcatgtgaacagggcacgcggtgggctggtggtttcatagccgacacacagcgcctaccatgtgcagctgcctgtccgaccccatcttacagacgagaaaaccagcacacaggcaccaaggaactgtccggaactaacagcaggggccggcgatgggagtcaaacccaggcacgcggcctggcctgcatgctgagccacatggtgctgtccggacagatggacagacactcggtggagtctgcctttctcaggccctaaatccctctccaaagggtacttgcgatgccggatttaaaacttgctcagagccacttagccacttgagaaccagacagtaaggtgttactcccaggtttgtttttccaaagtaacagatgacatgtggaataaagtaatagagtaacaagtggcagggccagaaccagggtccccaaagtcctggtgttggcacatttgtacttcttgtaagaccatctttaatttttctgggaacacacctgccttttgtgtaatgcggggaagactaatgcatggtgacacctagttttcctcaacaggacacttgatcccaaaacccctttaagaccttaggtttcctcagcggaaaactgtactttaatcccaaaccccctttaagacatattggggctgggcgcagtggctcacgcctgtaatcccagcactttgggaggctgagatgggtggatcacctgagatcaggagttcaagaccagcctgactaacatgctgaaaccccatgtctactaaagatagaaaaattagctggacatggtggcaggcacctgtaatcccagctactcggaaggctgaggaaggagaatcacttgaacctagtaggcagaggttgcagtgagccgagatcacgccattgcattctagcctgggcaacgagagcgaaactctgtctcaaaaaaaaaaaa

SEQ ID NO: 331751 - DNA, 4418 bp, Homo sapiens
aagtttaaacactagtttgtgcgggtcgtcggtcgcgcggcctggggtggcgcagagccctcgcaaatttctggccagaaatgtgggggtatgggcgcagcttggccaaggccatgctgcaagggccaggtggccgtccttcctcactcctgtctggcctccctctgcagggtgcttcaaggatgaccgcatcgtcttctggacttggatgttctccacctacttcatggagaaatgggctccccggcaggacgacatgcttttctatgtgcgccggaagctggcgtactccggcagcgaaagcggtgcagacgggaggaaggcagctgagcctgaggtggaggtggaggtgtaccggcgggactccaagaagctgccaggcctgggagaccctgacatcgactgggaggagagcgtctgcctgaatctcatcctgcagaagctggactacatggtgacctgtgcggtgtgcacacgtgctgacggcggggacattcacatccataagaagaaatctcagcaagtgttcgcgtcccccagtaaacaccccatggacagcaagggggaggagtccaagatcagctaccccaacatcttcttcatgattgacagcttcgaggaggtgttcagcgacatgaccgtaggggaaggagagatggtctgtgtggagctggtggctagtgacaaaaccaacacgttccagggggtcatctttcagggctccatccgctacgaggcgctcaagaaggtgtatgacaaccgggtgagcgtggccgcccgcatggcacagaagatgtcgtttggcttctacaagtacagcaacatggagtttgtgcgcatgaagggcccccagggcaagggccacgccgagatggcggtcagccgagtgtctacaggtgacacatccccctgtgggactgaagaggactccagcccagcttcgcccatgcacgagcgggtgacctccttcagcacaccccccaccccagaacggaacaaccggcctgccttcttctccccatccctcaagaggaaggtgccccggaaccggatcgctgagatgaagaagtcgcactcggccaacgacagcgaggagttcttccgggaggacgacggtggagccgatctgcacaatgcaaccaacctgcggtctcggtccctgtcgggcacaggacggtccctggtcgggtcctggctgaagctgaacagagcagatggaaacttccttctctatgcacacttaacctacgtcacgttgccgctgcatcggattttaacagacatcctggaagttcggcagaagcccatcctgatgacctagccgcgtgcggagcctgcgcagagccccggccgggcccagccctcggagtgctgccaagtgcctacctgtccaccgccaccggggtctgcgatggcacgccagtgctggagccgcagccaggcgaggccactcgactcccggggccggggccgactccacgaacaccagcccaaactgaagtgcctcttccctcccctgctggcgctgctccgccctgtgccccccgcccatcgccccccacccatctctggagagccctctgcacccaaagaggactagagatgccgagcggccatgagagagagcggaaggagcagctgatgcccagagcggggccagagcggcgggtctatgttcacgtccccccagcagcaggcggaaccacccagccagggcactcagtgcattggactgtccacatgttcttgaggaaagccggtggaagattctggaatgccgtgcggatgaacttcagcacccgagtcagtcccagctcatcctccccagtttaccactttgttctaataggagatgggaacacgagaagtttgatggctttgccctgggctgggaatacctcacccacgcccagttccagaaaggcctccagctgagcagacggccccgatcccgccagaacggccttttgcttccagccaaagaacaccgccaacacgcacacctccaacctgggacatcccacgctgggcctcgcacggaggaacctgcagaatttggattctgagggtagtcgggaggcctcggtagccaggcagaacaggatatctgccaaagggtgtctgatgtggggtggggctggcatcctcccaggaaggttctaggtgggaccccgtcttctgggggcgggggtgtcttttcatcttccctggtttcctagaactcacttcctttgacggcgtgtgttggtcccatctctcagaccagctcactgaggcagaggagttgctcagaggctcacatgggcacccccattggttcgtgtgagcagctgcccagccccaggcctgccctcggcctggtccagcatgaaggcgtttccatctgcaaggatgcacggtaccctccccgagagcaggcctgtcccctacccaactgggaataaactggaagctgggtctctttgttgctatgtttttttgtttgaagttcccaggaatatttgaggggttccggtgatgtgtttagggatcttctctgtgggggaaaaggaagaggagggtcttgttctcccatctgtttattctttgggctctgggaacaggggactactttggggctttctccagacttttgtatgttgttattaaaagcgagctattgcatttcattctgcctcagtttgcccacctgtgaaatggggctgataccacctacctcactgaagtcccagggttcaagtgtgtggctgggtcagggcgtggtcacccgtcattctgcataggtcgggttggatgttagactcctgggatgccctcctcccccctcgccctttgtaataacctaatctgagaccgtgcttggtggggggatgtgaactttctctctcccccagcagtgtctgctcaggcctgacagctcagctctgcacgatttcatgttcctaaacccatgtcttagggcagcacagagccaggtcatgtcatgccccaaagtgtggggacagagcctcagggagccccgagcatggtccagccccatttgagtgctctccggggatgccaaatgctgcttccaagtttgagtccatgtggctaaaatacacccatttcttcaggaactcttcccctggttgttctggggatcttgggagaaacacagccctgacagctcgtccgtgggaagatgaggcagtccaggttgtgaggagcacagcggcccgccctctgttctcagaggtgaggggcgggagaaggttgtctcctctggggccagcatttggccaagctcggaggcttggccagcactgctggatggctcagagcaagctgggctccccgtctgtaagatggcaaaaatgctgcccccctcacagggtgaccatgaggaccagtcacagtgatgtgtgaaagggctcgctggtcacagaaacgtgtacaaatcatgctattttagagatcagccctcaatttgtaaggcatgtgaacagggcacgcggtgggctggtggtttcatagccgacacacagcgcctaccatgtgcagctgcctgtccgaccccatcttacagacgagaaaaccagcacacaggcaccaaggaactgtccggaactaacagcaggggccggcgatgggagtcaaacccaggcacgcggcctggcctgcatgctgagccacatggtgctgtccggacagatggacagacactcggtggagtctgcctttctcaggccctaaatccctctccaaagggtacttgcgatgccggatttaaaacttgctcagagccacttagccacttgagaaccagacagtaaggtgttactcccaggtttgtttttccaaagtaacagatgacatgtggaataaagtaatagagtaacaagtggcagggccagaaccagggtccccaaagtcctggtgttggcacatttgtacttcttgtaagaccatctttaatttttctgggaacacacctgccttttgtgtaatgcggggaagactaatgcatggtgacacctagttttcctcaacaggacacttgatcccaaaacccctttaagaccttaggtttcctcagcggaaaactgtactttaatcccaaaccccctttaagacatattggggctgggcgcagtggctcacgcctgtaatcccagcactttgggaggctgagatgggtggatcacctgagatcaggagttcaagaccagcctgactaacatgctgaaaccccatgtctactaaagatagaaaaattagctggacatggtggcaggcacctgtaatcccagctactcggaaggctgaggaaggagaatcacttgaacctagtaggcagaggttgcagtgagccgagatcacgccattgcattctagcctgggcaacgagagcgaaactctgtctcaaaaaaaaaaaa

SEQ ID NO: 331752 - DNA, 2957 bp, Homo sapiens
  misc_feature (2823)..(2823): n is a, c, g, or t
ttcccggcttccagcccagacaccagccagccagtggcgttcctggctcctcgggattttccttttcctccgaagctgctgattcatccccaggctggagtcaggctcagctgtggggctgggagcatgggctctcaggctgctgctgagtggaggaactgggcctcctgggaggtgtcctccagcctctctggatgctccatggggtgcttcaaggatgaccgcatcgtcttctggacttggatgttctccacctacttcatggagaaatgggctccccggcaggacgacatgcttttctatgtgcgccggaagctggcgtactccggcagcgaaagcggtgcagacgggaggaaggcagctgagcctgaggtggaggtggaggtgtaccggcgggactccaagaagctgccaggcctgggagaccctgacatcgactgggaggagagcgtctgcctgaatctcatcctgcagaagctggactacatggtgacctgtgcggtgtgcacacgtgctgacggcggggacattcacatccataagaagaaatctcagcaagtgttcgcgtcccccagtaaacaccccatggacagcaagggggaggagtccaagatcagctaccccaacatcttcttcatgattgacagcttcgaggaggtgttcagcgacatgaccgtaggggaaggagagatggtctgtgtggagctggtggctagtgacaaaaccaacacgttccagggggtcatctttcagggctccatccgctacgaggcgctcaagaaggtgtatgacaaccgggtgagcgtggccgcccgcatggcacagaagatgtcgtttggcttctacaagtacagcaacatggagtttgtgcgcatgaagggcccccagggcaagggccacgccgagatggcggtcagccgagtgtctacaggtgacacatccccctgtgggactgaagaggactccagcccagcttcgcccatgcacgagcgggtgacctccttcagcacaccccccaccccagaacggaacaaccggcctgccttcttctccccatccctcaagaggaaggtgccccggaaccggatcgctgagatgaagaagtcgcactcggccaacgacagcgaggagttcttccgggaggacgacggtggagccgatctgcacaatgcaaccaacctgcggtctcggtccctgtcgggcacaggacggtccctggtcgggtcctggctgaagctgaacagagcagatggaaacttccttctctatgcacacttaacctacgtcacgttgccgctgcatcggattttaacagacatcctggaagttcggcagaagcccatcctgatgacctagccgcgtgcggagcctgcgcagagccccggccgggcccagccctcggagtgctgccaagtgcctacctgtccaccgccaccggggtctgcgatggcacgccagtgctggagccgcagccaggcgaggccactcgactcccggggccggggccgactccacgaacaccagcccaaactgaagtgcctcttccctcccctgctggcgctgctccgccctgtgccccccgcccatcgccccccacccatctctggagagccctctgcacccaaagaggactagagatgccgagcggccatgagagagagcggaaggagcagctgatgcccagagcggggccagagcggcgggtctatgttcacgtccccccagcagcaggcggaaccacccagccagggcactcagtgcattggactgtccacatgttcttgaggaaagccggtggaagattctggaatgccgtgcggatgaacttcagcacccgagtcagtcccagctcatcctccccagtttaccactttgttctaataggagatgggaacacgagaagtttgatggctttgccctgggctgggaatacctcacccacgcccagttccagaaaggcctccagctgagcagacggccccgatcccgccagaacggccttttgcttccagccaaagaacaccgccaacacgcacacctccaacctgggacatcccacgctgggcctcgcacggaggaacctgcagaatttggattctgagggtagtcgggaggcctcggtagccaggcagaacaggatatctgccaaagggtgtctgatgtggggtggggctggcatcctcccaggaaggttctaggtgggaccccgtcttctgggggcgggggtgtcttttcatcttccctggtttcctagaactcacttcctttgacggcgtgtgttggtcccatctctcagaccagctcactgaggcagaggagttgctcagaggctcacatgggcacccccattggttcgtgtgagcagctgcccagccccaggcctgccctcggcctggtccagcatgaaggcgtttccatctgcaaggatgcacggtaccctccccgagagcaggcctgtcccctacccaactgggaataaactggaagctgggtctctttgttgctatgtttttttgtttgaagttcccaggaatatttgaggggttccggtgatgtgtttagggatcttctctgtgggggaaaaggaagaggagggtcttgttctcccatctgtttattctttgggctctgggaacaggggactactttggggctttctccagacttttgtatgttgttattaaaagcgagctattgcatttcaaaaaaaaaaaacaaaaaaaacaaaaaaaaaatcctccggggggaatctatattgcggggtcgcgggaaaaagagaggggtattgagaattgcgggcccattggcgccaatacccggtgntcccgtagcaccagcgttttctctgtcgtcaccaagggtgggaaaactcctcgccggggtcccccaatataggggaggcggatttaatttcccaaataaccccaggtgtaacccggcttatggagcgagagaac

SEQ ID NO: 331753 - DNA, 1634 bp, Homo sapiens
ttcccggcttccagcccagacaccagccagccagtggcgttcctggctcctcgggattttccttttcctccgaagctgctgattcatccccaggctggagtcaggctcagctgtggggctgggagcatgggctctcaggctgctgctgagtggaggaactgggcctcctgggaggtgtcctccagcctctctggatgctccatggggtgcttcaaggatgaccgcatcgtcttctggacttggatgttctccacctacttcatggagaaatgggctccccggcaggacgacatgcttttctatgtgcgccggaagctggcgtactccggcagcgaaagcggtgcagacgggaggaaggcagctgagcctgaggtggaggtggaggtgtaccggcgggactccaagaagctgccaggcctgggagaccctgacatcgactgggaggagagcgtctgcctgaatctcatcctgcagaagctggactacatggtgacctgtgcggtgtgcacacgtgctgacggcggggacattcacatccataagaagaaatctcagcaagtgttcgcgtcccccagtaaacaccccatggacagcaagggggaggagtccaagatcagctaccccaacatcttcttcatgattgacagcttcgaggaggtgttcagcgacatgaccgtaggggaaggagagatggtctgtgtggagctggtggctagtgacaaaaccaacacgttccagggggtcatctttcagggctccatccgctacgaggcgctcaagaaggtgtatgacaaccgggtgagcgtggccgcccgcatggcacagaagatgtcgtttggcttctacaagtacagcaacatggagtttgtgcgcatgaagggcccccagggcaagggccacgccgagatggcggtcagccgagtgtctacaggtgacacatccccctgtgggactgaagaggactccagcccagcttcgcccatgcacgagcgggtgacctccttcagcacaccccccaccccagaacggaacaaccggcctgccttcttctccccatccctcaagaggaaggtgccccggaaccggatcgctgagatgaagaagtcgcactcggccaacgacagcgaggagttcttccgggaggacgacggtggagccgatctgcacaatgcaaccaacctgcggtctcggtccctgtcgggcacaggacggtccctggtcgggtcctggctgaagctgaacagagcagatggaaacttccttctctatgcacacttaacctacgtcacgttgccgctgcatcggattttaacagacatcctggaagttcggcagaagcccatcctgatgacctagccgcgtgcggagcctgcgcagagccccggccgggcccagccctcggagtgctgccaagtgcctacctgtccaccgccaccggggtctgcgatggcacgccagtgctggagccgcagccaggcgaggccactcgactcccggggccggggccgactccacgaacaccagcccaaactgaagggggccttttttcccctggtgggggcttgttcgggcctgcgccccgagaaattgcccccacccaattttttggaaggcctttgtgccacaaaaaagta

SEQ ID NO: 331754 - DNA, 1400 bp, Homo sapiens
ttcccggcttccagcccagacaccagccagccagtggcgttcctggctcctcgggattttccttttcctccgaagctgctgattcatccccaggctggagtcaggctcagctgtggggctgggagcatgggctctcaggctgctgctgagtggaggaactgggcctcctgggaggtgtcctccagcctctctggatgctccatggggtgcttcaaggatgaccgcatcgtcttctggacttggatgttctccacctacttcatggagaaatgggctccccggcaggacgacatgcttttctatgtgcgccggaagctggcgtactccggcagcgaaagcggtgcagacgggaggaaggcagctgagcctgaggtggaggtggaggtgtaccggcgggactccaagaagctgccaggcctgggagaccctgacatcgactgggaggagagcgtctgcctgaatctcatcctgcagaagctggactacatggtgacctgtgcggtgtgcacacgtgctgacggcggggacattcacatccataagaagaaatctcagcaagtgttcgcgtcccccagtaaacaccccatggacagcaagggggaggagtccaagatcagctaccccaacatcttcttcatgattgacagcttcgaggaggtgttcagcgacatgaccgtaggggaaggagagatggtctgtgtggagctggtggctagtgacaaaaccaacacgttccagggggtcatctttcagggctccatccgctacgaggcgctcaagaaggtgtatgacaaccgggtgagcgtggccgcccgcatggcacagaagatgtcgtttggcttctacaagtacagcaacatggagtttgtgcgcatgaagggcccccagggcaagggccacgccgagatggcggtcagccgagtgtctacaggtgacacatccccctgtgggactgaagaggactccagcccagcttcgcccatgcacgagcgggtgacctccttcagcacaccccccaccccagaacggaacaaccggcctgccttcttctccccatccctcaagaggaaggtgccccggaaccggatcgctgagatgaagaagtcgcactcggccaacgacagcgaggagttcttccgggaggacgacggtggagccgatctgacagtgcaaccaaactgagggctcggcctgtgggggaccggacggcccggtcggccggctgagcgaacgagcgaagaaacttcttctcaaggacaataaccagtcaagtgccggggtcggattaacaaccccggagttgggaaactccgaacaaagggggtagcgggaaccgcgggcacccgagggcagacacggccgcccgtgtgagcctgaagacagagcacacggggcaacca

SEQ ID NO: 331755 - DNA, 836 bp, Homo sapiens
gggctgcgggccgggccgcccgccctccccgccgccgccgcccccgagcctgcgggcggcgccgaggccgaggagcgctcgctgcagcacatgctgcgtgccatagcggaggagcgcggccgtcttagcctgcgccgcgaggtctgcggcctcgggtgcttcaaggatgaccgcatcgtcttctggacttggatgttctccacctacttcatggagaaatgggctccccggcaggacgacatgcttttctatgtgcgccggaagctggcgtactccggcagcgaaagcggtgcagacgggaggaaggcagctgagcctgaggtggaggtggaggtgtaccggcgggactccaagaagctgccaggcctgggagaccctgacatcgactgggaggagagcgtctgcctgaatctcatcctgcagaagctggactacatggtgacctgtgcggtgtgcacacgtgctgacggcggggacattcacatccataagaagaaatctcagcaagtgttcgcgtcccccagtaaacaccccatggacagcaagggggaggagtccaagatcagctaccccaacatcttcttcatgattgacagcttcgaggagctttgacggcgtgtgttggtcccatctctcagaccagctcactgaggcagaggagttgctcagaggctcacatgggcacccccattggttcgtgtgagcagctgcccagccccaggcctgccctcggcctggtccagcatgaaggcgtttccatctgcaaggatgcacggtaccctccccgagagcaggcctgtcccctacccaactgggaataaactggaagctgggtc

SEQ ID NO: 331756 - DNA, 295 bp, Homo sapiens
ggccatttaatcctcttcccctcgtgcatatgagagtttccatattttatttaatgagaaatttttgttcaaaggtatctgactttgtaagctataacaagtcccttggaaccaaaatcagacccctgagtcctcagctttttgtcctggcttctctcagtgactttcttctccattagcatatcaacgggtaggcatggaaattctgtgctttgccccctattgaaaagtcaatctctgctgtgaaagttaagatttttatttgagatcaaaatacgtcttgtggcaagttaaa

SEQ ID NO: 331757 - DNA, 303 bp, Homo sapiens
ccttgtgaaattttgtattaacagaattgaggctggattatagttttggcaaggctctgtcttcctctgatttacttccattcctaggccatacttttccagttgttccagatgaaagcctggggtgttcagtgtagcccattcctctggtaggtcctgaaatctaatccttctctgcttagcaagatgagaatgcccaaaactcattttgtttaacatgttcctttgttttctttacttcttttgaatgggtagttagttttagaggcttggttatatttaattccccagaaggcacgcaat

SEQ ID NO: 331758 - DNA, 419 bp, Homo sapiens
atggaacacattaaaacatcagaacagaacctcaggtagttacagtagagtgatcatgtcatctcttaagccagccaaggtatgaaattaaaatattggctagtcttaaacatatagaattaatttcaggaaggctttgtcaatacttgctggatatttacagataatctaatagcatacactttttaaagctacatgactcatagaagtcaatgtaaaagggggtaagatggttttgtttgagtgtagcaggtattatttacatctctggaagtgttgctgataagagataggtttgaatctgttcattacatatgaatattggttgtgttttttttcaaaaaattatatggttgcagtttgaattttgaaatcaatttactggtgatgtcagcattttataaccctgtggaaatgaa

SEQ ID NO: 331759 - DNA, 1944 bp, Homo sapiens
cacacccagcttggacattccttttttagtttgttctgatttgaattataaaacccatctcagtgtaggaattcagagtcattctagaaggggcttccattaaaaattaaagggagcaaaagaattttttcacgggtattagctattatgttcctttgttccagtaactttacctggtgaagattaaccctgaaaccagcctagaaagtagattcatttcccagaagcttttaaaaaggaactctggagccaaatgaaattgggttgtgagtttaatgaaaatcaggcagaaggccccaaaaaagcctaactgagcctgtttcttcctcttccttcctgtgttttcaaggaaggatacctatgtgaaataatttggagggtattttttatagactaaggtttgtgttctcttagcccagagacacagagaaagttaaagatggaaggtacataggcgcagaagagttcaaacttcattacagctttgtcttagtgatgcttcctccctcctctcatcactttctctgaaatagacaaaattggtcacaatataagacagtgtttattgatgcctgctaggtttcatactcattatcttctgaaactttatagcaaatagggagcaaataatctgtcatttattaaatggaaaaataaaagatgaagaaaaaagaaaaatgaaggcttagagcaatgtgtaaattgcagctaacaggagacaaagttatgaagcatgaaatgccaattctctccatctttcccttcagcattgattccttccttacatattgtagttaaaaaaaaaaatcagttatcacaaacaagttctgtgtgacctacaagaaacagctaagcatgctaaaggatttttgtcttgaaccggaggcatctccgtgggcggcagggagatgcatgggcggtgggtggggttcggggttcctctggcctttcaaatgtgtgcccttccctgtgcttgcttttccacctggtaaactacctagggattagcagctgcttcagttctcttactgtgtttttgtctttgttaatgatcctgtgagaattctttctgtaagttctttactgccatttccttgtgtagagagagttttgtccttttgtttttcaggtacttctagttctgtatctttgtggatgtttagctagagccatactgtgtttttttttttccatgtctgccccatctgttgaaacaaaacagatcttctatgtgtgctgtcagattgtttttagaaagcaaccgaggttttacacttatgttcttaagactcatgttttacagcatgcagaatacactttattttctgaagctttttgtttttgtaagccagataaatgacttatttagttgtaatttgagatataatggaattataattatcttaaaattattaggctaaatagttgattgtatttatttaaaaactacttttttgtactttttaataacaatacttgtttgggaatattctgttaactccttttcactgcagtaaatctttgtcttcttttcagtatgagaatttccacaaacagctctaaatgcaattttctccctgctcagccttttctatcatatagcacacttgtattataatttatcaatttgcatttgcatatgccatggccaagtggtgatctttgagaggttttggtaggtaagaaaggaggactctatgcatgtgtgatggcagtcgggggtggtaatttgggaacacttcatctacctttgttcctttgtttgtactgttttctttaacctgtggaatgttttcccacttcccctgctcaaatcccaccagccaacagcttcttcagctacaactgtagcattcctctgcagtctctcctttgtctactttctttcatagtgactgcatctgacctattcttggcatgccatatggaatgatccagtcctaa

SEQ ID NO: 331760 - DNA, 581 bp, Homo sapiens
ctggaatggggtatctgtaaccaagacagattaaaagcagcagcatatgggtttccagccttcccctcttctgtttctctgtggtcctcaactaaagaatgaatcatgactattctcccatactgttttagctactcagtgacaccgcactgaaacttgatcctttttacactgtggacatttctttaatattttttttcctaagtagagacagggtctcactacattgctcaggctagtcttgaactccgggtctccagcaatcctcctctcacctcagcctcctcccaaagtgctgggattacaggctaacaccccagcccacccccacccccgcttttttttttttttttttaaagagatggagtctcactacgttgcccaggctgacctcaaactcctaggctgaagcgatcttcccacctcaccctcctgagtagctgagatgacaggcatgtgccaccacacccagcttggacattccttttttagtttgttctgatttgaattataaaacccatctcagtgtaggaattcagagtcattctagaaggggcttccattaaaaattaaagggagca

SEQ ID NO: 331761 - DNA, 473 bp, Homo sapiens
ctcttccttcctgtgttttcaaggaaggatacctatgtgaaataatttggagggtattttttatagactaaggtttgtgttctcttagcccagagacacagagaaagttaaagatggaaggtacataggcgcagaagagttcaaacttcattacagctttgtcttagtgatgcttcctccctcctctcatcactttctctgaaatagacaaaattggtcacaatataagacagtgtttattgatgcctgctaggtttcatactcattatcttctgaaactttatagcaaatagggagcaaataatctgtcatttattaaatggaaaaataaaagatgaagaaaaaagaaaaatgaaggcttagagcaatgtgtaaattgcagctaacaggagacaaagttatgaagcatgaaatgccaattctctccatctttcccttcagcattgattccttccttacatattgtagttaaa

SEQ ID NO: 331762 - DNA, 527 bp, Homo sapiens
ccttctcacagaggacaccttgataagagcatgttgctgtgatgacttgtttccttgtctgcctctcctccccaggaggtggaaagtcctagagacagaagttctatctacttttgtgtctttagctctagcacagggcctgctgtagaataggcatttgatacatagttgttacaggaatgaaataacaaaggataagatggatttaaatttctaaattatggggttcctttatgttttgaaattttgtcaatcttaaatcgtgatcagtacacaaatgtctgatgagtcttgacttgtaagctccagtctttgtagaagtgtgttttcctgtgagtttttgaagtgctgtattttattaactggcattatatggattttgctcggtagccagcatgcagaagcataactggcagaagtggccttcccatagggagtgcttgacttttaatggattattgtcacaaggtgtataggttgatttcctcaaaggtgagtgatggtttctttctcaggaagacaggtga

SEQ ID NO: 331763 - DNA, 2144 bp, Homo sapiens
  misc_feature (13)..(13): n is a, c, g, or t
  misc_feature (26)..(27): n is a, c, g, or t
  misc_feature (31)..(31): n is a, c, g, or t
taaatgcaggctngtacggtccgganntttnggatagcagctgccgaagtcagttccttgtggagccggagctgggcgcggattcgccgaggcaccgaggcactcagaggaggcgccatgtcagaaccggctggggatgtccgtcagaacccatgcggcagcaaggcctgccgccgcctcttcggcccagtggacagcgagcagctgagccgcgactgtgatgcgctaatggcgggctgcatccaggaggcccgtgagcgatggaacttcgactttgtcaccgagacaccactggagggtgacttcgcctgggagcgtgtgcggggccttggcctgcccaagctctaccttcccacggggccccggcgaggccgggatgagttgggaggaggcaggcggcctggcacctcacctgctctgctgcaggggacagcagaggaagaccatgtggacctgtcactgtcttgtacccttgtgcctcgctcaggggagcaggctgaagggtccccaggtggacctggagactctcagggtcgaaaacggcggcagaccagcatgacagatttctaccactccaaacgccggctgatcttctccaagaggaagccctaatccgcccacaggaagcctgcagtcctggaagcgcgagggcctcaaaggcccgctctacatcttctgccttagtctcagtttgtgtgtcttaattattatttgtgttttaatttaaacacctcctcatgtacataccctggccgccccctgccccccagcctctggcattagaattatttaaacaaaaactaggcggttgaatgagaggttcctaagagtgctgggcatttttattttatgaaatactatttaaagcctcctcatcccgtgttctccttttcctctctcccggaggttgggtgggccggcttcatgccagctacttcctcctccccacttgtccgctgggtggtaccctctggaggggtgtggctccttcccatcgctgtcacaggcggttatgaaattcaccccctttcctggacactcagacctgaattctttttcatttgagaagtaaacagatggcactttgaaggggcctcaccgagtgggggcatcatcaaaaactttggagtcccctcacctcctctaaggttgggcagggtgaccctgaagtgagcacagcctagggctgagctggggacctggtaccctcctggctcttgatacccccctctgtcttgtgaaggcagggggaaggtggggtcctggagcagaccaccccgcctgccctcatggcccctctgacctgcactggggagcccgtctcagtgttgagccttttccctctttggctcccctgtaccttttgaggagccccagctacccttcttctccagctgggctctgcaattcccctctgctgctgtccctcccccttgtcctttcccttcagtaccctctcagctccaggtggctctgaggtgcctgtcccacccccacccccagctcaatggactggaaggggaagggacacacaagaagaagggcaccctagttctacctcaggcagctcaagcagcgaccgccccctcctctagctgtgggggtgagggtcccatgtggtggcacaggcccccttgagtggggttatctctgtgttaggggtatatgatgggggagtagatctttctaggagggagacactggcccctcaaatcgtccagcgaccttcctcatccaccccatccctccccagttcattgcactttgattagcagcggaacaaggagtcagacattttaagatggtggcagtagaggctatggacagggcatgccacgtgggctcatatggggctgggagtagttgtctttcctggcactaacgttgagcccctggaggcactgaagtgcttagtgtacttggagtattggggtctgaccccaaacaccttccagctcctgtaacatactggcctggactgttttctctcggctccccatgtgtcctggttcccgtttctccacctagactgtaaacctctcgagggcagggaccacaccctgtactgttctgtgtctttcacagctcctcccacaatgctgaatatacagcaggtgctcaataaatgattcttagtgacttta

SEQ ID NO: 331764 - DNA, 389 bp, Homo sapiens
ggtgagtagttgtctttcccagccccatatgagcccacgtggcatgccctgtccatagcctcttatggacagggcatgccacgtgggctcatatggggctgggagtagttgtctttcctggcactaacgttgagcccctggaggcactgaagtgcttagtgtacttggagtattggggtctgaccccaaacaccttccagctcctgtaacatactggcctggactgttttctctcggctccccatgtgtcctggttcccgtttctccacctagactgtaaacctctcgagggcagggaccacaccctgtactgttctgtgtctttcacagctcctcccacaatgctgaatatacagcaggtgctcaataaatgattcttagtgacttta

SEQ ID NO: 331765 - DNA, 414 bp, Homo sapiens
  misc_feature (16)..(16): n is a, c, g, or t
  misc_feature (404)..(404): n is a, c, g, or t
tgatctagaggatccnaagctctggaaaaggggcctcaccgagtgggggcatcatcaaaaactttggagtcccctcacctcctctaaggttgggcagggtgaccctgaagtgagcacagcctagggctgagctggggacctggtaccctcctggctcttgatacccccctctgtcttgtgaaggcagggggaaggtggggtcctggagcagaccaccccgcctgccctcatggcccctctgacctgcactggggagcccgtctcagtgttgagccttttccctctttggctcccctgtaccttttgaggagccccagctacccttcttctccagctgggctctgcaattcccctctgctgctgtccctcccccttgtccagagcttgggatactcaggaatcanctatcacgaa

SEQ ID NO: 331766 - DNA, 892 bp, Homo sapiens
accaggacacatggggagccgagagaaaacagtatggacagggcatgccacgtgggctcatatggggctgggagtagttgtctttcctggcactaacgttgagcccctggaggcactgaagtgcttagtgtacttggagtattggggtctgaccccaaacaccttccagctcctgtaacatactggcctggactgttttctctcggctccccatgtgtcctggttcccgtttctccacctagactgtaaacctctcgagggcagggaccacaccctgtactgttctgtgtctttcacagctcctcccacaatgctgaatatacagcaggtgctcaataaatgattcttagtgactttaaaaaaaaaaaaaaaaaaaaaaaaaaaaaaaaaaaaaaaaaaaaaaaaaaaaaaaaaaaaaaaaaaaaaaaaaaaaaaagggggggaggctcgaaaagatttccctctcgaggggagcacacgttatttgatggcagacacacttttttttgagaggagggggcgcgccatactgatagcgactgtataatgatacacgtgactgagggggcgggtttatatatagagacgatgtgattggggatgaaaagagttatgaaagaggcctttgtttagatgggagacgcgccatcccatacactctctggcggagggagggagcagcccacaagttgtggggaggaacaaactattcctcacgcgaggaaagattattgatagagatgacagctcacggcagagataaaatcaatacacgaagaccttctcggcgacggctgttttcgcggctggtttgtgtgcagaagagagcgtgtagtgagatttgatggcttggagtaagaatagaacaacttggatcgccgaagctgagcag

SEQ ID NO: 331767 - DNA, 2678 bp, Homo sapiens
  misc_feature (13)..(13): n is a, c, g, or t
  misc_feature (26)..(27): n is a, c, g, or t
  misc_feature (31)..(31): n is a, c, g, or t
taaatgcaggctngtacggtccgganntttnggatagcagctgccgaagtcagttccttgtggagccggagctgggcgcggattcgccgaggcaccgaggcactcagaggaggcgccatgtcagaaccggctggggatgtccgtcagaacccatgcggcagcaaggcctgccgccgcctcttcggcccagtggacagcgagcagctgagccgcgactgtgatgcgctaatggcgggctgcatccaggaggcccgtgagcgatggaacttcgactttgtcaccgagacaccactggagggtgacttcgcctgggagcgtgtgcggggccttggcctgcccaagctctaccttcccacggggccccggcgaggccgggatgagttgggaggaggcaggcggcctggcacctcacctgctctgctgcaggggacagcagaggaagaccatgtggacctgtcactgtcttgtacccttgtgcctcgctcaggggagcaggctgaagggtccccaggtggacctggagactctcagggtcgaaaacggcggcagaccagcatgacagatttctaccactccaaacgccggctgatcttctccaagaggaagccctaatccgcccacaggaagcctgcagtcctggaagcgcgagggcctcaaaggcccgctctacatcttctgccttagtctcagtttgtgtgtcttaattattatttgtgttttaatttaaacacctcctcatgtacataccctggccgccccctgccccccagcctctggcattagaattatttaaacaaaaactaggcggttgaatgagaggttcctaagagtgctgggcatttttattttatgaaatactatttaaagcctcctcatcccgtgttctccttttcctctctcccggaggttgggtgggccggcttcatgccagctacttcctcctccccacttgtccgctgggtggtaccctctggaggggtgtggctccttcccatcgctgtcacaggcggttatgaaattcaccccctttcctggacactcagacctgaattctttttcatttgagaagtaaacagatggcactttgaaggggcctcaccgagtgggggcatcatcaaaaactttggagtcccctcacctcctctaaggttgggcagggtgaccctgaagtgagcacagcctagggctgagctggggacctggtaccctcctggctcttgatacccccctctgtcttgtgaaggcagggggaaggtggggtcctggagcagaccaccccgcctgccctcatggcccctctgacctgcactggggagcccgtctcagtgttgagccttttccctctttggctcccctgtaccttttgaggagccccagctacccttcttctccagctgggctctgcaattcccctctgctgctgtccctcccccttgtcctttcccttcagtaccctctcagctccaggtggctctgaggtgcctgtcccacccccacccccagctcaatggactggaaggggaagggacacacaagaagaagggcaccctagttctacctcaggcagctcaagcagcgaccgccccctcctctagctgtgggggtgagggtcccatgtggtggcacaggcccccttgagtggggttatctctgtgttaggggtatatgatgggggagtagatctttctaggagggagacactggcccctcaaatcgtccagcgaccttcctcatccaccccatccctccccagttcattgcactttgattagcagcggaacaaggagtcagacattttaagatggtggcagtagaggctatggacagggcatgccacgtgggctcatatggggctgggagtagttgtctttcctggcactaacgttgagcccctggaggcactgaagtgcttagtgtacttggagtattggggtctgaccccaaacaccttccagctcctgtaacatactggcctggactgttttctctcggctccccatgtgtcctggttcccgtttctccacctagactgtaaacctctcgagggcagggaccacaccctgtactgttctgtgtctttcacagctcctcccacaatgctgaatatacagcaggtgctcaataaatgattcttagtgactttaaaaaaaaaaaaaaaaaaaaaaaaaaaaaaaaaaaaaaaaaaaaaaaaaaaaaaaaaaaaaaaaaaaaaaaaaaaaaaagggggggaggctcgaaaagatttccctctcgaggggagcacacgttatttgatggcagacacacttttttttgagaggagggggcgcgccatactgatagcgactgtataatgatacacgtgactgagggggcgggtttatatatagagacgatgtgattggggatgaaaagagttatgaaagaggcctttgtttagatgggagacgcgccatcccatacactctctggcggagggagggagcagcccacaagttgtggggaggaacaaactattcctcacgcgaggaaagattattgatagagatgacagctcacggcagagataaaatcaatacacgaagaccttctcggcgacggctgttttcgcggctggtttgtgtgcagaagagagcgtgtagtgagatttgatggcttggagtaagaatagaacaacttggatcgccgaagctgagcag

SEQ ID NO: 331768 - DNA, 2318 bp, Homo sapiens
tccttgaggcgggcccgggcggggcggttgtatatcagggccgcgctgagctgcgccagctgaggtgtgacagctgccgaagtcagttccttgtggagccggagctgggcgcggattcgccgaggcaccgaggcactcagaggaggtgagagagcggcggcagacaacaggggaccccgggccggcggcccagagccgagccaagcgtgcccgcgtgtgtccctgcgtgtccgcgaggatgcgtgttcgcgggtgtgtgctgcgttcacaggtgtttctgcggcaggcgccatgtcagaaccggctggggatgtccgtcagaacccatgcggcagcaaggcctgccgccgcctcttcggcccagtggacagcgagcagctgagccgcgactgtgatgcgctaatggcgggctgcatccaggaggcccgtgagcgatggaacttcgactttgtcaccgagacaccactggagggtgacttcgcctgggagcgtgtgcggggccttggcctgcccaagctctaccttcccacggggccccggcgaggccgggatgagttgggaggaggcaggcggcctggcacctcacctgctctgctgcaggggacagcagaggaagaccatgtggacctgtcactgtcttgtacccttgtgcctcgctcaggggagcaggctgaagggtccccaggtggacctggagactctcagggtcgaaaacggcggcagaccagcatgacagatttctaccactccaaacgccggctgatcttctccaagaggaagccctaatccgcccacaggaagcctgcagtcctggaagcgcgagggcctcaaaggcccgctctacatcttctgccttagtctcagtttgtgtgtcttaattattatttgtgttttaatttaaacacctcctcatgtacataccctggccgccccctgccccccagcctctggcattagaattatttaaacaaaaactaggcggttgaatgagaggttcctaagagtgctgggcatttttattttatgaaatactatttaaagcctcctcatcccgtgttctccttttcctctctcccggaggttgggtgggccggcttcatgccagctacttcctcctccccacttgtccgctgggtggtaccctctggaggggtgtggctccttcccatcgctgtcacaggcggttatgaaattcaccccctttcctggacactcagacctgaattctttttcatttgagaagtaaacagatggcactttgaaggggcctcaccgagtgggggcatcatcaaaaactttggagtcccctcacctcctctaaggttgggcagggtgaccctgaagtgagcacagcctagggctgagctggggacctggtaccctcctggctcttgatacccccctctgtcttgtgaaggcagggggaaggtggggtcctggagcagaccaccccgcctgccctcatggcccctctgacctgcactggggagcccgtctcagtgttgagccttttccctctttggctcccctgtaccttttgaggagccccagctacccttcttctccagctgggctctgcaattcccctctgctgctgtccctcccccttgtcctttcccttcagtaccctctcagctccaggtggctctgaggtgcctgtcccacccccacccccagctcaatggactggaaggggaagggacacacaagaagaagggcaccctagttctacctcaggcagctcaagcagcgaccgccccctcctctagctgtgggggtgagggtcccatgtggtggcacaggcccccttgagtggggttatctctgtgttaggggtatatgatgggggagtagatctttctaggagggagacactggcccctcaaatcgtccagcgaccttcctcatccaccccatccctccccagttcattgcactttgattagcagcggaacaaggagtcagacattttaagatggtggcagtagaggctatggacagggcatgccacgtgggctcatatggggctgggagtagttgtctttcctggcactaacgttgagcccctggaggcactgaagtgcttagtgtacttggagtattggggtctgaccccaaacaccttccagctcctgtaacatactggcctggactgttttctctcggctccccatgtgtcctggttcccgtttctccacctagactgtaaacctctcgagggcagggaccacaccctgtactgttctgtgtctttcacagctcctcccacaatgctgaatatacagcaggtgctcaataaatgattcttagtgacttta

SEQ ID NO: 331769 - DNA, 2107 bp, Homo sapiens
aggaaggggatggtaggagacaggagacctctaaagaccccagctgctgcaaccacagggatttcttctgttcaggcgccatgtcagaaccggctggggatgtccgtcagaacccatgcggcagcaaggcctgccgccgcctcttcggcccagtggacagcgagcagctgagccgcgactgtgatgcgctaatggcgggctgcatccaggaggcccgtgagcgatggaacttcgactttgtcaccgagacaccactggagggtgacttcgcctgggagcgtgtgcggggccttggcctgcccaagctctaccttcccacggggccccggcgaggccgggatgagttgggaggaggcaggcggcctggcacctcacctgctctgctgcaggggacagcagaggaagaccatgtggacctgtcactgtcttgtacccttgtgcctcgctcaggggagcaggctgaagggtccccaggtggacctggagactctcagggtcgaaaacggcggcagaccagcatgacagatttctaccactccaaacgccggctgatcttctccaagaggaagccctaatccgcccacaggaagcctgcagtcctggaagcgcgagggcctcaaaggcccgctctacatcttctgccttagtctcagtttgtgtgtcttaattattatttgtgttttaatttaaacacctcctcatgtacataccctggccgccccctgccccccagcctctggcattagaattatttaaacaaaaactaggcggttgaatgagaggttcctaagagtgctgggcatttttattttatgaaatactatttaaagcctcctcatcccgtgttctccttttcctctctcccggaggttgggtgggccggcttcatgccagctacttcctcctccccacttgtccgctgggtggtaccctctggaggggtgtggctccttcccatcgctgtcacaggcggttatgaaattcaccccctttcctggacactcagacctgaattctttttcatttgagaagtaaacagatggcactttgaaggggcctcaccgagtgggggcatcatcaaaaactttggagtcccctcacctcctctaaggttgggcagggtgaccctgaagtgagcacagcctagggctgagctggggacctggtaccctcctggctcttgatacccccctctgtcttgtgaaggcagggggaaggtggggtcctggagcagaccaccccgcctgccctcatggcccctctgacctgcactggggagcccgtctcagtgttgagccttttccctctttggctcccctgtaccttttgaggagccccagctacccttcttctccagctgggctctgcaattcccctctgctgctgtccctcccccttgtcctttcccttcagtaccctctcagctccaggtggctctgaggtgcctgtcccacccccacccccagctcaatggactggaaggggaagggacacacaagaagaagggcaccctagttctacctcaggcagctcaagcagcgaccgccccctcctctagctgtgggggtgagggtcccatgtggtggcacaggcccccttgagtggggttatctctgtgttaggggtatatgatgggggagtagatctttctaggagggagacactggcccctcaaatcgtccagcgaccttcctcatccaccccatccctccccagttcattgcactttgattagcagcggaacaaggagtcagacattttaagatggtggcagtagaggctatggacagggcatgccacgtgggctcatatggggctgggagtagttgtctttcctggcactaacgttgagcccctggaggcactgaagtgcttagtgtacttggagtattggggtctgaccccaaacaccttccagctcctgtaacatactggcctggactgttttctctcggctccccatgtgtcctggttcccgtttctccacctagactgtaaacctctcgagggcagggaccacaccctgtactgttctgtgtctttcacagctcctcccacaatgctgaatatacagcaggtgctcaataaatgattcttagtgacttta

SEQ ID NO: 331770 - DNA, 2268 bp, Homo sapiens
tccttgaggcgggcccgggcggggcggttgtatatcagggccgcgctgagctgcgccagctgaggtgtgacagctgccgaagtcagttccttgtggagccggagctgggcgcggattcgccgaggcaccgaggcactcagaggagaaactgcaagttgggacttgtccctaggaaaatccagttgctgccaaggtcgtgcagtcactcagccctggagtcaagccagagcaggcaggcgccatgtcagaaccggctggggatgtccgtcagaacccatgcggcagcaaggcctgccgccgcctcttcggcccagtggacagcgagcagctgagccgcgactgtgatgcgctaatggcgggctgcatccaggaggcccgtgagcgatggaacttcgactttgtcaccgagacaccactggagggtgacttcgcctgggagcgtgtgcggggccttggcctgcccaagctctaccttcccacggggccccggcgaggccgggatgagttgggaggaggcaggcggcctggcacctcacctgctctgctgcaggggacagcagaggaagaccatgtggacctgtcactgtcttgtacccttgtgcctcgctcaggggagcaggctgaagggtccccaggtggacctggagactctcagggtcgaaaacggcggcagaccagcatgacagatttctaccactccaaacgccggctgatcttctccaagaggaagccctaatccgcccacaggaagcctgcagtcctggaagcgcgagggcctcaaaggcccgctctacatcttctgccttagtctcagtttgtgtgtcttaattattatttgtgttttaatttaaacacctcctcatgtacataccctggccgccccctgccccccagcctctggcattagaattatttaaacaaaaactaggcggttgaatgagaggttcctaagagtgctgggcatttttattttatgaaatactatttaaagcctcctcatcccgtgttctccttttcctctctcccggaggttgggtgggccggcttcatgccagctacttcctcctccccacttgtccgctgggtggtaccctctggaggggtgtggctccttcccatcgctgtcacaggcggttatgaaattcaccccctttcctggacactcagacctgaattctttttcatttgagaagtaaacagatggcactttgaaggggcctcaccgagtgggggcatcatcaaaaactttggagtcccctcacctcctctaaggttgggcagggtgaccctgaagtgagcacagcctagggctgagctggggacctggtaccctcctggctcttgatacccccctctgtcttgtgaaggcagggggaaggtggggtcctggagcagaccaccccgcctgccctcatggcccctctgacctgcactggggagcccgtctcagtgttgagccttttccctctttggctcccctgtaccttttgaggagccccagctacccttcttctccagctgggctctgcaattcccctctgctgctgtccctcccccttgtcctttcccttcagtaccctctcagctccaggtggctctgaggtgcctgtcccacccccacccccagctcaatggactggaaggggaagggacacacaagaagaagggcaccctagttctacctcaggcagctcaagcagcgaccgccccctcctctagctgtgggggtgagggtcccatgtggtggcacaggcccccttgagtggggttatctctgtgttaggggtatatgatgggggagtagatctttctaggagggagacactggcccctcaaatcgtccagcgaccttcctcatccaccccatccctccccagttcattgcactttgattagcagcggaacaaggagtcagacattttaagatggtggcagtagaggctatggacagggcatgccacgtgggctcatatggggctgggagtagttgtctttcctggcactaacgttgagcccctggaggcactgaagtgcttagtgtacttggagtattggggtctgaccccaaacaccttccagctcctgtaacatactggcctggactgttttctctcggctccccatgtgtcctggttcccgtttctccacctagactgtaaacctctcgagggcagggaccacaccctgtactgttctgtgtctttcacagctcctcccacaatgctgaatatacagcaggtgctcaataaatgattcttagtgacttta

SEQ ID NO: 331771 - DNA, 2326 bp, Homo sapiens
tacctggtggcaaacaggaccctggtccttgcttgcaatagacttgcctttgttgacattatgcttgcccttcagttgcctgctctcccagtgaccttggtgtgccaggctggctgagctctgctggtgggggtcaggcctcctgtgggaaggaagcaggaagaccagctggaaggagtgagagagaccctctggtaggaagacgtcacctgaggtgacacagcaaagcccggccaggtaacatagtgtctaatctccgccgtgaccagggccttccttgtatctctgctgcaggcgccatgtcagaaccggctggggatgtccgtcagaacccatgcggcagcaaggcctgccgccgcctcttcggcccagtggacagcgagcagctgagccgcgactgtgatgcgctaatggcgggctgcatccaggaggcccgtgagcgatggaacttcgactttgtcaccgagacaccactggagggtgacttcgcctgggagcgtgtgcggggccttggcctgcccaagctctaccttcccacggggccccggcgaggccgggatgagttgggaggaggcaggcggcctggcacctcacctgctctgctgcaggggacagcagaggaagaccatgtggacctgtcactgtcttgtacccttgtgcctcgctcaggggagcaggctgaagggtccccaggtggacctggagactctcagggtcgaaaacggcggcagaccagcatgacagatttctaccactccaaacgccggctgatcttctccaagaggaagccctaatccgcccacaggaagcctgcagtcctggaagcgcgagggcctcaaaggcccgctctacatcttctgccttagtctcagtttgtgtgtcttaattattatttgtgttttaatttaaacacctcctcatgtacataccctggccgccccctgccccccagcctctggcattagaattatttaaacaaaaactaggcggttgaatgagaggttcctaagagtgctgggcatttttattttatgaaatactatttaaagcctcctcatcccgtgttctccttttcctctctcccggaggttgggtgggccggcttcatgccagctacttcctcctccccacttgtccgctgggtggtaccctctggaggggtgtggctccttcccatcgctgtcacaggcggttatgaaattcaccccctttcctggacactcagacctgaattctttttcatttgagaagtaaacagatggcactttgaaggggcctcaccgagtgggggcatcatcaaaaactttggagtcccctcacctcctctaaggttgggcagggtgaccctgaagtgagcacagcctagggctgagctggggacctggtaccctcctggctcttgatacccccctctgtcttgtgaaggcagggggaaggtggggtcctggagcagaccaccccgcctgccctcatggcccctctgacctgcactggggagcccgtctcagtgttgagccttttccctctttggctcccctgtaccttttgaggagccccagctacccttcttctccagctgggctctgcaattcccctctgctgctgtccctcccccttgtcctttcccttcagtaccctctcagctccaggtggctctgaggtgcctgtcccacccccacccccagctcaatggactggaaggggaagggacacacaagaagaagggcaccctagttctacctcaggcagctcaagcagcgaccgccccctcctctagctgtgggggtgagggtcccatgtggtggcacaggcccccttgagtggggttatctctgtgttaggggtatatgatgggggagtagatctttctaggagggagacactggcccctcaaatcgtccagcgaccttcctcatccaccccatccctccccagttcattgcactttgattagcagcggaacaaggagtcagacattttaagatggtggcagtagaggctatggacagggcatgccacgtgggctcatatggggctgggagtagttgtctttcctggcactaacgttgagcccctggaggcactgaagtgcttagtgtacttggagtattggggtctgaccccaaacaccttccagctcctgtaacatactggcctggactgttttctctcggctccccatgtgtcctggttcccgtttctccacctagactgtaaacctctcgagggcagggaccacaccctgtactgttctgtgtctttcacagctcctcccacaatgctgaatatacagcaggtgctcaataaatgattcttagtgacttta

SEQ ID NO: 331772 - DNA, 2706 bp, Homo sapiens
  misc_feature (13)..(13): n is a, c, g, or t
  misc_feature (26)..(27): n is a, c, g, or t
  misc_feature (31)..(31): n is a, c, g, or t
taaatgcaggctngtacggtccgganntttnggatagcagctgccgaagtcagttccttgtggagccggagctgggcgcggattcgccgaggcaccgaggcactcagaggaggcgccatgtcagaaccggctggggatgtccgtcagaacccatgcggcagcaaggcctgccgccgcctcttcggcccagtggacagcgagcagctgagccgcgactgtgatgcgctaatggcgggctgcatccaggaggcccgtgagcgatggaacttcgactttgtcaccgagacaccactggagggtgacttcgcctgggagcgtgtgcggggccttggcctgcccaagctctaccttcccacggggccccggcgaggccgggatgagttgggaggaggcaggcggcctggcacctcacctgctctgctgcaggggacagcagaggaagaccatgtggacctgtcactgtcttgtacccttgtgcctcgctcaggggagcaggctgaagggtccccaggtggacctggagactctcagggtcgaaaacggcggcagaccagcatgacagggagaaggggaggcaagatactgcgggaggccgcctgctgaggatcgcctttgcagagaacattccagccagcaccaagccattccgagcgaacagctgacggtcacatgatccaggcctttttctctgctttgaacggaaggcccaggatagtgtggggtttggcagtagagcatttggcctggaacccactagggaagagcttgtgtgtgtgtgtgtggggagtgctgacgtagtagtccacgccctaggctccacccccccgtactgccaactcagtaaacaaataagaagggagaaagactggagggatgccacggctactgctcttcaaggggcctgagttcgattccctgcaccgggtggtccacgatttcctataactaactccagcttgcggggtgggggtgggggaatctagcctctctagagccctagccctctgacgaggaggaggtgtagtgccctgtagcttttccccaggacccgccacatgtccctttgtctggggaatgatgccctcaccctctgcatctggctgacttctgctgtctctcctcagatttctaccactccaaacgccggctgatcttctccaagaggaagccctaatccgcccacaggaagcctgcagtcctggaagcgcgagggcctcaaaggcccgctctacatcttctgccttagtctcagtttgtgtgtcttaattattatttgtgttttaatttaaacacctcctcatgtacataccctggccgccccctgccccccagcctctggcattagaattatttaaacaaaaactaggcggttgaatgagaggttcctaagagtgctgggcatttttattttatgaaatactatttaaagcctcctcatcccgtgttctccttttcctctctcccggaggttgggtgggccggcttcatgccagctacttcctcctccccacttgtccgctgggtggtaccctctggaggggtgtggctccttcccatcgctgtcacaggcggttatgaaattcaccccctttcctggacactcagacctgaattctttttcatttgagaagtaaacagatggcactttgaaggggcctcaccgagtgggggcatcatcaaaaactttggagtcccctcacctcctctaaggttgggcagggtgaccctgaagtgagcacagcctagggctgagctggggacctggtaccctcctggctcttgatacccccctctgtcttgtgaaggcagggggaaggtggggtcctggagcagaccaccccgcctgccctcatggcccctctgacctgcactggggagcccgtctcagtgttgagccttttccctctttggctcccctgtaccttttgaggagccccagctacccttcttctccagctgggctctgcaattcccctctgctgctgtccctcccccttgtcctttcccttcagtaccctctcagctccaggtggctctgaggtgcctgtcccacccccacccccagctcaatggactggaaggggaagggacacacaagaagaagggcaccctagttctacctcaggcagctcaagcagcgaccgccccctcctctagctgtgggggtgagggtcccatgtggtggcacaggcccccttgagtggggttatctctgtgttaggggtatatgatgggggagtagatctttctaggagggagacactggcccctcaaatcgtccagcgaccttcctcatccaccccatccctccccagttcattgcactttgattagcagcggaacaaggagtcagacattttaagatggtggcagtagaggctatggacagggcatgccacgtgggctcatatggggctgggagtagttgtctttcctggcactaacgttgagcccctggaggcactgaagtgcttagtgtacttggagtattggggtctgaccccaaacaccttccagctcctgtaacatactggcctggactgttttctctcggctccccatgtgtcctggttcccgtttctccacctagactgtaaacctctcgagggcagggaccacaccctgtactgttctgtgtctttcacagctcctcccacaatgctgaatatacagcaggtgctcaataaatgattcttagtgacttta

SEQ ID NO: 331773 - DNA, 1474 bp, Homo sapiens
  misc_feature (13)..(13): n is a, c, g, or t
  misc_feature (26)..(27): n is a, c, g, or t
  misc_feature (31)..(31): n is a, c, g, or t
  misc_feature (1464)..(1464): n is a, c, g, or t
taaatgcaggctngtacggtccgganntttnggatagcagctgccgaagtcagttccttgtggagccggagctgggcgcggattcgccgaggcaccgaggcactcagaggaggcgccatgtcagaaccggctggggatgtccgtcagaacccatgcggcagcaaggcctgccgccgcctcttcggcccagtggacagcgagcagctgagccgcgactgtgatgcgctaatggcgggctgcatccaggaggcccgtgagcgatggaacttcgactttgtcaccgagacaccactggagggtgacttcgcctgggagcgtgtgcggggccttggcctgcccaagctctaccttcccacggggccccggcgaggccgggatgagttgggaggaggcaggcggcctggcacctcacctgctctgctgcaggggacagcagaggaagaccatgtggacctgtcactgtcttgtacccttgtgcctcgctcaggggagcaggctgaagggtccccaggtggacctggagactctcagggtcgaaaacggcggcagaccagcatgacagatttctaccactccaaacgccggctgatcttctccaagaggaagccctaatccgcccacaggaagcctgcagtcctggaagcgcgagggcctcaaaggcccgctctacatcttctgccttagtctcagtttgtgtgtcttaattattatttgtgttttaatttaaacacctcctcatgtacataccctggccgccccctgccccccagcctctggcattagaattatttaaacaaaaactaggcggttgaatgagaggttcctaagagtgctgggcatttttattttatgaaatactatttaaagcctcctcatcccgtgttctccttttcctctctcccggaggttgggtgggccggcttcatgccagctacttcctcctccccacttgtccgctgggtggtaccctctggaggggtgtggctccttcccatcgctgtcacaggcggttatgaaattcaccccctttcctggacactcagacctgaattctttttcatttgagaagtaaacagatggcactttgaaggggcctcaccgagtgggggcatcatcaaaaactttggagtcccctcacctcctctaaggttgggcagggtgaccctgaagtgagcacagcctagggctgagctggggacctggtaccctcctggctcttgatacccccctctgtcttgtgaaggcagggggaaggtggggtcctggagcagaccaccccgcctgccctcatggcccctctgacctgcactggggagcccgtctcagtgttgagccttttccctctttggctcccctgtaccttttgaggagccccagctacccttcttctccagctgggctctgcaattcccctctgctgctgtccctcccccttgtccagagcttgggatactcaggaatcanctatcacgaa

SEQ ID NO: 331774 - DNA, 1819 bp, Homo sapiens
  misc_feature (32)..(32): n is a, c, g, or t
tctagaggatcgccaagaacagacactctggnggtggggcaggcctgtggttggtcactgccgtcaggaacccctcaagagacagagtggacgttccccgagttcttcctgttctcagcagtcggccccattggccccagggaagggtgtcctggccccccactgtcttcctcagttgggcagctccgccgcgtcctcttcttcttggcctggctgacttctgctgtctctcctcagatttctaccactccaaacgccggctgatcttctccaagaggaagccctaatccgcccacaggaagcctgcagtcctggaagcgcgagggcctcaaaggcccgctctacatcttctgccttagtctcagtttgtgtgtcttaattattatttgtgttttaatttaaacacctcctcatgtacataccctggccgccccctgccccccagcctctggcattagaattatttaaacaaaaactaggcggttgaatgagaggttcctaagagtgctgggcatttttattttatgaaatactatttaaagcctcctcatcccgtgttctccttttcctctctcccggaggttgggtgggccggcttcatgccagctacttcctcctccccacttgtccgctgggtggtaccctctggaggggtgtggctccttcccatcgctgtcacaggcggttatgaaattcaccccctttcctggacactcagacctgaattctttttcatttgagaagtaaacagatggcactttgaaggggcctcaccgagtgggggcatcatcaaaaactttggagtcccctcacctcctctaaggttgggcagggtgaccctgaagtgagcacagcctagggctgagctggggacctggtaccctcctggctcttgatacccccctctgtcttgtgaaggcagggggaaggtggggtcctggagcagaccaccccgcctgccctcatggcccctctgacctgcactggggagcccgtctcagtgttgagccttttccctctttggctcccctgtaccttttgaggagccccagctacccttcttctccagctgggctctgcaattcccctctgctgctgtccctcccccttgtcctttcccttcagtaccctctcagctccaggtggctctgaggtgcctgtcccacccccacccccagctcaatggactggaaggggaagggacacacaagaagaagggcaccctagttctacctcaggcagctcaagcagcgaccgccccctcctctagctgtgggggtgagggtcccatgtggtggcacaggcccccttgagtggggttatctctgtgttaggggtatatgatgggggagtagatctttctaggagggagacactggcccctcaaatcgtccagcgaccttcctcatccaccccatccctccccagttcattgcactttgattagcagcggaacaaggagtcagacattttaagatggtggcagtagaggctatggacagggcatgccacgtgggctcatatggggctgggagtagttgtctttcctggcactaacgttgagcccctggaggcactgaagtgcttagtgtacttggagtattggggtctgaccccaaacaccttccagctcctgtaacatactggcctggactgttttctctcggctccccatgtgtcctggttcccgtttctccacctagactgtaaacctctcgagggcagggaccacaccctgtactgttctgtgtctttcacagctcctcccacaatgctgaatatacagcaggtgctcaataaatgattcttagtgacttta

SEQ ID NO: 331775 - DNA, 1026 bp, Homo sapiens
  misc_feature (13)..(13): n is a, c, g, or t
  misc_feature (26)..(27): n is a, c, g, or t
  misc_feature (31)..(31): n is a, c, g, or t
taaatgcaggctngtacggtccgganntttnggatagcagctgccgaagtcagttccttgtggagccggagctgggcgcggattcgccgaggcaccgaggcactcagaggaggcgccatgtcagaaccggctggggatgtccgtcagaacccatgcggcagcaaggcctgccgccgcctcttcggcccagtggacagcgagcagctgagccgcgactgtgatgcgctaatggcgggctgcatccaggaggcccgtgagcgatggaacttcgactttgtcaccgagacaccactggagggtgacttcgcctgggagcgtgtgcggggccttggcctgcccaagctctaccttcccacggggccccggcgaggccgggatgagttgggaggaggcaggcggcctggcacctcacctgctctgctgcaggggacagcagaggaagaccatgtggacctgtcactgtcttgtacccttgtgcctcgctcaggggagcaggctgaagggtccccaggtggacctggagactctcagggtcgaaaacggcggcagaccagcatgacagatttctaccactccaaacgccggctgatcttctccaagaggaagccctaatccgcccacaggaagcctgcagtcctggaagcgcgagggcctcaaaggcccgctctacatcttctgccttagtctcagtttgtgtgtcttaattattatttgtgttttaatttaaacacctcctcatgtacataccctggccgccccctgccccccagcctctggcattagaattatttaaacaaaaactaggcggttgaatgagaggttcctaagagtgctgggcatttttattttatgaaatactatttaaagcctcctcatcccgtgttctccttttcctctctcccggaggttgggtgggccggcttcatgccagctacttcctcctccccacttgtccgctgggtggtacccttttgggaggggggggggggttccttcccaattgcttggccacaaggcgggtttttg

SEQ ID NO: 331776 - DNA, 1318 bp, Homo sapiens
  misc_feature (65)..(65): n is a, c, g, or t
tccctccccacacccacccacccccctccgacggcaacctaggtaggtcgaggctgggtgttgtnttctctctcccggaggttgggtgggccggcttcatgccagctacttcctcctccccacttgtccgctgggtggtaccctctggaggggtgtggctccttcccatcgctgtcacaggcggttatgaaattcaccccctttcctggacactcagacctgaattctttttcatttgagaagtaaacagatggcactttgaaggggcctcaccgagtgggggcatcatcaaaaactttggagtcccctcacctcctctaaggttgggcagggtgaccctgaagtgagcacagcctagggctgagctggggacctggtaccctcctggctcttgatacccccctctgtcttgtgaaggcagggggaaggtggggtcctggagcagaccaccccgcctgccctcatggcccctctgacctgcactggggagcccgtctcagtgttgagccttttccctctttggctcccctgtaccttttgaggagccccagctacccttcttctccagctgggctctgcaattcccctctgctgctgtccctcccccttgtcctttcccttcagtaccctctcagctccaggtggctctgaggtgcctgtcccacccccacccccagctcaatggactggaaggggaagggacacacaagaagaagggcaccctagttctacctcaggcagctcaagcagcgaccgccccctcctctagctgtgggggtgagggtcccatgtggtggcacaggcccccttgagtggggttatctctgtgttaggggtatatgatgggggagtagatctttctaggagggagacactggcccctcaaatcgtccagcgaccttcctcatccaccccatccctccccagttcattgcactttgattagcagcggaacaaggagtcagacattttaagatggtggcagtagaggctatggacagggcatgccacgtgggctcatatggggctgggagtagttgtctttcctggcactaacgttgagcccctggaggcactgaagtgcttagtgtacttggagtattggggtctgaccccaaacaccttccagctcctgtaacatactggcctggactgttttctctcggctccccatgtgtcctggttcccgtttctccacctagactgtaaacctctcgagggcagggaccacaccctgtactgttctgtgtctttcacagctcctcccacaatgctgaatatacagcaggtgctcaataaatgattcttagtgacttta

SEQ ID NO: 331777 - DNA, 1084 bp, Homo sapiens
  misc_feature (16)..(16): n is a, c, g, or t
tgatctagaggatccnaagctctggaaaaggggcctcaccgagtgggggcatcatcaaaaactttggagtcccctcacctcctctaaggttgggcagggtgaccctgaagtgagcacagcctagggctgagctggggacctggtaccctcctggctcttgatacccccctctgtcttgtgaaggcagggggaaggtggggtcctggagcagaccaccccgcctgccctcatggcccctctgacctgcactggggagcccgtctcagtgttgagccttttccctctttggctcccctgtaccttttgaggagccccagctacccttcttctccagctgggctctgcaattcccctctgctgctgtccctcccccttgtcctttcccttcagtaccctctcagctccaggtggctctgaggtgcctgtcccacccccacccccagctcaatggactggaaggggaagggacacacaagaagaagggcaccctagttctacctcaggcagctcaagcagcgaccgccccctcctctagctgtgggggtgagggtcccatgtggtggcacaggcccccttgagtggggttatctctgtgttaggggtatatgatgggggagtagatctttctaggagggagacactggcccctcaaatcgtccagcgaccttcctcatccaccccatccctccccagttcattgcactttgattagcagcggaacaaggagtcagacattttaagatggtggcagtagaggctatggacagggcatgccacgtgggctcatatggggctgggagtagttgtctttcctggcactaacgttgagcccctggaggcactgaagtgcttagtgtacttggagtattggggtctgaccccaaacaccttccagctcctgtaacatactggcctggactgttttctctcggctccccatgtgtcctggttcccgtttctccacctagactgtaaacctctcgagggcagggaccacaccctgtactgttctgtgtctttcacagctcctcccacaatgctgaatatacagcaggtgctcaataaatgattcttagtgacttta

SEQ ID NO: 331778 - DNA, 988 bp, Homo sapiens
agcatcctggctctgccctggacccagctcctccccactcagttcctccccactcagctcctcctcccttagctcctcctccctcagctcctcctcgctcagctcctccccactcagttcctccttcctcagctcctcccctctgacctgcactggggagcccgtctcagtgttgagccttttccctctttggctcccctgtaccttttgaggagccccagctacccttcttctccagctgggctctgcaattcccctctgctgctgtccctcccccttgtcctttcccttcagtaccctctcagctccaggtggctctgaggtgcctgtcccacccccacccccagctcaatggactggaaggggaagggacacacaagaagaagggcaccctagttctacctcaggcagctcaagcagcgaccgccccctcctctagctgtgggggtgagggtcccatgtggtggcacaggcccccttgagtggggttatctctgtgttaggggtatatgatgggggagtagatctttctaggagggagacactggcccctcaaatcgtccagcgaccttcctcatccaccccatccctccccagttcattgcactttgattagcagcggaacaaggagtcagacattttaagatggtggcagtagaggctatggacagggcatgccacgtgggctcatatggggctgggagtagttgtctttcctggcactaacgttgagcccctggaggcactgaagtgcttagtgtacttggagtattggggtctgaccccaaacaccttccagctcctgtaacatactggcctggactgttttctctcggctccccatgtgtcctggttcccgtttctccacctagactgtaaacctctcgagggcagggaccacaccctgtactgttctgtgtctttcacagctcctcccacaatgctgaatatacagcaggtgctcaataaatgattcttagtgacttta

SEQ ID NO: 331779 - DNA, 358 bp, Homo sapiens
accaggacacatggggagccgagagaaaacagtatggacagggcatgccacgtgggctcatatggggctgggagtagttgtctttcctggcactaacgttgagcccctggaggcactgaagtgcttagtgtacttggagtattggggtctgaccccaaacaccttccagctcctgtaacatactggcctggactgttttctctcggctccccatgtgtcctggttcccgtttctccacctagactgtaaacctctcgagggcagggaccacaccctgtactgttctgtgtctttcacagctcctcccacaatgctgaatatacagcaggtgctcaataaatgattcttagtgacttta

SEQ ID NO: 331780 - DNA, 1032 bp, Homo sapiens
tccttgaggcgggcccgggcggggcggttgtatatcagggccgcgctgagctgcgccagctgaggtgtgacagctgccgaagtcagttccttgtggagccggagctgggcgcggattcgccgaggcaccgaggcactcagaggaggtgagagagcggcggcagacaacaggggaccccgggccggcggcccagagccgagccaagcgtgcccgcgtgtgtccctgcgtgtccgcgaggatgcgtgttcgcgggtgtgtgctgcgttcacaggtgtttctgcggcagggtgacgcgcagccggagtggaagcagagttttggcgggcgagcagcgccttgcaggaaactgactcatcactactccctccagcggtccgaggctctgcccacgcacctcccaccccgcgcgtgatttcctggaggccggcgccccctcccggccctggcgggaatagcacacaggctttcccgcggagtggggctggccggcgcgaaccgccgcggctactcctgggctcatccgagatcaacccctatgccattaccaccccttcaaaggagcactccttaggttcaacagtattcactgagctcttactggaaattaaaatatggctgaagtctaaggcaggaaggccaataaaggaggctatttttaattgtttctaaaacaagggtttgcgtttctgagttttctttgggctgaaagttattatgagcatgagagcagattttgatgggggaggagaggcctatgagagccataagagaaggaggggtggtagaagaggagagggtgcctgcctagatcctagtcctgtcttgaactcccgagagccagggaatatccagcaccttgatgaagccctaggcgggcgcctcctccttgtgcctatgatgtattgagacccagaatgtccatttcaaacataccagtgtgtctccgcttggctggcaacccaagagtgcccatctgaggaattgtgccaaacacttgcttgaatcttcaatctggattaagttggtctcggg

SEQ ID NO: 331781 - DNA, 288 bp, Homo sapiens
tgcaggggacagcagaggaagaccatgtggacctgtcactgtcttgtacccttgtgcctcgctcaggggagcaggctgaagggtccccaggtggacctggagactctcagggtcgaaaacggcggcagaccagcatgacaggtgcggacatgtgcacggaaggactttgtaagggaccaggattctcagaatccatggtccaagggctgacctgtctggtcctggtccagcatgctccaggtagaaggaaacaggcccagagaggggaagcaacctccctgaggtcac

SEQ ID NO: 331782 - DNA, 2177 bp, Homo sapiens
tccttgaggcgggcccgggcggggcggttgtatatcagggccgcgctgagctgcgccagctgaggtgtgacagctgccgaagtcagttccttgtggagccggagctgggcgcggattcgccgaggcaccgaggcactcagaggaggcgccatgtcagaaccggctggggatgtccgtcagaacccatgcggcagcaaggcctgccgccgcctcttcggcccagtggacagcgagcagctgagccgcgactgtgatgcgctaatggcgggctgcatccaggaggcccgtgagcgatggaacttcgactttgtcaccgagacaccactggagggtgacttcgcctgggagcgtgtgcggggccttggcctgcccaagctctaccttcccacggggccccggcgaggccgggatgagttgggaggaggcaggcggcctggcacctcacctgctctgctgcaggggacagcagaggaagaccatgtggacctgtcactgtcttgtacccttgtgcctcgctcaggggagcaggctgaagggtccccaggtggacctggagactctcagggtcgaaaacggcggcagaccagcatgacagatttctaccactccaaacgccggctgatcttctccaagaggaagccctaatccgcccacaggaagcctgcagtcctggaagcgcgagggcctcaaaggcccgctctacatcttctgccttagtctcagtttgtgtgtcttaattattatttgtgttttaatttaaacacctcctcatgtacataccctggccgccccctgccccccagcctctggcattagaattatttaaacaaaaactaggcggttgaatgagaggttcctaagagtgctgggcatttttattttatgaaatactatttaaagcctcctcatcccgtgttctccttttcctctctcccggaggttgggtgggccggcttcatgccagctacttcctcctccccacttgtccgctgggtggtaccctctggaggggtgtggctccttcccatcgctgtcacaggcggttatgaaattcaccccctttcctggacactcagacctgaattctttttcatttgagaagtaaacagatggcactttgaaggggcctcaccgagtgggggcatcatcaaaaactttggagtcccctcacctcctctaaggttgggcagggtgaccctgaagtgagcacagcctagggctgagctggggacctggtaccctcctggctcttgatacccccctctgtcttgtgaaggcagggggaaggtggggtcctggagcagaccaccccgcctgccctcatggcccctctgacctgcactggggagcccgtctcagtgttgagccttttccctctttggctcccctgtaccttttgaggagccccagctacccttcttctccagctgggctctgcaattcccctctgctgctgtccctcccccttgtcctttcccttcagtaccctctcagctccaggtggctctgaggtgcctgtcccacccccacccccagctcaatggactggaaggggaagggacacacaagaagaagggcaccctagttctacctcaggcagctcaagcagcgaccgccccctcctctagctgtgggggtgagggtcccatgtggtggcacaggcccccttgagtggggttatctctgtgttaggggtatatgatgggggagtagatctttctaggagggagacactggcccctcaaatcgtccagcgaccttcctcatccaccccatccctccccagttcattgcactttgattagcagcggaacaaggagtcagacattttaagatggtggcagtagaggctatggacagggcatgccacgtgggctcatatggggctgggagtagttgtctttcctggcactaacgttgagcccctggaggcactgaagtgcttagtgtacttggagtattggggtctgaccccaaacaccttccagctcctgtaacatactggcctggactgttttctctcggctccccatgtgtcctggttcccgtttctccacctagactgtaaacctctcgagggcagggaccacaccctgtactgttctgtgtctttcacagctcctcccacaatgctgaatatacagcaggtgctcaataaatgattcttagtgacttta

SEQ ID NO: 331783 - DNA, 2242 bp, Homo sapiens
  misc_feature (13)..(13): n is a, c, g, or t
  misc_feature (26)..(27): n is a, c, g, or t
  misc_feature (31)..(31): n is a, c, g, or t
taaatgcaggctngtacggtccgganntttnggatagcagctgccgaagtcagttccttgtggagccggagctgggcgcggattcgccgaggcaccgaggcactcagaggaggcgccatgtcagaaccggctggggatgtccgtcagaacccatgcggcagcaaggcctgccgccgcctcttcggcccagtggacagcgagcagctgagccgcgactgtgatgcgctaatggcgggctgcatccaggaggcccgtgagcgatggaacttcgactttgtcaccgagacaccactggagggtgacttcgcctgggagcgtgtgcggggccttggcctgcccaagctctaccttcccacggggccccggcgaggccgggatgagttgggaggaggcaggcggcctggcacctcacctgctctgctgcaggggacagcagaggaagaccatgtggacctgtcactgtcttgtacccttgtgcctcgctcaggggagcaggctgaagggtccccaggtggacctggagactctcagggtcgaaaacggcggcagaccagcatgacagatttctaccactccaaacgccggctgatcttctccaagaggaagccctaatccgcccacaggaagcctgcagtcctggaagcgcgagggcctcaaaggcccgctctacatcttctgccttagtctcagtttgtgtgtcttaattattatttgtgttttaatttaaacacctcctcatgtacataccctggccgccccctgccccccagcctctggcattagaattatttaaacaaaaactaggcggttgaatgagaggttcctaagagtgctgggcatttttattttatgaaatactatttaaagcctcctcatcccgtgttctccttttcctctctcccggaggttgggtgggccggcttcatgccagctacttcctcctccccacttgtccgctgggtggtaccctctggaggggtgtggctccttcccatcgctgtcacaggcggttatgaaattcaccccctttcctggacactcagacctgaattctttttcatttgagaagtaaacagatggcactttgaaggggcctcaccgagtgggggcatcatcaaaaactttggagtcccctcacctcctctaaggttgggcagggtgaccctgaagtgagcacagcctagggctgagctggggacctggtaccctcctggctcttgatacccccctctgtcttgtgaaggcagggggaaggtggggtcctggagcagaccaccccgcctgccctcatggcccctctgacctgcactggggagcccgtctcagtgttgagccttttccctctttggctcccctgtaccttttgaggagccccagctacccttcttctccagctgggctctgcaattcccctctgctgctgtccctcccccttgtcctttcccttcagtaccctctcagctccaggtggctctgaggtgcctgtcccacccccacccccagctcaatggactggaaggggaagggacacacaagaagaagggcaccctagttctacctcaggcagctcaagcagcgaccgccccctcctctagctgtgggggtgagggtcccatgtggtggcacaggcccccttgagtggggttatctctgtgttaggggtatatgatgggggagtagatctttctaggagggagacactggcccctcaaatcgtccagcgaccttcctcatccaccccatccctccccagttcattgcactttgattagcagcggaacaaggagtcagacattttaagatggtggcagtagaggctatggacagggcatgccacgtgggctcatatggggctgggagtagttgtctttcctggcactaacgttgagcccctggaggcactgaagtgcttagtgtacttggagtattggggtctgaccccaaacaccttccagctcctgtaacatactggcctggactgttttctctcggctccccatgtgtcctggttcccgtttctccacctagactgtaaacctctcgagggcagggaccacaccctgtactgttctgtgtctttcacagctcctcccacaatgctgaatatacagcaggtgctcaataaatgattcttagtgactttaaaaaaaacagtcacccaacaccaaacatacaacaaccaaacaaagaccgcaagcacgcagacaggcacaagcgacgcacagacgcagaacaccaaaag

SEQ ID NO: 331784 - DNA, 2088 bp, Homo sapiens
  misc_feature (13)..(13): n is a, c, g, or t
  misc_feature (26)..(27): n is a, c, g, or t
  misc_feature (31)..(31): n is a, c, g, or t
taaatgcaggctngtacggtccgganntttnggatagcagctgccgaagtcagttccttgtggagccggagctgggcgcggattcgccgaggcaccgaggcactcagaggaggcgccatgtcagaaccggctggggatgtccgtcagaacccatgcggcagcaaggcctgccgccgcctcttcggcccagtggacagcgagcagctgagccgcgactgtgatgcgctaatggcgggctgcatccaggaggcccgtgagcgatggaacttcgactttgtcaccgagacaccactggagggtgacttcgcctgggagcgtgtgcggggccttggcctgcccaagctctaccttcccacggggccccggcgaggccgggatgagttgggaggaggcaggcggcctggcacctcacctgctctgctgcaggggacagcagaggaagaccatgtggacctgtcactgtcttgtacccttgtgcctcgctcaggggagcaggctgaagggtccccaggtggacctggagactctcagggtcgaaaacggcggcagaccagcatgacagatttctaccactccaaacgccggctgatcttctccaagaggaagccctaatccgcccacaggaagcctgcagtcctggaagcgcgagggcctcaaaggcccgctctacatcttctgccttagtctcagtttgtgtgtcttaattattatttgtgttttaatttaaacacctcctcatgtacataccctggccgccccctgccccccagcctctggcattagaattatttaaacaaaaactaggcggttgaatgagaggttcctaagagtgctgggcatttttattttatgaaatactatttaaagcctcctcatcccgtgttctccttttcctctctcccggaggttgggtgggccggcttcatgccagctacttcctcctccccacttgtccgctgggtggtaccctctggaggggtgtggctccttcccatcgctgtcacaggcggttatgaaattcaccccctttcctggacactcagacctgaattctttttcatttgagaagtaaacagatggcactttgaaggggcctcaccgagtgggggcatcatcaaaaactttggagtcccctcacctcctctaaggttgggcagggtgaccctgaagtgagcacagcctagggctgagctggggacctggtaccctcctggctcttgatacccccctctgtcttgtgaaggcagggggaaggtggggtcctggagcagaccaccccgcctgccctcatggcccctctgacctgcactggggagcccgtctcagtgttgagccttttccctctttggctcccctgtaccttttgaggagccccagctacccttcttctccagctgggctctgcaattcccctctgctgctgtccctcccccttgtcctttcccttcagtaccctctcagctccaggtggctctgaggtgcctgtcccacccccacccccagctcaatggactggaaggggaagggacacacaagaagaagggcaccctagttctacctcaggcagctcaagcagcgaccgccccctcctctagctgtgggggtgagggtcccatgtggtggcacaggcccccttgagtggggttatctctgtgttaggggtatatgatgggggagtagatctttctaggagggagacactggcccctcaaatcgtccagcgaccttcctcatccaccccatccctccccagttcattgcactttgattagcagcggaacaaggagtcagacattttaagatggtggcagtagaggctatggacagggcatgccacgtgggctcatatggggctgggagtagttgtctttcctggcactaacgttgagccccttccagctcctgtaacatactggcctggactgttttctctcggctccccatgtgtcctggttcccgtttctccacctagactgtaaacctctcgagggcagggaccacaccctgtactgttctgtgtctttcacagctcctcccacaatgctgaatatacagcaggtgctcaataaatgattcttagtgacttta

SEQ ID NO: 331785 - DNA, 2082 bp, Homo sapiens
tggcatagaagaggctggtggctatttgtccttgggctgcctgttttcaggcgccatgtcagaaccggctggggatgtccgtcagaacccatgcggcagcaaggcctgccgccgcctcttcggcccagtggacagcgagcagctgagccgcgactgtgatgcgctaatggcgggctgcatccaggaggcccgtgagcgatggaacttcgactttgtcaccgagacaccactggagggtgacttcgcctgggagcgtgtgcggggccttggcctgcccaagctctaccttcccacggggccccggcgaggccgggatgagttgggaggaggcaggcggcctggcacctcacctgctctgctgcaggggacagcagaggaagaccatgtggacctgtcactgtcttgtacccttgtgcctcgctcaggggagcaggctgaagggtccccaggtggacctggagactctcagggtcgaaaacggcggcagaccagcatgacagatttctaccactccaaacgccggctgatcttctccaagaggaagccctaatccgcccacaggaagcctgcagtcctggaagcgcgagggcctcaaaggcccgctctacatcttctgccttagtctcagtttgtgtgtcttaattattatttgtgttttaatttaaacacctcctcatgtacataccctggccgccccctgccccccagcctctggcattagaattatttaaacaaaaactaggcggttgaatgagaggttcctaagagtgctgggcatttttattttatgaaatactatttaaagcctcctcatcccgtgttctccttttcctctctcccggaggttgggtgggccggcttcatgccagctacttcctcctccccacttgtccgctgggtggtaccctctggaggggtgtggctccttcccatcgctgtcacaggcggttatgaaattcaccccctttcctggacactcagacctgaattctttttcatttgagaagtaaacagatggcactttgaaggggcctcaccgagtgggggcatcatcaaaaactttggagtcccctcacctcctctaaggttgggcagggtgaccctgaagtgagcacagcctagggctgagctggggacctggtaccctcctggctcttgatacccccctctgtcttgtgaaggcagggggaaggtggggtcctggagcagaccaccccgcctgccctcatggcccctctgacctgcactggggagcccgtctcagtgttgagccttttccctctttggctcccctgtaccttttgaggagccccagctacccttcttctccagctgggctctgcaattcccctctgctgctgtccctcccccttgtcctttcccttcagtaccctctcagctccaggtggctctgaggtgcctgtcccacccccacccccagctcaatggactggaaggggaagggacacacaagaagaagggcaccctagttctacctcaggcagctcaagcagcgaccgccccctcctctagctgtgggggtgagggtcccatgtggtggcacaggcccccttgagtggggttatctctgtgttaggggtatatgatgggggagtagatctttctaggagggagacactggcccctcaaatcgtccagcgaccttcctcatccaccccatccctccccagttcattgcactttgattagcagcggaacaaggagtcagacattttaagatggtggcagtagaggctatggacagggcatgccacgtgggctcatatggggctgggagtagttgtctttcctggcactaacgttgagcccctggaggcactgaagtgcttagtgtacttggagtattggggtctgaccccaaacaccttccagctcctgtaacatactggcctggactgttttctctcggctccccatgtgtcctggttcccgtttctccacctagactgtaaacctctcgagggcagggaccacaccctgtactgttctgtgtctttcacagctcctcccacaatgctgaatatacagcaggtgctcaataaatgattcttagtgacttta

SEQ ID NO: 331786 - DNA, 2225 bp, Homo sapiens
aggaaggggatggtaggagacaggagacctctaaagaccccagttaggtcaccagacttctctgagccccagtttccccagcagtgtatacgggctatgtggggagtattcaggagacagacaactcactcgtcaaatcctccccttcctggccaacaaagctgctgcaaccacagggatttcttctgttcaggcgccatgtcagaaccggctggggatgtccgtcagaacccatgcggcagcaaggcctgccgccgcctcttcggcccagtggacagcgagcagctgagccgcgactgtgatgcgctaatggcgggctgcatccaggaggcccgtgagcgatggaacttcgactttgtcaccgagacaccactggagggtgacttcgcctgggagcgtgtgcggggccttggcctgcccaagctctaccttcccacggggccccggcgaggccgggatgagttgggaggaggcaggcggcctggcacctcacctgctctgctgcaggggacagcagaggaagaccatgtggacctgtcactgtcttgtacccttgtgcctcgctcaggggagcaggctgaagggtccccaggtggacctggagactctcagggtcgaaaacggcggcagaccagcatgacagatttctaccactccaaacgccggctgatcttctccaagaggaagccctaatccgcccacaggaagcctgcagtcctggaagcgcgagggcctcaaaggcccgctctacatcttctgccttagtctcagtttgtgtgtcttaattattatttgtgttttaatttaaacacctcctcatgtacataccctggccgccccctgccccccagcctctggcattagaattatttaaacaaaaactaggcggttgaatgagaggttcctaagagtgctgggcatttttattttatgaaatactatttaaagcctcctcatcccgtgttctccttttcctctctcccggaggttgggtgggccggcttcatgccagctacttcctcctccccacttgtccgctgggtggtaccctctggaggggtgtggctccttcccatcgctgtcacaggcggttatgaaattcaccccctttcctggacactcagacctgaattctttttcatttgagaagtaaacagatggcactttgaaggggcctcaccgagtgggggcatcatcaaaaactttggagtcccctcacctcctctaaggttgggcagggtgaccctgaagtgagcacagcctagggctgagctggggacctggtaccctcctggctcttgatacccccctctgtcttgtgaaggcagggggaaggtggggtcctggagcagaccaccccgcctgccctcatggcccctctgacctgcactggggagcccgtctcagtgttgagccttttccctctttggctcccctgtaccttttgaggagccccagctacccttcttctccagctgggctctgcaattcccctctgctgctgtccctcccccttgtcctttcccttcagtaccctctcagctccaggtggctctgaggtgcctgtcccacccccacccccagctcaatggactggaaggggaagggacacacaagaagaagggcaccctagttctacctcaggcagctcaagcagcgaccgccccctcctctagctgtgggggtgagggtcccatgtggtggcacaggcccccttgagtggggttatctctgtgttaggggtatatgatgggggagtagatctttctaggagggagacactggcccctcaaatcgtccagcgaccttcctcatccaccccatccctccccagttcattgcactttgattagcagcggaacaaggagtcagacattttaagatggtggcagtagaggctatggacagggcatgccacgtgggctcatatggggctgggagtagttgtctttcctggcactaacgttgagcccctggaggcactgaagtgcttagtgtacttggagtattggggtctgaccccaaacaccttccagctcctgtaacatactggcctggactgttttctctcggctccccatgtgtcctggttcccgtttctccacctagactgtaaacctctcgagggcagggaccacaccctgtactgttctgtgtctttcacagctcctcccacaatgctgaatatacagcaggtgctcaataaatgattcttagtgacttta

SEQ ID NO: 331787 - DNA, 3040 bp, Homo sapiens
  misc_feature (13)..(13): n is a, c, g, or t
  misc_feature (26)..(27): n is a, c, g, or t
  misc_feature (31)..(31): n is a, c, g, or t
taaatgcaggctngtacggtccgganntttnggatagcagctgccgaagtcagttccttgtggagccggagctgggcgcggattcgccgaggcaccgaggcactcagaggaggcgccatgtcagaaccggctggggatgtccgtcagaacccatgcggcagcaaggcctgccgccgcctcttcggcccagtggacagcgagcagctgagccgcgactgtgatgcgctaatggcgggctgcatccaggaggcccgtgagcgatggaacttcgactttgtcaccgagacaccactggagggtgacttcgcctgggagcgtgtgcggggccttggcctgcccaagctctaccttcccacggggccccggcgaggccgggatgagttgggaggaggcaggcggcctggcacctcacctgctctgctgcaggggacagcagaggaagaccatgtggacctgtcactgtcttgtacccttgtgcctcgctcaggggagcaggctgaagggtccccaggtggacctggagactctcagggtcgaaaacggcggcagaccagcatgacaggtgtcttaactctgttggccagactggagtgcagtgatacgatcatggctcactgcagcttcaaactcctgggctcaagcgatcttcctacctcagcctcctgggtagctgggaagctgggactatagttgtacaccactacgcccggttaattttttgagtttttgtagagacaaggtctcaccatgttgcccgggctggtcttgaactcctgagctcaagcagtcctcctgcctcagcctcccaaagtgttgtgattacaggcgtgagccaccatgcccagccccttgccatccttttagggcaaggaaaccaggctcagagaggtagagtgatttatctaaggtctcaaagtgaatttgccgttgggtcaagactaattataataacaacaactactgacgtttatatgggcccggcattgtgctgaacactttcatggattttgtaacagaatccctagatcagcactgtccagtaactctgcagggatgggagtgtccggtacaggggccacgagccacatacggctgttgtgcatttgacacacagctcatgtgactgaggaactgaattgttcattttatttgattgtagtctgtttaaacaagcacacagagctagtagtggttcctctgctgggcagcttgacttagagcagacccatgggtgcgggtgcggtgatggataaaatcacatctgtgaagcatggtgggacactccataatacccctcaagagacagagtggacgttccccgagttcttcctgttctcagcagtcggccccattggccccagggaagggtgtcctggccccccactgtcttcctcagttgggcagctccgccgcgtcctcttcttcttggcctggctgacttctgctgtctctcctcagatttctaccactccaaacgccggctgatcttctccaagaggaagccctaatccgcccacaggaagcctgcagtcctggaagcgcgagggcctcaaaggcccgctctacatcttctgccttagtctcagtttgtgtgtcttaattattatttgtgttttaatttaaacacctcctcatgtacataccctggccgccccctgccccccagcctctggcattagaattatttaaacaaaaactaggcggttgaatgagaggttcctaagagtgctgggcatttttattttatgaaatactatttaaagcctcctcatcccgtgttctccttttcctctctcccggaggttgggtgggccggcttcatgccagctacttcctcctccccacttgtccgctgggtggtaccctctggaggggtgtggctccttcccatcgctgtcacaggcggttatgaaattcaccccctttcctggacactcagacctgaattctttttcatttgagaagtaaacagatggcactttgaaggggcctcaccgagtgggggcatcatcaaaaactttggagtcccctcacctcctctaaggttgggcagggtgaccctgaagtgagcacagcctagggctgagctggggacctggtaccctcctggctcttgatacccccctctgtcttgtgaaggcagggggaaggtggggtcctggagcagaccaccccgcctgccctcatggcccctctgacctgcactggggagcccgtctcagtgttgagccttttccctctttggctcccctgtaccttttgaggagccccagctacccttcttctccagctgggctctgcaattcccctctgctgctgtccctcccccttgtcctttcccttcagtaccctctcagctccaggtggctctgaggtgcctgtcccacccccacccccagctcaatggactggaaggggaagggacacacaagaagaagggcaccctagttctacctcaggcagctcaagcagcgaccgccccctcctctagctgtgggggtgagggtcccatgtggtggcacaggcccccttgagtggggttatctctgtgttaggggtatatgatgggggagtagatctttctaggagggagacactggcccctcaaatcgtccagcgaccttcctcatccaccccatccctccccagttcattgcactttgattagcagcggaacaaggagtcagacattttaagatggtggcagtagaggctatggacagggcatgccacgtgggctcatatggggctgggagtagttgtctttcctggcactaacgttgagcccctggaggcactgaagtgcttagtgtacttggagtattggggtctgaccccaaacaccttccagctcctgtaacatactggcctggactgttttctctcggctccccatgtgtcctggttcccgtttctccacctagactgtaaacctctcgagggcagggaccacaccctgtactgttctgtgtctttcacagctcctcccacaatgctgaatatacagcaggtgctcaataaatgattcttagtgacttta

SEQ ID NO: 331788 - DNA, 698 bp, Homo sapiens
  misc_feature (13)..(13): n is a, c, g, or t
  misc_feature (26)..(27): n is a, c, g, or t
  misc_feature (31)..(31): n is a, c, g, or t
taaatgcaggctngtacggtccgganntttnggatagcagctgccgaagtcagttccttgtggagccggagctgggcgcggattcgccgaggcaccgaggcactcagaggaggcgccatgtcagaaccggctggggatgtccgtcagaacccatgcggcagcaaggcctgccgccgcctcttcggcccagtggacagcgagcagctgagccgcgactgtgatgcgctaatggcgggctgcatccaggaggcccgtgagcgatggaacttcgactttgtcaccgagacaccactggagggtgacttcgcctgggagcgtgtgcggggccttggcctgcccaagctctaccttcccacggggccccggcgaggccgggatgagttgggaggaggcaggcggcctggcacctcacctgctctgctgcaggggacagcagaggaagaccatgtggaccagcctggccaacatggtgaaatctctactaaaaatacaaaaattggctgggcatggtggtgcacgcttgtaatcccagctacttggaaggctgaggtgggaggatcacttgaacccaggaggcagaggttgcagtcagctgagatcataccactgtactccagcctcttccagggtgacagtgagattcatctcaaataaatacataaataaaaaactgtttggtaatatcttctaaaaaaacc

SEQ ID NO: 331789 - DNA, 337 bp, Homo sapiens
aacactgttttcccacttcttcagaagatggtatttgccagaactattgtaaatgcacagaggaaaagctaataatttttttaacttatgatggatgccttaatacaggattctcctattttaacttgcatcagaataacctggagggcttgttaaaacaaatggctgggccccaccctcagagtttctgactcagggacactgctgctgctgctgatgctgctgatcagggaaccacacacttttaaatcactatttatgtaggtctttagggcttaattctcttgaagagcctgggttaagaaagtcgagaagaactgagagcaagacagataag

SEQ ID NO: 331790 - DNA, 464 bp, Homo sapiens
taatgaagacagggcaacaaaaccaagcaaattcaagacaataaataaagcgctctttggactgcaaatgaatgtggcatcaatactataagaacactaaacttttcaataatgttgtctctaaaatcaaaacacctcctacattttagtatacaagaggatgtgcataggtcatacacaattaccataccatatcatgtaagaaactcacctgggcacagtagcttacgcctataattccagcactttaggaggccaaggcaagagtatcacttgagctcaagaccagcctgggcaacacagtgagatcctctctacaaaaaaatatttttaaaaaattacccattcaaggctgcagtgagccatgatcatgccactacactccagctgggacaacagagaccctgtctcaaaagaaagggaggggatcggggggacttaagtatcaatgcacggttgatgtc

SEQ ID NO: 331791 - DNA, 356 bp, Homo sapiens
tgtggataaaacattcatatactaaactttattccctggcagtagaagataaaggaggcattcttatgccagaagaaggaagtacaatctgtgtaggcgaatgagcagaatggagtagctgatgcagtagaaggatgatgtggtggaataatctgaggtgatggtgctgacgtttgccaaaaactcgctatgtatcgtatctggactggttgatttcttcatggaaaaccttgccagggaggactgggaagacgtgctgagcaaagtgccagagtcagagcctgtctcttcaaggtggggaggacttctgtgccaagaagtgaccttgggggctctctttcaaggatggccaaagc

SEQ ID NO: 331792 - DNA, 218 bp, Homo sapiens
cccccagttcttctcccagaagccaccactacaatcagcctcctgtgtgtctactccaaaatccggtgtatgattttacaggcagatttgcaagtctgttctgcaccagagagtttagattttatgtggcaaatgatggaacagtatttcgtttctttcttttttcttgtttcatagagacagggtctcgccgtgttgcccaggcagatctcaaactt

SEQ ID NO: 331793 - DNA, 769 bp, Homo sapiens
ctcccaaagtgctgggattacagacatgagccactgcacccgcctaagaagataggaaagtcttgcaagaagtgaagagcattgaagacagaaggaactgtctgaaatagtttggtatatttagaaagcgtcaagtattttagtaaggcaagaatataggatgtgaatgagtatttggacaaagggtaagcaaccattcaggggcctgtatgtttactatgctaagaagttccgacatcatcctgtaggcagccacggtgtgttttcaacagggaatgacgtgtgttctgtgttattctggaagcactgtagaggatgatttagaaagggtgcaagattggaagcaaaaagacaatacgaaggcaagagatgatcagagtgtgaaggaatgagatttgacaggatccagctacagaatagttgtgaggcatgggggaaagggaggaatgcagcatttttcccaagtgtaagagccttagctaattgatcaggtgctattcagaagagggagcagtttgaggagaataataaatgcctcttagatcctgtgacttaaagtttcctttgtggcatctaagagagatgttctataggcagaatgtaggagtctggagcttagaggaaaatatgaacagatgagagttttgggagtcatgcatacaggtgattgatgaagttgcagaactggttatgattgcccaataggaattatgaattgaagaactagaagaccatgtacagagtcttgggagaatgcctacattaaggg

SEQ ID NO: 331794 - DNA, 241 bp, Homo sapiens
ccggaaggtggaggttgcgatgagctgagatggcaccagtgcactccagcctaggtgacagagcgagactccgtctcaaaaaaaaaaagcaacagttaatgtactcgtgtttttttgtgtagagtgtttagtataatttggggtttgtttgatggtaagaaccttcatttttgataatagttttaaatttttacttttctatttctaaattttaattttctattttatgccaagttataca

SEQ ID NO: 331795 - DNA, 220 bp, Homo sapiens
cgtgctgggctttggagagatcacaacacatgacagctcttactgtcatggaactcagtgatgtttcgtgcatgatcatcctctccacttgtttattgacattggaggtggcatatgtgatgtccctttttctaaaaaattttctcctaagactgtctgtagtctttctttacgtaatcatatctgacatgggtcaactttgttgctgccaccctagccc

SEQ ID NO: 331796 - DNA, 1917 bp, Homo sapiens
caataattttgcaaatagtgacagacctatgaaggcaactgcctttcccgcagaagtcaaagacttgaccaagagaatccgcactgttcttatggccactgcccaaatgaaggagcatgagaaagaccctgaaatgctaattgatctccagtatagcttagccaagtcctatgcaagcaccccagagctcaggaaaacctggcttgatagcatggccaagattcatgtaaaaaatggagatttttcagaggctgcgatgtgttatgtccatgtagcagctctagttgcagagtttcttcatcgaaaaaaattatttcctaacggatgttcagcgttcaagaaaattactcccaatatagatgaagaaggagcaatgaaagaagatgctgggatgatggatgtccattatagtgaagaggtcttgctggagttgctagaacaatgtgtggatggcttatggaaggcagaacgttatgaaataatttctgagatttccaagttgatcgttccaatttatgagaaacgtcgtgagtttgagaaacttactcaagtttatagaactcttcatggagcttacacaaaaattctggaagttatgcatacaaaaaagagacttttaggcactttcttcagagttgccttttatggccaatctttttttgaagaagaagatggaaaggagtacatctataaagaaccaaagctcactggcctctcagaaatttccttgagacttgttaaactttatggtgaaaagtttggtacggagaatgtcaaaataattcaggattcagacaaggtaaatgccaaagagcttgatccaaaatatgctcatatacaagttacttatgtgaagccttactttgatgacaaagaactcacagaaaggaagaccgagtttgaaagaaatcataatatcagcagatttgtttttgaggccccttacactttatcaggcaaaaaacagggctgtatagaagaacagtgcaaacgccgtacaatcttgacaacttcaaactcgtttccttacgtgaagaagaggattcctattaactgtgaacagcagattaatttaaaaccaattgatgttgccactgatgaaataaaagataaaactgcagagctgcaaaagctttgctcctctactgacgtggacatgattcagctccaacttaaattgcagggctgtgtttctgtgcaggtcaatgctggtccattagcatatgcaagagctttcttaaatgacagccaagctagcaagtatccacctaagaaagtgagtgagttgaaagacatgtttaggaaatttatacaagcatgcagcattgcacttgaactaaatgagcggctaattaaagaagatcaagttgagtaccatgaagggctaaagtcaaatttcagagacatggtaaaagaattatctgacattatccatgagcagatattacaagaagacacaatgcattctccctggatgagcaacacattacatgtattttgtgcaattagtggtacatcaagtgaccgaggttatggttccccaagatacgctgaagtgtgaggaaatgcagatgtacgtgacaatgagactgacctttctcaggaatatttggagctgtgcaaatgttaaaatttaaagatttgatatacatggagtgtttcttctcgacaccaaaattttcatgtgttccaacagggtgcttacatatttgtaaataagcaacttgaaagtgcctggaaaattgcaccactgtgcttggtttgtacttttttaggtaaatctatatgctgaaaagtagagctcaaaaacagtagttcaatttgcttaattattgcttaaaataatggtactatgtaaaattgtataatggaatacaataaaaggtaaaacttatttgtaattagaagtgaaagaaa

SEQ ID NO: 331797 - DNA, 2132 bp, Homo sapiens
caataattttgcaaatagtgacagacctatgaaggcaactgcctttcccgcagaagtcaaagacttgaccaagagaatccgcactgttcttatggccactgcccaaatgaaggagcatgagaaagaccctgaaatgctaattgatctccagtatagcttagccaagtcctatgcaagcaccccagagctcaggaaaacctggcttgatagcatggccaagattcatgtaaaaaatggagatttttcagaggctgcgatgtgttatgtccatgtagcagctctagttgcagagtttcttcatcgaaaaaaattatttcctaacggatgttcagcgttcaagaaaattactcccaatatagatgaagaaggagcaatgaaagaagatgctgggatgatggatgtccattatagtgaagaggtcttgctggagttgctagaacaatgtgtggatggcttatggaaggcagaacgttatgaaataatttctgagatttccaagttgatcgttccaatttatgagaaacgtcgtgagtttgagaaacttactcaagtttatagaactcttcatggagcttacacaaaaattctggaagttatgcatacaaaaaagagacttttaggcactttcttcagagttgccttttatggccaatctttttttgaagaagaagatggaaaggagtacatctataaagaaccaaagctcactggcctctcagaaatttccttgagacttgttaaactttatggtgaaaagtttggtacggagaatgtcaaaataattcaggattcagacaaggtaaatgccaaagagcttgatccaaaatatgctcatatacaagttacttatgtgaagccttactttgatgacaaagaactcacagaaaggaagaccgagtttgaaagaaatcataatatcagcagatttgtttttgaggccccttacactttatcaggcaaaaaacagggctgtatagaagaacagtgcaaacgccgtacaatcttgacaacttcaaactcgtttccttacgtgaagaagaggattcctattaactgtgaacagcagattaatttaaaaccaattgatgttgccactgatgaaataaaagataaaactgcagagctgcaaaagctttgctcctctactgacgtggacatgattcagctccaacttaaattgcagggctgtgtttctgtgcaggtcaatgctggtccattagcatatgcaagagctttcttaaatgacagccaagctagcaagtatccacctaagaaagtgagtgagttgaaagacatgtttaggaaatttatacaagcatgcagcattgcacttgaactaaatgagcggctaattaaagaagatcaagttgagtaccatgaagggctaaagtcaaatttcagagacatggtaaaagaattatctgacattatccatgagcagatattacaagaagacacaatgcattctccctggatgagcaacacattacatgtattttgtgcaattagtggtacatcaagtgaccgaggttatggttccccaagatacgctgaagtgtgaggaaatgcagatgtacgtgacaatgagactgacctttctcaggaatatttggagctgtgcaaatgttaaaatttaaagatttgatatacatggagtgtttcttctcgacaccaaaattttcatgtgttccaacagggtgcttacatatttgtaaataagcaacttgaaagtgcctggaaaattgcaccactgtgcttggtttgtacttttttaggtaaatctatatgctgaaaagtagagctcaaaaacagtagttcaatttgcttaattattgcttaaaataatggtactatgtaaaattgtataatggaatacaataaaaggtaaaacttatttgtaattagaagtgaaagaaataatactttgaacttagcatttttcttgacaagaagctcaattcattatcatactaatccttggtaggaggagaagaaaattgataacatttccgtaatacacggatatttaaaattggggagatcatttgaatccttgccaattagtagtcaaggctgggctaaaggaaccaaaagcattatttcacagaaaatttcaaaaggaaaggatatat

SEQ ID NO: 331798 - DNA, 735 bp, Homo sapiens
ctcggagcggcgctgcgctgcgccgaggcgggcgggcgggcgggcggagcggggcgggcggagcgcggcgcgtggggctcgccattagccgtcgctccgcttcgccatctcgggctttgtctggcgactcgctgccccggcgtcggctgcagcggagctgcggctcgactgttcggcccgccgtgctcccaggtgcccccggcctgcgctcccatccacacgctcggtaagtgagcccgggagccgcggatttcgggggagaggggttgctacgagtggcggcggcgccgatcttcatgcgcccgggcaggcctggagaaccatgccgggctggattgaaccggctcccacagcggcccctccgccggagcccgtcgttcccttgccgtttccggggtgtaaagagcaacggggattttttttttttaatgcagaggttttagttttcgggtttttttttaagtttcgtatgtgccgttcggcaaggagaggaccgcgaggtaggcaccgaagctggacgccgcgatcggcgtgcgtgcgccccaaaccagcggccacgctccgggggatgagggtgggcgcggaccgctcgctccgggaggcgggagagagctggcctggaagccctagtctgagctgggagaacttgggggagagctccggagcagggctgtgggcgccccccgagcctccccggacgccgggggcacctccgggcaccctctccgcggccgc

SEQ ID NO: 331799 - DNA, 3830 bp, Homo sapiens
gccagacaaagcccgagatggcgaagcggagcgacggctaatggcgagccccacgcgccgcgctccgcccgccccgctccggtgaggtggctttgaccccgggttgcccggccagcacgaccgaggaggtggctggacagctggaggatgaacggagaagccgactgccccacagacctggaaatggccgcccccaaaggccaagaccgttggtcccaggaagacatgctgactttgctggaatgcatgaagaacaaccttccatccaatgacagctccaagttcaaaaccaccgaatcacacatggactgggaaaaagtagcatttaaagacttttctggagacatgtgcaagctcaaatgggtggagatttctaatgaggtgaggaagttccgtacattgacagaattgatcctcgatgctcaggaacatgttaaaaatccttacaaaggcaaaaaactcaagaaacacccagacttcccaaagaagcccctgaccccttatttccgcttcttcatggagaagcgggccaagtatgcgaaactccaccctgagatgagcaacctggacctaaccaagattctgtccaagaaatacaaggagcttccggagaagaagaagatgaaatatattcaggacttccagagagagaaacaggagttcgagcgaaacctggcccgattcagggaggatcaccccgacctaatccagaatgccaagaaatcggacatcccagagaagcccaaaaccccccagcagctgtggtacacccacgagaagaaggtgtatctcaaagtgcggccagatgccactacgaaggaggtgaaggactccctggggaagcagtggtctcagctctcggacaaaaagaggctgaaatggattcataaggccctggagcagcggaaggagtacgaggagatcatgagagactatatccagaagcacccagagctgaacatcagtgaggagggtatcaccaagtccaccctcaccaaggccgaacgccagctcaaggacaagtttgacgggcgacccaccaagccacctccgaacagctactcgctgtactgcgcagagctcatggccaacatgaaggacgtgcccagcacagagcgcatggtgctgtgcagccagcagtggaagctgctgtcccagaaggagaaggacgcctatcacaagaagtgtgatcagaaaaagaaagattacgaggtggagctgctccgtttcctcgagagcctgcctgaggaggagcagcagcgggtcttgggggaagagaagatgctgaacatcaacaagaagcaggccaccagccccgcctccaagaagccagcccaggaagggggcaagggcggctccgagaagcccaagcggcccgtgtcggccatgttcatcttctcggaggagaaacggcggcagctgcaggaggagcggcctgagctctccgagagcgagctgacccgcctgctggcccgaatgtggaacgacctgtctgagaagaagaaggccaagtacaaggcccgagaggcggcgctcaaggctcagtcggagaggaagcccggcggggagcgcgaggaacggggcaagctgcccgagtcccccaaaagagctgaggagatctggcaacagagcgttatcggcgactacctggcccgcttcaagaatgaccgggtgaaggccttgaaagccatggaaatgacctggaataacatggaaaagaaggagaaactgatgtggattaagaaggcagccgaagaccaaaagcgatatgagagagagctgagtgagatgcgggcacctccagctgctacaaattcttccaagaagatgaaattccagggagaacccaagaagcctcccatgaacggttaccagaagttctcccaggagctgctgtccaatggggagctgaaccacctgccgctgaaggagcgcatggtggagatcggcagtcgctggcagcgcatctcccagagccagaaggagcactacaaaaagctggccgaggagcagcaaaagcagtacaaggtgcacctggacctctgggttaagagcctgtctccccaggaccgtgcagcatataaagagtacatctccaataaacgtaagagcatgaccaagctgcgaggcccaaaccccaaatccagccggactactctgcagtccaagtcggagtccgaggaggatgatgaagaggatgaggatgacgaggacgaggatgaagaagaggaagatgatgagaatggggactcctctgaagatggcggcgactcctctgagtccagcagcgaggacgagagcgaggatggggatgagaatgaagaggatgacgaggacgaagacgacgacgaggatgacgatgaggatgaagataatgagtccgagggcagcagctccagctcctcctcctcaggggactcctcagactctgactccaactgaggctcagccccaccccagggcagccagggagagcccaggagctcccctccccaactgaccacctttgtttctcccccatgttctgtcccttgcccccctggcctcccccactttctttctttctttaaaaaaaaaaaaaaaaatacggtgggggtagggggctggaggagcccaggccaggactctgcagcctcagagacatcagcccttgggggtcctcctccagggacagcaactatcagactaagccagcaccggaccagcctggcccaccccacccacttctgcacttgcggttccggcatggacaatggaccggagagtgggggtggggggtcccaaagagtttgatgaggccctccacacctgcggcccaatccaaggtggggtggaagcttggggaagacccattccttcccagaggggcctgccacctggacccctgcattggaactggaggcagggaacatggggaggaggagggtcggtgccttcaagaaaacaggcactgccctggtggccctctcccctgccccctgcaggaaggagctgcctggacccgttcatgggggagggggcagaagtgttttttatatatgtgtatatatttttttttaagctctgagctgtcaacgagacgtttcctaccgatctcggctgccgtctctgttgtcatttctgggagagggagggtttaggggtagatttggaaccttttaaaaatggtcttgatgtatgtggaagagagtatgtgtatgtgtgttcctgtacatagcatgggtgcagctgtggatgtgtgcaaaagagtgtgagtgtgtgtgtgtgtgtgtaaaggggtctgtcctagagcccacatcagtttgttgtgaatctggaaaaagggtcggtgagggccgggagatgttgaccctggtgggagcaggctgaggctgccccgttctccacatcctctgttttgcccagtctctgattccattagggggagtgtgctgaagccattctcggatgcttcccagaccaggctccctctgccagagtcacatgcatccgagctgctggtctccattgtccagcaggaaggcggaaaggcaggcaagatggtgtgaagcttaaagcttgtatttgatggaaaaggtctcccctgttcatctgagaggccaagcctggccaccccaggctcagaacctgggcttcaagaaatgtgctgggagctcctaattcttttctaatatttaaggagtgttttgtaggattcaacaaccaccacaacttgaatttgtatcatgggaggtgggagggagtggcttagaggtgtctgcctatgcttaaagccaactgtggaagttttgttttcccttttttgtataataaagtgaaaaacaaaggtt

SEQ ID NO: 331800 - DNA, 3515 bp, Homo sapiens
gccagacaaagcccgagatggcgaagcggagcgacggctaatggcgagccccacgcgccgcgctccgcccgccccgctccggtgaggtggctttgaccccgggttgcccggccagcacgaccgaggaggtggctggacagctggaggatgaacggagaagccgactgccccacagacctggaaatggccgcccccaaaggccaagaccgttggtcccaggaagacatgctgactttgctggaatgcatgaagaacaaccttccatccaatgacagctccaagttcaaaaccaccgaatcacacatggactgggaaaaagtagcatttaaagacttttctggagacatgtgcaagctcaaatgggtggagatttctaatgaggtgaggaagttccgtacattgacagaattgatcctcgatgctcaggaacatgttaaaaatccttacaaaggcaaaaaactcaagaaacacccagacttcccaaagaagcccctgaccccttatttccgcttcttcatggagaagcgggccaagtatgcgaaactccaccctgagatgagcaacctggacctaaccaagattctgtccaagaaatacaaggagcttccggagaagaagaagatgaaatatattcaggacttccagagagagaaacaggagttcgagcgaaacctggcccgattcagggaggatcaccccgacctaatccagaatgccaagaaatcggacatcccagagaagcccaaaaccccccagcagctgtggtacacccacgagaagaaggtgtatctcaaagtgcggccagatgccactacgaaggaggtgaaggactccctggggaagcagtggtctcagctctcggacaaaaagaggctgaaatggattcataaggccctggagcagcggaaggagtacgaggagatcatgagagactatatccagaagcacccagagctgaacatcagtgaggagggtatcaccaagtccaccctcaccaaggccgaacgccagctcaaggacaagtttgacgggcgacccaccaagccacctccgaacagctactcgctgtactgcgcagagctcatggccaacatgaaggacgtgcccagcacagagcgcatggtgctgtgcagccagcagtggaagctgctgtcccagaaggagaaggacgcctatcacaagaagtgtgatcagaaaaagaaagattacgaggtggagctgctccgtttcctcgagagcctgcctgaggaggagcagcagcgggtcttgggggaagagaagatgctgaacatcaacaagaagcaggccaccagccccgcctccaagaagccagcccaggaagggggcaagggcggctccgagaagcccaagcggcccgtgtcggccatgttcatcttctcggaggagaaacggcggcagctgcaggaggagcggcctgagctctccgagagcgagctgacccgcctgctggcccgaatgtggaacgacctgtctgagaagaagaaggccaagtacaaggcccgagaggcggcgctcaaggctcagtcggagaggaagcccggcggggagcgcgaggaacggggcaagctgcccgagtcccccaaaagagctgaggagatctggcaacagagcgttatcggcgactacctggcccgcttcaagaatgaccgggtgaaggccttgaaagccatggaaatgacctggaataacatggaaaagaaggagaaactgatgtggattaagaaggcagccgaagaccaaaagcgatatgagagagagctgagtgagatgcgggcacctccagctgctacaaattcttccaagaagatgaaattccagggagaacccaagaagcctcccatgaacggttaccagaagttctcccaggagctgctgtccaatggggagctgaaccacctgccgctgaaggagcgcatggtggagatcggcagtcgctggcagcgcatctcccagagccagaaggagcactacaaaaagctggccgaggagcagcaaaagcagtacaaggtgcacctggacctctgggttaagagcctgtctccccaggaccgtgcagcatataaagagtacatctccaataaacgtaagagcatgaccaagctgcgaggcccaaaccccaaatccagccggactactctgcagtccaagtcggagtccgaggaggatgatgaagaggatgaggatgacgaggacgaggatgaagaagaggaagatgatgagaatggggactcctctgaagatggcggcgactcctctgagtccagcagcgaggacgagagcgaggatggggatgagaatgaagaggatgacgaggacgaagacgacgacgaggatgacgatgaggatgaagataatgagtccgagggcagcagctccagctcctcctcctcaggggactcctcagactctgactccaactgaggctcagccccaccccagggcagccagggagagcccaggagctcccctccccaactgaccacctttgtttctcccccatgttctgtcccttgcccccctggcctcccccactttctttctttctttaaaaaaaaaaaaaaaaatacggtgggggtagggggctggaggagcccaggccaggactctgcagcctcagagacatcagcccttgggggtcctcctccagggacagcaactatcagactaagccagcaccggaccagcctggcccaccccacccacttctgcacttgcggttccggcatggacaatggaccggagagtgggggtggggggtcccaaagagtttgatgaggccctccacacctgcggcccaatccaaggtggggtggaagcttggggaagacccattccttcccagaggggcctgccacctggacccctgcattggaactggaggcagggaacatggggaggaggagggtcggtgccttcaagaaaacaggcactgccctggtggccctctcccctgccccctgcaggaaggagctgcctggacccgttcatgggggagggggcagaagtgttttttatatatgtgtatatatttttttttaagctctgagctgtcaacgagacgtttcctaccgatctcggctgccgtctctgttgtcatttctgggagagggagggtttaggggtagatttggaaccttttaaaaatggtcttgatgtatgtggaagagagtatgtgtatgtgtgttcctgtacatagcatgggtgcagctgtggatgtgtgcaaaagagtgtgagtgtgtgtgtgtgtgtgtaaaggggtctgtcctagagcccacatcagtttgttgtgaatctggaaaaagggtcggtgagggccgggagatgttgaccctggtgggagcaggctgaggctgccccgttctccacatcctctgttttgcccagtctctgattccattagggggagttggcttagaggtgtctgcctatgcttaaagccaactgtggaagttttgttttcccttttttgtataataaagtgaaaaacaaaggtt

SEQ ID NO: 331801 - DNA, 4571 bp, Homo sapiens
ctccgccgcgggagggagctgcggctgtgccggccgagcgggggagggcgccgccactcagagccagggagggagccgctggagcgggaagcccggaggccgcgctgcgccggggtgaggtggctttgaccccgggttgcccggccagcacgaccgaggaggtggctggacagctggaggatgaacggagaagccgactgccccacagacctggaaatggccgcccccaaaggccaagaccgttggtcccaggaagacatgctgactttgctggaatgcatgaagaacaaccttccatccaatgacagctccaagttcaaaaccaccgaatcacacatggactgggaaaaagtagcatttaaagacttttctggagacatgtgcaagctcaaatgggtggagatttctaatgaggtgaggaagttccgtacattgacagaattgatcctcgatgctcaggaacatgttaaaaatccttacaaaggcaaaaaactcaagaaacacccagacttcccaaagaagcccctgaccccttatttccgcttcttcatggagaagcgggccaagtatgcgaaactccaccctgagatgagcaacctggacctaaccaagattctgtccaagaaatacaaggagcttccggagaagaagaagatgaaatatattcaggacttccagagagagaaacaggagttcgagcgaaacctggcccgattcagggaggatcaccccgacctaatccagaatgccaagaaatcggacatcccagagaagcccaaaaccccccagcagctgtggtacacccacgagaagaaggtgtatctcaaagtgcggccagatgagatcatgagagactatatccagaagcacccagagctgaacatcagtgaggagggtatcaccaagtccaccctcaccaaggccgaacgccagctcaaggacaagtttgacgggcgacccaccaagccacctccgaacagctactcgctgtactgcgcagagctcatggccaacatgaaggacgtgcccagcacagagcgcatggtgctgtgcagccagcagtggaagctgctgtcccagaaggagaaggacgcctatcacaagaagtgtgatcagaaaaagaaagattacgaggtggagctgctccgtttcctcgagagcctgcctgaggaggagcagcagcgggtcttgggggaagagaagatgctgaacatcaacaagaagcaggccaccagccccgcctccaagaagccagcccaggaagggggcaagggcggctccgagaagcccaagcggcccgtgtcggccatgttcatcttctcggaggagaaacggcggcagctgcaggaggagcggcctgagctctccgagagcgagctgacccgcctgctggcccgaatgtggaacgacctgtctgagaagaagaaggccaagtacaaggcccgagaggcggcgctcaaggctcagtcggagaggaagcccggcggggagcgcgaggaacggggcaagctgcccgagtcccccaaaagagctgaggagatctggcaacagagcgttatcggcgactacctggcccgcttcaagaatgaccgggtgaaggccttgaaagccatggaaatgacctggaataacatggaaaagaaggagaaactgatgtggattaagaaggcagccgaagaccaaaagcgatatgagagagagctgagtgagatgcgggcacctccagctgctacaaattcttccaagaagatgaaattccagggagaacccaagaagcctcccatgaacggttaccagaagttctcccaggagctgctgtccaatggggagctgaaccacctgccgctgaaggagcgcatggtggagatcggcagtcgctggcagcgcatctcccagagccagaaggagcactacaaaaagctggccgaggagcagcaaaagcagtacaaggtgcacctggacctctgggttaagagcctgtctccccaggaccgtgcagcatataaagagtacatctccaataaacgtaagagcatgaccaagctgcgaggcccaaaccccaaatccagccggactactctgcagtccaagtcggagtccgaggaggatgatgaagaggatgaggatgacgaggacgaggatgaagaagaggaagatgatgagaatggggactcctctgaagatggcggcgactcctctgagtccagcagcgaggacgagagcgaggatggggatgagaatgaagaggatgacgaggacgaagacgacgacgaggatgacgatgaggatgaagataatgagtccgagggcagcagctccagctcctcctcctcaggggactcctcagactctgactccaactgaggctcagccccaccccagggcagccagggagagcccaggagctcccctccccaactgaccacctttgtttctcccccatgttctgtcccttgcccccctggcctcccccactttctttctttctttaaaaaaaaaaaaaaaaatacggtgggggtagggggctggaggagcccaggccaggactctgcagcctcagagacatcagcccttgggggtcctcctccagggacagcaactatcagactaagccagcaccggaccagcctggcccaccccacccacttctgcacttgcggttccggcatggacaatggaccggagagtgggggtggggggtcccaaagagtttgatgaggccctccacacctgcggcccaatccaaggtggggtggaagcttggggaagacccattccttcccagaggggcctgccacctggacccctgcattggaactggaggcagggaacatggggaggaggagggtcggtgccttcaagaaaacaggcactgccctggtggccctctcccctgccccctgcaggaaggagctgcctggacccgttcatgggggagggggcagaagtgttttttatatatgtgtatatatttttttttaagctctgagctgtcaacgagacgtttcctaccgatctcggctgccgtctctgttgtcatttctgggagagggagggtttaggggtagatttggaaccttttaaaaatggtcttgatgtatgtggaagagagtatgtgtatgtgtgttcctgtacatagcatgggtgcagctgtggatgtgtgcaaaagagtgtgagtgtgtgtgtgtgtgtgtaaaggggtctgtcctagagcccacatcagtttgttgtgaatctggaaaaagggtcggtgagggccgggagatgttgaccctggtgggagcaggctgaggctgccccgttctccacatcctctgttttgcccagtctctgattccattagggggagtgtgctgaagccattctcggatgcttcccagaccaggctccctctgccagagtcacatgcatccgagctgctggtctccattgtccagcaggaaggcggaaaggcaggcaagatggtgtgaagcttaaagcttgtatttgatggaaaaggtctcccctgttcatctgagaggccaagcctggccaccccaggctcagaacctgggcttcaagaaatgtgctgggagctcctaacttacacatccctccagccttccttgaatcctcccaccaccccctatttcctttaatttctcaggtctgctccctcctcccccaaccccacagctgggcaagaagtctgcaaaagctgcatctgcagctgtctctaactcttcccagccatctcccgtattttttggtaccttgattccttgactcttaataagccaagccaccttatctctgtagttcttattttttgttgactaaatttggggggttcttttttatggtcatgtcactgacctattaaattggggcttggtgcttttccaccttccccctctgaatgaaagccaaggaatgggggaagagcgggaactctgccgcggaggtggagcaagaacggtgaagggccctggtcccagagaggctggtgggtccctctcccaaaggaaggcagacagtctctgctttgccttggaccttggtgctgggggtggggaggcctgggggggacactccccactcccattccccttcctttgtcctaatcctggaattaagtacaggggtttataggttctatttcttcccaagagccctgcaaagaaccccagtttcctatttggatgcccctacactgttgtgtttcagtggaatgtattttcatttaaaaacaactttgaatggggcactttttctttcctgttttaaaaattgaaaaattcttacagtacaaacaggactgtcagggtgggggtgttggtgctgtaagaggtcactcttgagtgcattttggcactgggatgggatggctggggtgggaagacccccatccccacccccaacttcttttctaatatttaaggagtgttttgtaggattcaacaaccaccacaacttgaatttgtatcatgggaggtgggagggagtggcttagaggtgtctgcctatgcttaaagccaactgtggaagttttgttttcccttttttgtataataaagtgaaaaacaaaggtt

SEQ ID NO: 331802 - DNA, 3700 bp, Homo sapiens
gccagacaaagcccgagatggcgaagcggagcgacggctaatggcgagccccacgcgccgcgctccgcccgccccgctccggtgaggtggctttgaccccgggttgcccggccagcacgaccgaggaggtggctggacagctggaggatgaacggagaagccgactgccccacagacctggaaatggccgcccccaaaggccaagaccgttggtcccaggaagacatgctgactttgctggaatgcatgaagaacaaccttccatccaatgacagctccaagttcaaaaccaccgaatcacacatggactgggaaaaagtagcatttaaagacttttctggagacatgtgcaagctcaaatgggtggagatttctaatgaggtgaggaagttccgtacattgacagaattgatcctcgatgctcaggaacatgttaaaaatccttacaaaggcaaaaaactcaagaaacacccagacttcccaaagaagcccctgaccccttatttccgcttcttcatggagaagcgggccaagtatgcgaaactccaccctgagatgagcaacctggacctaaccaagattctgtccaagaaatacaaggagcttccggagaagaagaagatgaaatatattcaggacttccagagagagaaacaggagttcgagcgaaacctggcccgattcagggaggatcaccccgacctaatccagaatgccaagaaatcggacatcccagagaagcccaaaaccccccagcagctgtggtacacccacgagaagaaggtgtatctcaaagtgcggccagatgccactacgaaggaggtgaaggactccctggggaagcagtggtctcagctctcggacaaaaagaggctgaaatggattcataaggccctggagcagcggaaggagtacgaggagatcatgagagactatatccagaagcacccagagctgaacatcagtgaggagggtatcaccaagtccaccctcaccaaggccgaacgccagctcaaggacaagtttgacgggcgacccaccaagccacctccgaacagctactcgctgtactgcgcagagctcatggccaacatgaaggacgtgcccagcacagagcgcatggtgctgtgcagccagcagtggaagctgctgtcccagaaggagaaggacgcctatcacaagaagtgtgatcagaaaaagaaagattacgaggtggagctgctccgtttcctcgagagcctgcctgaggaggagcagcagcgggtcttgggggaagagaagatgctgaacatcaacaagaagcaggccaccagccccgcctccaagaagccagcccaggaagggggcaagggcggctccgagaagcccaagcggcccgtgtcggccatgttcatcttctcggaggagaaacggcggcagctgcaggaggagcggcctgagctctccgagagcgagctgacccgcctgctggcccgaatgtggaacgacctgtctgagaagaagaaggccaagtacaaggcccgagaggcggcgctcaaggctcagtcggagaggaagcccggcggggagcgcgaggaacggggcaagctgcccgagtcccccaaaagagctgaggagatctggcaacagagcgttatcggcgactacctggcccgcttcaagaatgaccgggtgaaggccttgaaagccatggaaatgacctggaataacatggaaaagaaggagaaactgatgtggattaagaaggcagccgaagaccaaaagcgatatgagagagagctgagtgagatgcgggcacctccagctgctacaaattcttccaagaagatgaaattccagggagaacccaagaagcctcccatgaacggttaccagaagttctcccaggagctgctgtccaatggggagctgaaccacctgccgctgaaggagcgcatggtggagatcggcagtcgctggcagcgcatctcccagagccagaaggagcactacaaaaagctggccgaggagcagcaaaagcagtacaaggtgcacctggacctctgggttaagagcctgtctccccaggaccgtgcagcatataaagagtacatctccaataaacgtaagagcatgaccaagctgcgaggcccaaaccccaaatccagccggactactctgcagtccaagtcggagtccgaggaggatgatgaagaggatgaggatgacgaggacgaggatgaagaagaggaagatgatgagaatggggactcctctgaagatggcggcgactcctctgagtccagcagcgaggacgagagcgaggatggggatgagaatgaagaggatgacgaggacgaagacgacgacgaggatgacgatgaggatgaagataatgagtccgagggcagcagctccagctcctcctcctcaggggactcctcagactctgactccaactgaggctcagccccaccccagggcagccagggagagcccaggagctcccctccccaactgaccacctttgtttctcccccatgttctgtcccttgcccccctggcctcccccactttctttctttctttaaaaaaaaaaaaaaaaatacggtgggggtagggggctggaggagcccaggccaggactctgcagcctcagagacatcagcccttgggggtcctcctccagggacagcaactatcagactaagccagcaccggaccagcctggcccaccccacccacttctgcacttgcggttccggcatggacaatggaccggagagtgggggtggggggtcccaaagagtttgatgaggccctccacacctgcggcccaatccaaggtggggtggaagcttggggaagacccattccttcccagaggggcctgccacctggacccctgcattggaactggaggcagggaacatggggaggaggagggtcggtgccttcaagaaaacaggcactgccctggtggccctctcccctgccccctgcaggaaggagctgcctggacccgttcatgggggagggggcagaagtgttttttatatatgtgtatatatttttttttaagctctgagctgtcaacgagacgtttcctaccgaaaaaaaaaaaaaaaaaaaaaaaaaaaaaaaaaaaaaaaaaaaaaaaaaaaaaaaaaaaaaaaaaagaggggggggcgcggccaaaaagaaaaccccgagggggggcgccaagggcgagcgcgcgaccccgcggttttgtgtgtgttaaaagaggggggtggccccactatagaggggcggctcttttatatagagaggacagagagagaggtcgggagcgggggtgatattaaacagcgcttgttggacgtgtgggagaaaacagttttcggtcgctggggtgggtgactctctttggtgggaggaggagacacgacgcataatatgttgagtgggggagggggggaaaaaatagtgtgtgggggaagatattgctccgtacagagaaagtaatgtaaataagagggcgccgactagagggagggagataatgtataaagaattgttgttggacgggggtgttgaaatcagtggggtggtgataacaaaacaagatagggtagatagattttgatggtggtgggcggggggtgagaaagaggaagtgtggagaagcatctggtgaggagtatgtgggagttgcgagaaaagaaaatatttttagccg

SEQ ID NO: 331803 - DNA, 4684 bp, Homo sapiens
ctcggagcggcgctgcgctgcgccgaggcgggcgggcgggcgggcggagcggggcgggcggagcgcggcgcgtggggctcgccattagccgtcgctccgcttcgccatctcgggctttgtctggcgactcgctgccccggcgtcggctgcagcggagctgcggctcgactgttcggcccgccgtgctcccaggtgcccccggcctgcgctcccatccacacgctcgggtgaggtggctttgaccccgggttgcccggccagcacgaccgaggaggtggctggacagctggaggatgaacggagaagccgactgccccacagacctggaaatggccgcccccaaaggccaagaccgttggtcccaggaagacatgctgactttgctggaatgcatgaagaacaaccttccatccaatgacagctccaagttcaaaaccaccgaatcacacatggactgggaaaaagtagcatttaaagacttttctggagacatgtgcaagctcaaatgggtggagatttctaatgaggtgaggaagttccgtacattgacagaattgatcctcgatgctcaggaacatgttaaaaatccttacaaaggcaaaaaactcaagaaacacccagacttcccaaagaagcccctgaccccttatttccgcttcttcatggagaagcgggccaagtatgcgaaactccaccctgagatgagcaacctggacctaaccaagattctgtccaagaaatacaaggagcttccggagaagaagaagatgaaatatattcaggacttccagagagagaaacaggagttcgagcgaaacctggcccgattcagggaggatcaccccgacctaatccagaatgccaagaaatcggacatcccagagaagcccaaaaccccccagcagctgtggtacacccacgagaagaaggtgtatctcaaagtgcggccagatgagatcatgagagactatatccagaagcacccagagctgaacatcagtgaggagggtatcaccaagtccaccctcaccaaggccgaacgccagctcaaggacaagtttgacgggcgacccaccaagccacctccgaacagctactcgctgtactgcgcagagctcatggccaacatgaaggacgtgcccagcacagagcgcatggtgctgtgcagccagcagtggaagctgctgtcccagaaggagaaggacgcctatcacaagaagtgtgatcagaaaaagaaagattacgaggtggagctgctccgtttcctcgagagcctgcctgaggaggagcagcagcgggtcttgggggaagagaagatgctgaacatcaacaagaagcaggccaccagccccgcctccaagaagccagcccaggaagggggcaagggcggctccgagaagcccaagcggcccgtgtcggccatgttcatcttctcggaggagaaacggcggcagctgcaggaggagcggcctgagctctccgagagcgagctgacccgcctgctggcccgaatgtggaacgacctgtctgagaagaagaaggccaagtacaaggcccgagaggcggcgctcaaggctcagtcggagaggaagcccggcggggagcgcgaggaacggggcaagctgcccgagtcccccaaaagagctgaggagatctggcaacagagcgttatcggcgactacctggcccgcttcaagaatgaccgggtgaaggccttgaaagccatggaaatgacctggaataacatggaaaagaaggagaaactgatgtggattaagaaggcagccgaagaccaaaagcgatatgagagagagctgagtgagatgcgggcacctccagctgctacaaattcttccaagaagatgaaattccagggagaacccaagaagcctcccatgaacggttaccagaagttctcccaggagctgctgtccaatggggagctgaaccacctgccgctgaaggagcgcatggtggagatcggcagtcgctggcagcgcatctcccagagccagaaggagcactacaaaaagctggccgaggagcagcaaaagcagtacaaggtgcacctggacctctgggttaagagcctgtctccccaggaccgtgcagcatataaagagtacatctccaataaacgtaagagcatgaccaagctgcgaggcccaaaccccaaatccagccggactactctgcagtccaagtcggagtccgaggaggatgatgaagaggatgaggatgacgaggacgaggatgaagaagaggaagatgatgagaatggggactcctctgaagatggcggcgactcctctgagtccagcagcgaggacgagagcgaggatggggatgagaatgaagaggatgacgaggacgaagacgacgacgaggatgacgatgaggatgaagataatgagtccgagggcagcagctccagctcctcctcctcaggggactcctcagactctgactccaactgaggctcagccccaccccagggcagccagggagagcccaggagctcccctccccaactgaccacctttgtttctcccccatgttctgtcccttgcccccctggcctcccccactttctttctttctttaaaaaaaaaaaaaaaaatacggtgggggtagggggctggaggagcccaggccaggactctgcagcctcagagacatcagcccttgggggtcctcctccagggacagcaactatcagactaagccagcaccggaccagcctggcccaccccacccacttctgcacttgcggttccggcatggacaatggaccggagagtgggggtggggggtcccaaagagtttgatgaggccctccacacctgcggcccaatccaaggtggggtggaagcttggggaagacccattccttcccagaggggcctgccacctggacccctgcattggaactggaggcagggaacatggggaggaggagggtcggtgccttcaagaaaacaggcactgccctggtggccctctcccctgccccctgcaggaaggagctgcctggacccgttcatgggggagggggcagaagtgttttttatatatgtgtatatatttttttttaagctctgagctgtcaacgagacgtttcctaccgatctcggctgccgtctctgttgtcatttctgggagagggagggtttaggggtagatttggaaccttttaaaaatggtcttgatgtatgtggaagagagtatgtgtatgtgtgttcctgtacatagcatgggtgcagctgtggatgtgtgcaaaagagtgtgagtgtgtgtgtgtgtgtgtaaaggggtctgtcctagagcccacatcagtttgttgtgaatctggaaaaagggtcggtgagggccgggagatgttgaccctggtgggagcaggctgaggctgccccgttctccacatcctctgttttgcccagtctctgattccattagggggagtgtgctgaagccattctcggatgcttcccagaccaggctccctctgccagagtcacatgcatccgagctgctggtctccattgtccagcaggaaggcggaaaggcaggcaagatggtgtgaagcttaaagcttgtatttgatggaaaaggtctcccctgttcatctgagaggccaagcctggccaccccaggctcagaacctgggcttcaagaaatgtgctgggagctcctaacttacacatccctccagccttccttgaatcctcccaccaccccctatttcctttaatttctcaggtctgctccctcctcccccaaccccacagctgggcaagaagtctgcaaaagctgcatctgcagctgtctctaactcttcccagccatctcccgtattttttggtaccttgattccttgactcttaataagccaagccaccttatctctgtagttcttattttttgttgactaaatttggggggttcttttttatggtcatgtcactgacctattaaattggggcttggtgcttttccaccttccccctctgaatgaaagccaaggaatgggggaagagcgggaactctgccgcggaggtggagcaagaacggtgaagggccctggtcccagagaggctggtgggtccctctcccaaaggaaggcagacagtctctgctttgccttggaccttggtgctgggggtggggaggcctgggggggacactccccactcccattccccttcctttgtcctaatcctggaattaagtacaggggtttataggttctatttcttcccaagagccctgcaaagaaccccagtttcctatttggatgcccctacactgttgtgtttcagtggaatgtattttcatttaaaaacaactttgaatggggcactttttctttcctgttttaaaaattgaaaaattcttacagtacaaacaggactgtcagggtgggggtgttggtgctgtaagaggtcactcttgagtgcattttggcactgggatgggatggctggggtgggaagacccccatccccacccccaacttcttttctaatatttaaggagtgttttgtaggattcaacaaccaccacaacttgaatttgtatcatgggaggtgggagggagtggcttagaggtgtctgcctatgcttaaagccaactgtggaagttttgttttcccttttttgtataataaagtgaaaaacaaaggtt

SEQ ID NO: 331804 - DNA, 4970 bp, Homo sapiens
cggccgctccgctccggggctggcggcggctgcgctgcgtccgggtccccgccgggttgcggaggcggggggaaccggccggggggaggcgggaggaggagactggggcgcgtgcccgcttccgtggccgcgcgcgccctttacccgcccttcctcttcccccgccctccagcctggggcctccccggggcgggcgctccgaggaggaggagattttttctttttttttttttttggctggggttgggaagcggggcggagggcgggcgctcgctgcacgcgggagctaggagcaggccctcgcgtggccaggggagggcgcgcgccgcggagccgggctgcaggggctgggggagggggtcacgaggaagaggaggggcgcactcccattcccatagaccccttaagtctaataaggtcatggctgagtctctcagagtgtggacctgcccccttctactctgggcggttagaaagtcgttagtcgttcacctctcagccttcctgagtgggaactggtatgtcttccaaagggtgaggtggctttgaccccgggttgcccggccagcacgaccgaggaggtggctggacagctggaggatgaacggagaagccgactgccccacagacctggaaatggccgcccccaaaggccaagaccgttggtcccaggaagacatgctgactttgctggaatgcatgaagaacaaccttccatccaatgacagctccaagttcaaaaccaccgaatcacacatggactgggaaaaagtagcatttaaagacttttctggagacatgtgcaagctcaaatgggtggagatttctaatgaggtgaggaagttccgtacattgacagaattgatcctcgatgctcaggaacatgttaaaaatccttacaaaggcaaaaaactcaagaaacacccagacttcccaaagaagcccctgaccccttatttccgcttcttcatggagaagcgggccaagtatgcgaaactccaccctgagatgagcaacctggacctaaccaagattctgtccaagaaatacaaggagcttccggagaagaagaagatgaaatatattcaggacttccagagagagaaacaggagttcgagcgaaacctggcccgattcagggaggatcaccccgacctaatccagaatgccaagaaatcggacatcccagagaagcccaaaaccccccagcagctgtggtacacccacgagaagaaggtgtatctcaaagtgcggccagatgagatcatgagagactatatccagaagcacccagagctgaacatcagtgaggagggtatcaccaagtccaccctcaccaaggccgaacgccagctcaaggacaagtttgacgggcgacccaccaagccacctccgaacagctactcgctgtactgcgcagagctcatggccaacatgaaggacgtgcccagcacagagcgcatggtgctgtgcagccagcagtggaagctgctgtcccagaaggagaaggacgcctatcacaagaagtgtgatcagaaaaagaaagattacgaggtggagctgctccgtttcctcgagagcctgcctgaggaggagcagcagcgggtcttgggggaagagaagatgctgaacatcaacaagaagcaggccaccagccccgcctccaagaagccagcccaggaagggggcaagggcggctccgagaagcccaagcggcccgtgtcggccatgttcatcttctcggaggagaaacggcggcagctgcaggaggagcggcctgagctctccgagagcgagctgacccgcctgctggcccgaatgtggaacgacctgtctgagaagaagaaggccaagtacaaggcccgagaggcggcgctcaaggctcagtcggagaggaagcccggcggggagcgcgaggaacggggcaagctgcccgagtcccccaaaagagctgaggagatctggcaacagagcgttatcggcgactacctggcccgcttcaagaatgaccgggtgaaggccttgaaagccatggaaatgacctggaataacatggaaaagaaggagaaactgatgtggattaagaaggcagccgaagaccaaaagcgatatgagagagagctgagtgagatgcgggcacctccagctgctacaaattcttccaagaagatgaaattccagggagaacccaagaagcctcccatgaacggttaccagaagttctcccaggagctgctgtccaatggggagctgaaccacctgccgctgaaggagcgcatggtggagatcggcagtcgctggcagcgcatctcccagagccagaaggagcactacaaaaagctggccgaggagcagcaaaagcagtacaaggtgcacctggacctctgggttaagagcctgtctccccaggaccgtgcagcatataaagagtacatctccaataaacgtaagagcatgaccaagctgcgaggcccaaaccccaaatccagccggactactctgcagtccaagtcggagtccgaggaggatgatgaagaggatgaggatgacgaggacgaggatgaagaagaggaagatgatgagaatggggactcctctgagtccagcagcgaggacgagagcgaggatggggatgagaatgaagaggatgacgaggacgaagacgacgacgaggatgacgatgaggatgaagataatgagtccgagggcagcagctccagctcctcctcctcaggggactcctcagactctgactccaactgaggctcagccccaccccagggcagccagggagagcccaggagctcccctccccaactgaccacctttgtttctcccccatgttctgtcccttgcccccctggcctcccccactttctttctttctttaaaaaaaaaaaaaaaaatacggtgggggtagggggctggaggagcccaggccaggactctgcagcctcagagacatcagcccttgggggtcctcctccagggacagcaactatcagactaagccagcaccggaccagcctggcccaccccacccacttctgcacttgcggttccggcatggacaatggaccggagagtgggggtggggggtcccaaagagtttgatgaggccctccacacctgcggcccaatccaaggtggggtggaagcttggggaagacccattccttcccagaggggcctgccacctggacccctgcattggaactggaggcagggaacatggggaggaggagggtcggtgccttcaagaaaacaggcactgccctggtggccctctcccctgccccctgcaggaaggagctgcctggacccgttcatgggggagggggcagaagtgttttttatatatgtgtatatatttttttttaagctctgagctgtcaacgagacgtttcctaccgatctcggctgccgtctctgttgtcatttctgggagagggagggtttaggggtagatttggaaccttttaaaaatggtcttgatgtatgtggaagagagtatgtgtatgtgtgttcctgtacatagcatgggtgcagctgtggatgtgtgcaaaagagtgtgagtgtgtgtgtgtgtgtgtaaaggggtctgtcctagagcccacatcagtttgttgtgaatctggaaaaagggtcggtgagggccgggagatgttgaccctggtgggagcaggctgaggctgccccgttctccacatcctctgttttgcccagtctctgattccattagggggagtgtgctgaagccattctcggatgcttcccagaccaggctccctctgccagagtcacatgcatccgagctgctggtctccattgtccagcaggaaggcggaaaggcaggcaagatggtgtgaagcttaaagcttgtatttgatggaaaaggtctcccctgttcatctgagaggccaagcctggccaccccaggctcagaacctgggcttcaagaaatgtgctgggagctcctaacttacacatccctccagccttccttgaatcctcccaccaccccctatttcctttaatttctcaggtctgctccctcctcccccaaccccacagctgggcaagaagtctgcaaaagctgcatctgcagctgtctctaactcttcccagccatctcccgtattttttggtaccttgattccttgactcttaataagccaagccaccttatctctgtagttcttattttttgttgactaaatttggggggttcttttttatggtcatgtcactgacctattaaattggggcttggtgcttttccaccttccccctctgaatgaaagccaaggaatgggggaagagcgggaactctgccgcggaggtggagcaagaacggtgaagggccctggtcccagagaggctggtgggtccctctcccaaaggaaggcagacagtctctgctttgccttggaccttggtgctgggggtggggaggcctgggggggacactccccactcccattccccttcctttgtcctaatcctggaattaagtacaggggtttataggttctatttcttcccaagagccctgcaaagaaccccagtttcctatttggatgcccctacactgttgtgtttcagtggaatgtattttcatttaaaaacaactttgaatggggcactttttctttcctgttttaaaaattgaaaaattcttacagtacaaacaggactgtcagggtgggggtgttggtgctgtaagaggtcactcttgagtgcattttggcactgggatgggatggctggggtgggaagacccccatccccacccccaacttcttttctaatatttaaggagtgttttgtaggattcaacaaccaccacaacttgaatttgtatcatgggaggtgggagggagtggcttagaggtgtctgcctatgcttaaagccaactgtggaagttttgttttcccttttttgtataataaagtgaaaaacaaaggtt

SEQ ID NO: 331805 - DNA, 2486 bp, Homo sapiens
  misc_feature (56)..(56): n is a, c, g, or t
  misc_feature (58)..(58): n is a, c, g, or t
agaggatgacgaggacgaagacgacgacgaggatgacgatgagcatgaagataatnantccgagggcagcagctccagctcctggactcctctgaagatggcggcgactcctctgagtccagcagcgaggacgagagcgaggatggggatgagaatgaagaggatgacgaggacgaagacgacgacgaggatgacgatgaggatgaagataatgagtccgagggcagcagctccagctcctcctcctcaggggactcctcagactctgactccaactgaggctcagccccaccccagggcagccagggagagcccaggagctcccctccccaactgaccacctttgtttctcccccatgttctgtcccttgcccccctggcctcccccactttctttctttctttaaaaaaaaaaaaaaaaatacggtgggggtagggggctggaggagcccaggccaggactctgcagcctcagagacatcagcccttgggggtcctcctccagggacagcaactatcagactaagccagcaccggaccagcctggcccaccccacccacttctgcacttgcggttccggcatggacaatggaccggagagtgggggtggggggtcccaaagagtttgatgaggccctccacacctgcggcccaatccaaggtggggtggaagcttggggaagacccattccttcccagaggggcctgccacctggacccctgcattggaactggaggcagggaacatggggaggaggagggtcggtgccttcaagaaaacaggcactgccctggtggccctctcccctgccccctgcaggaaggagctgcctggacccgttcatgggggagggggcagaagtgttttttatatatgtgtatatatttttttttaagctctgagctgtcaacgagacgtttcctaccgatctcggctgccgtctctgttgtcatttctgggagagggagggtttaggggtagatttggaaccttttaaaaatggtcttgatgtatgtggaagagagtatgtgtatgtgtgttcctgtacatagcatgggtgcagctgtggatgtgtgcaaaagagtgtgagtgtgtgtgtgtgtgtgtaaaggggtctgtcctagagcccacatcagtttgttgtgaatctggaaaaagggtcggtgagggccgggagatgttgaccctggtgggagcaggctgaggctgccccgttctccacatcctctgttttgcccagtctctgattccattagggggagtgtgctgaagccattctcggatgcttcccagaccaggctccctctgccagagtcacatgcatccgagctgctggtctccattgtccagcaggaaggcggaaaggcaggcaagatggtgtgaagcttaaagcttgtatttgatggaaaaggtctcccctgttcatctgagaggccaagcctggccaccccaggctcagaacctgggcttcaagaaatgtgctgggagctcctaacttacacatccctccagccttccttgaatcctcccaccaccccctatttcctttaatttctcaggtctgctccctcctcccccaaccccacagctgggcaagaagtctgcaaaagctgcatctgcagctgtctctaactcttcccagccatctcccgtattttttggtaccttgattccttgactcttaataagccaagccaccttatctctgtagttcttattttttgttgactaaatttggggggttcttttttatggtcatgtcactgacctattaaattggggcttggtgcttttccaccttccccctctgaatgaaagccaaggaatgggggaagagcgggaactctgccgcggaggtggagcaagaacggtgaagggccctggtcccagagaggctggtgggtccctctcccaaaggaaggcagacagtctctgctttgccttggaccttggtgctgggggtggggaggcctgggggggacactccccactcccattccccttcctttgtcctaatcctggaattaagtacaggggtttataggttctatttcttcccaagagccctgcaaagaaccccagtttcctatttggatgcccctacactgttgtgtttcagtggaatgtattttcatttaaaaacaactttgaatggggcactttttctttcctgttttaaaaattgaaaaattcttacagtacaaacaggactgtcagggtgggggtgttggtgctgtaagaggtcactcttgagtgcattttggcactgggatgggatggctggggtgggaagacccccatccccacccccaacttcttttctaatatttaaggagtgttttgtaggattcaacaaccaccacaacttgaatttgtatcatgggaggtgggagggagtggcttagaggtgtctgcctatgcttaaagccaactgtggaagttttgttttcccttttttgtataataaagtgaaaaacaaaggtt

SEQ ID NO: 331806 - DNA, 2621 bp, Homo sapiens
ctccgccgcgggagggagctgcggctgtgccggccgagcgggggagggcgccgccactcagagccagggagggagccgctggagcgggaagcccggaggccgcgctgcgccggggtgaggtggctttgaccccgggttgcccggccagcacgaccgaggaggtggctggacagctggaggatgaacggagaagccgactgccccacagacctggaaatggccgcccccaaaggccaagaccgttggtcccaggaagacatgctgactttgctggaatgcatgaagaacaaccttccatccaatgacagctccaagttcaaaaccaccgaatcacacatggactgggaaaaagtagcatttaaagacttttctggagacatgtgcaagctcaaatgggtggagatttctaatgaggtgaggaagttccgtacattgacagaattgatcctcgatgctcaggaacatgttaaaaatccttacaaaggcaaaaaactcaagaaacacccagacttcccaaagaagcccctgaccccttatttccgcttcttcatggagaagcgggccaagtatgcgaaactccaccctgagatgagcaacctggacctaaccaagattctgtccaagaaatacaaggagcttccggagaagaagaagatgaaatatattcaggacttccagagagagaaacaggagttcgagcgaaacctggcccgattcagggaggatcaccccgacctaatccagaatgccaagaaatcggacatcccagagaagcccaaaaccccccagcagctgtggtacacccacgagaagaaggtgtatctcaaagtgcggccagatgagatcatgagagactatatccagaagcacccagagctgaacatcagtgaggagggtatcaccaagtccaccctcaccaaggccgaacgccagctcaaggacaagtttgacgggcgacccaccaagccacctccgaacagctactcgctgtactgcgcagagctcatggccaacatgaaggacgtgcccagcacagagcgcatggtgctgtgcagccagcagtggaagctgctgtcccagaaggagaaggacgcctatcacaagaagtgtgatcagaaaaagaaagattacgaggtggagctgctccgtttcctcgagagcctgcctgaggaggagcagcagcgggtcttgggggaagagaagatgctgaacatcaacaagaagcaggccaccagccccgcctccaagaagccagcccaggaagggggcaagggcggctccgagaagcccaagcggcccgtgtcggccatgttcatcttctcggaggagaaacggcggcagctgcaggaggagcggcctgagctctccgagagcgagctgacccgcctgctggcccgaatgtggaacgacctgtctgagaagaagaaggccaagtacaaggcccgagaggcggcgctcaaggctcagtcggagaggaagcccggcggggagcgcgaggaacggggcaagctgcccgagtcccccaaaagagctgaggagatctggcaacagagcgttatcggcgactacctggcccgcttcaagaatgaccgggtgaaggccttgaaagccatggaaatgacctggaataacatggaaaagaaggagaaactgatgtggattaagaaggcagccgaagaccaaaagcgatatgagagagagctgagtgagatgcgggcacctccagctgctacaaattcttccaagaagatgaaattccagggagaacccaagaagcctcccatgaacggttaccagaagttctcccaggagctgctgtccaatggggagctgaaccacctgccgctgaaggagcgcatggtggagatcggcagtcgctggcagcgcatctcccagagccagaaggagcactacaaaaagctggccgaggagcagcaaaagcagtacaaggtgcacctggacctctgggttaagagcctgtctccccaggaccgtgcagcatataaagagtacatctccaataaacgtaagagcatgaccaagctgcgaggcccaaaccccaaatccagccggactactctgcagtccaagtcggagtccgaggaggatgatgaagaggatgaggatgacgaggacgaggatgaagaagaggaagatgatgagaatggggactcctctgaagatggcggcgactcctctgagtccagcagcgaggacgagagcgaggatggggatgagaatgaagaggatgacgaggacgaagacgacgacgaggatgacgatgaggatgaagataatgagtccgagggcagcagctccagctcctcctcctcaggggactcctcagactctgactccaactgaggctcagccccaccccagggcagccagggagagcccaggagctcccctccccaactgaccacctttgtttctcccccatgttctgtcccttgcccccctggcctcccccactttctttctttctttaaaaaaaaaaaaaaaaaaaaggctgaaggaagctccagactcaatgtgacccccaggtggcatcgccaacgcctgcctcgtgccacctcatgcttataataaagccggcgtcagagaccgctgcttccctc

SEQ ID NO: 331807 - DNA, 2531 bp, Homo sapiens
cggccgctccgctccggggctggcggcggctgcgctgcgtccgggtccccgccgggttgcggaggcggggggaaccggccggggggaggcgggaggaggagactggggcgcgtgcccgcttccgtggccgcgcgcgccctttacccgcccttcctcttcccccgccctccagcctggggcctccccggggcgggcgctccgaggaggaggagattttttctttttttttttttttggctggggttgggaagcggggcggagggcgggcgctcgctgcacgcgggagctaggagcaggccctcgcgtggccaggggagggcgcgcgccgcggagccgggctgcaggggctgggggagggggtcacgaggaagaggaggggcgcactcccattcccatagaccccttaagtctaataaggtcatggctgagtctctcagagtgtggacctgcccccttctactctgggcggttagaaagtcgttagtcgttcacctctcagccttcctgagtgggaactggtatgtcttccaaagggtgaggtggctttgaccccgggttgcccggccagcacgaccgaggaggtggctggacagctggaggatgaacggagaagccgactgccccacagacctggaaatggccgcccccaaaggccaagaccgttggtcccaggaagacatgctgactttgctggaatgcatgaagaacaaccttccatccaatgacagctccaagttcaaaaccaccgaatcacacatggactgggaaaaagtagcatttaaagacttttctggagacatgtgcaagctcaaatgggtggagatttctaatgaggtgaggaagttccgtacattgacagaattgatcctcgatgctcaggaacatgttaaaaatccttacaaaggcaaaaaactcaagaaacacccagacttcccaaagaagcccctgaccccttatttccgcttcttcatggagaagcgggccaagtatgcgaaactccaccctgagatgagcaacctggacctaaccaagattctgtccaagaaatacaaggagcttccggagaagaagaagatgaaatatattcaggacttccagagagagaaacaggagttcgagcgaaacctggcccgattcagggaggatcaccccgacctaatccagaatgccaagaaatcggacatcccagagaagcccaaaaccccccagcagctgtggtacacccacgagaagaaggtgtatctcaaagtgcggccagatgagatcatgagagactatatccagaagcacccagagctgaacatcagtgaggagggtatcaccaagtccaccctcaccaaggccgaacgccagctcaaggacaagtttgacgggcgacccaccaagccacctccgaacagctactcgctgtactgcgcagagctcatggccaacatgaaggacgtgcccagcacagagcgcatggtgctgtgcagccagcagtggaagctgctgtcccaggacagcaactatcagactaagccagcaccggaccagcctggcccaccccacccacttctgcacttgcggttccggcatggacaatggaccggagagtgggggtggggggtcccaaagagtttgatgaggccctccacacctgcggcccaatccaaggtggggtggaagcttggggaagacccattccttcccagaggggcctgccacctggacccctgcattggaactggaggcagggaacatggggaggaggagggtcggtgccttcaagaaaacaggcactgccctggtggccctctcccctgccccctgcaggaaggagctgcctggacccgttcatgggggagggggcagaagtgttttttatatatgtgtatatatttttttttaagctctgagctgtcaacgagacgtttcctaccgaaaaaaaaaaaaaaaaaaaaaaaaaaaaaaaaaaaaaaaaaaaaaaaaaaaaaaaaaaaaaaaaaagaggggggggcgcggccaaaaagaaaaccccgagggggggcgccaagggcgagcgcgcgaccccgcggttttgtgtgtgttaaaagaggggggtggccccactatagaggggcggctcttttatatagagaggacagagagagaggtcgggagcgggggtgatattaaacagcgcttgttggacgtgtgggagaaaacagttttcggtcgctggggtgggtgactctctttggtgggaggaggagacacgacgcataatatgttgagtgggggagggggggaaaaaatagtgtgtgggggaagatattgctccgtacagagaaagtaatgtaaataagagggcgccgactagagggagggagataatgtataaagaattgttgttggacgggggtgttgaaatcagtggggtggtgataacaaaacaagatagggtagatagattttgatggtggtgggcggggggtgagaaagaggaagtgtggagaagcatctggtgaggagtatgtgggagttgcgagaaaagaaaatatttttagccg

SEQ ID NO: 331808 - DNA, 1621 bp, Homo sapiens
cggccgctccgctccggggctggcggcggctgcgctgcgtccgggtccccgccgggttgcggaggcggggggaaccggccggggggaggcgggaggaggagactggggcgcgtgcccgcttccgtggccgcgcgcgccctttacccgcccttcctcttcccccgccctccagcctggggcctccccggggcgggcgctccgaggaggaggagattttttctttttttttttttttggctggggttgggaagcggggcggagggcgggcgctcgctgcacgcgggagctaggagcaggccctcgcgtggccaggggagggcgcgcgccgcggagccgggctgcaggggctgggggagggggtcacgaggaagaggaggggcgcactcccattcccatagaccccttaagtctaataaggtcatggctgagtctctcagagtgtggacctgcccccttctactctgggcggttagaaagtcgttagtcgttcacctctcagccttcctgagtgggaactggtatgtcttccaaagggtgaggtggctttgaccccgggttgcccggccagcacgaccgaggaggtggctggacagctggaggatgaacggagaagccgactgccccacagacctggaaatggccgcccccaaaggccaagaccgttggtcccaggaagacatgctgactttgctggaatgcatgaagaacaaccttccatccaatgacagctccaagttcaaaaccaccgaatcacacatggactgggaaaaagtagcatttaaagacttttctggagacatgtgcaagctcaaatgggtggagatttctaatgaggtgaggaagttccgtacattgacagaattgatcctcgatgctcaggaacatgttaaaaatccttacaaaggcaaaaaactcaagaaacacccagacttcccaaagaagcccctgaccccttatttccgcttcttcatggagaagcgggccaagtatgcgaaactccaccctgagatgagcaacctggacctaaccaagattctgtccaagaaatacaaggagcttccggagaagaagaagatgaaatatattcaggacttccagagagagaaacaggagttcgagcgaaacctggcccgattcagggaggatcaccccgacctaatccagaatgccaagaaatcggacatcccagagaagcccaaaaccccccagcagctgtggtacacccacgagaagaaggtgtatctcaaagtgcggccagatgagatcatgagagactatatccagaagcacccagagctgaacatcagtgaggagggtatcaccaagtccaccctcaccaaggccgaacgccagctcaaggacaagtttgacgggcgacccaccaagccacctccgaacagctactcgctgtactgcgcagagctcatggccaacatgaaggacgtgcccagcacagagcgcatggtgctgtgcagccagcagtggaagctgctgtcccagaaggagaaggacgcctatcacaagaagtgtgatcagaaaaagaaagattacgaggtggagctgctccgtttcctcgagagcctgcctgaggaggaggtattggcatggaggttattggcat

SEQ ID NO: 331809 - DNA, 1209 bp, Homo sapiens
cggccgctccgctccggggctggcggcggctgcgctgcgtccgggtccccgccgggttgcggaggcggggggaaccggccggggggaggcgggaggaggagactggggcgcgtgcccgcttccgtggccgcgcgcgccctttacccgcccttcctcttcccccgccctccagcctggggcctccccggggcgggcgctccgaggaggaggagattttttctttttttttttttttggctggggttgggaagcggggcggagggcgggcgctcgctgcacgcgggagctaggagcaggccctcgcgtggccaggggagggcgcgcgccgcggagccgggctgcaggggctgggggagggggtcacgaggaagaggaggggcgcactcccattcccatagaccccttaagtctaataaggtcatggctgagtctctcagagtgtggacctgcccccttctactctgggcggttagaaagtcgttagtcgttcacctctcagccttcctgagtgggaactggtatgtcttccaaagggtgaggtggctttgaccccgggttgcccggccagcacgaccgaggaggtggctggacagctggaggatgaacggagaagccgactgccccacagacctggaaatggccgcccccaaaggccaagaccgttggtcccaggaagacatgctgactttgctggaatgcatgaagaacaaccttccatccaatgacagctccaagttcaaaaccaccgaatcacacatggactgggaaaaagtagcatttaaagacttttctggagacatgtgcaagctcaaatgggtggagatttctaatgaggtgaggaagttccgtacattgacagaattgatcctcgatgctcaggaacatgttaaaaatccttacaaaggcaaaaaactcaagaaacacccagacttcccaaagaagcccctgaccccttatttccgcttcttcatggagaagcgggccaagtatgcgaaactccaccctgagatgagcaacctggacctaaccaagattctgtccaagaaatacaaggagcttccggagaagaagaagatgaaatatattcaggacttccagagagagaaacaggagttcgagcgaaacctggcccgattcagggaggatcaccccgacctaatccagaatgcacaccgcggcaaagtacaaaccccccaaaagccaaaaaaa

SEQ ID NO: 331810 - DNA, 4649 bp, Homo sapiens
gccagacaaagcccgagatggcgaagcggagcgacggctaatggcgagccccacgcgccgcgctccgcccgccccgctccggtgaggtggctttgaccccgggttgcccggccagcacgaccgaggaggtggctggacagctggaggatgaacggagaagccgactgccccacagacctggaaatggccgcccccaaaggccaagaccgttggtcccaggaagacatgctgactttgctggaatgcatgaagaacaaccttccatccaatgacagctccaagttcaaaaccaccgaatcacacatggactgggaaaaagtagcatttaaagacttttctggagacatgtgcaagctcaaatgggtggagatttctaatgaggtgaggaagttccgtacattgacagaattgatcctcgatgctcaggaacatgttaaaaatccttacaaaggcaaaaaactcaagaaacacccagacttcccaaagaagcccctgaccccttatttccgcttcttcatggagaagcgggccaagtatgcgaaactccaccctgagatgagcaacctggacctaaccaagattctgtccaagaaatacaaggagcttccggagaagaagaagatgaaatatattcaggacttccagagagagaaacaggagttcgagcgaaacctggcccgattcagggaggatcaccccgacctaatccagaatgccaagaaatcggacatcccagagaagcccaaaaccccccagcagctgtggtacacccacgagaagaaggtgtatctcaaagtgcggccagatgccactacgaaggaggtgaaggactccctggggaagcagtggtctcagctctcggacaaaaagaggctgaaatggattcataaggccctggagcagcggaaggagtacgaggagatcatgagagactatatccagaagcacccagagctgaacatcagtgaggagggtatcaccaagtccaccctcaccaaggccgaacgccagctcaaggacaagtttgacgggcgacccaccaagccacctccgaacagctactcgctgtactgcgcagagctcatggccaacatgaaggacgtgcccagcacagagcgcatggtgctgtgcagccagcagtggaagctgctgtcccagaaggagaaggacgcctatcacaagaagtgtgatcagaaaaagaaagattacgaggtggagctgctccgtttcctcgagagcctgcctgaggaggagcagcagcgggtcttgggggaagagaagatgctgaacatcaacaagaagcaggccaccagccccgcctccaagaagccagcccaggaagggggcaagggcggctccgagaagcccaagcggcccgtgtcggccatgttcatcttctcggaggagaaacggcggcagctgcaggaggagcggcctgagctctccgagagcgagctgacccgcctgctggcccgaatgtggaacgacctgtctgagaagaagaaggccaagtacaaggcccgagaggcggcgctcaaggctcagtcggagaggaagcccggcggggagcgcgaggaacggggcaagctgcccgagtcccccaaaagagctgaggagatctggcaacagagcgttatcggcgactacctggcccgcttcaagaatgaccgggtgaaggccttgaaagccatggaaatgacctggaataacatggaaaagaaggagaaactgatgtggattaagaaggcagccgaagaccaaaagcgatatgagagagagctgagtgagatgcgggcacctccagctgctacaaattcttccaagaagatgaaattccagggagaacccaagaagcctcccatgaacggttaccagaagttctcccaggagctgctgtccaatggggagctgaaccacctgccgctgaaggagcgcatggtggagatcggcagtcgctggcagcgcatctcccagagccagaaggagcactacaaaaagctggccgaggagcagcaaaagcagtacaaggtgcacctggacctctgggttaagagcctgtctccccaggaccgtgcagcatataaagagtacatctccaataaacgtaagagcatgaccaagctgcgaggcccaaaccccaaatccagccggactactctgcagtccaagtcggagtccgaggaggatgatgaagaggatgaggatgacgaggacgaggatgaagaagaggaagatgatgagaatggggactcctctgaagatggcggcgactcctctgagtccagcagcgaggacgagagcgaggatggggatgagaatgaagaggatgacgaggacgaagacgacgacgaggatgacgatgaggatgaagataatgagtccgagggcagcagctccagctcctcctcctcaggggactcctcagactctgactccaactgaggctcagccccaccccagggcagccagggagagcccaggagctcccctccccaactgaccacctttgtttctcccccatgttctgtcccttgcccccctggcctcccccactttctttctttctttaaaaaaaaaaaaaaaaatacggtgggggtagggggctggaggagcccaggccaggactctgcagcctcagagacatcagcccttgggggtcctcctccagggacagcaactatcagactaagccagcaccggaccagcctggcccaccccacccacttctgcacttgcggttccggcatggacaatggaccggagagtgggggtggggggtcccaaagagtttgatgaggccctccacacctgcggcccaatccaaggtggggtggaagcttggggaagacccattccttcccagaggggcctgccacctggacccctgcattggaactggaggcagggaacatggggaggaggagggtcggtgccttcaagaaaacaggcactgccctggtggccctctcccctgccccctgcaggaaggagctgcctggacccgttcatgggggagggggcagaagtgttttttatatatgtgtatatatttttttttaagctctgagctgtcaacgagacgtttcctaccgatctcggctgccgtctctgttgtcatttctgggagagggagggtttaggggtagatttggaaccttttaaaaatggtcttgatgtatgtggaagagagtatgtgtatgtgtgttcctgtacatagcatgggtgcagctgtggatgtgtgcaaaagagtgtgagtgtgtgtgtgtgtgtgtaaaggggtctgtcctagagcccacatcagtttgttgtgaatctggaaaaagggtcggtgagggccgggagatgttgaccctggtgggagcaggctgaggctgccccgttctccacatcctctgttttgcccagtctctgattccattagggggagtgtgctgaagccattctcggatgcttcccagaccaggctccctctgccagagtcacatgcatccgagctgctggtctccattgtccagcaggaaggcggaaaggcaggcaagatggtgtgaagcttaaagcttgtatttgatggaaaaggtctcccctgttcatctgagaggccaagcctggccaccccaggctcagaacctgggcttcaagaaatgtgctgggagctcctaacttacacatccctccagccttccttgaatcctcccaccaccccctatttcctttaatttctcaggtctgctccctcctcccccaaccccacagctgggcaagaagtctgcaaaagctgcatctgcagctgtctctaactcttcccagccatctcccgtattttttggtaccttgattccttgactcttaataagccaagccaccttatctctgtagttcttattttttgttgactaaatttggggggttcttttttatggtcatgtcactgacctattaaattggggcttggtgcttttccaccttccccctctgaatgaaagccaaggaatgggggaagagcgggaactctgccgcggaggtggagcaagaacggtgaagggccctggtcccagagaggctggtgggtccctctcccaaaggaaggcagacagtctctgctttgccttggaccttggtgctgggggtggggaggcctgggggggacactccccactcccattccccttcctttgtcctaatcctggaattaagtacaggggtttataggttctatttcttcccaagagccctgcaaagaaccccagtttcctatttggatgcccctacactgttgtgtttcagtggaatgtattttcatttaaaaacaactttgaatggggcactttttctttcctgttttaaaaattgaaaaattcttacagtacaaacaggactgtcagggtgggggtgttggtgctgtaagaggtcactcttgagtgcattttggcactgggatgggatggctggggtgggaagacccccatccccacccccaacttcttttctaatatttaaggagtgttttgtaggattcaacaaccaccacaacttgaatttgtatcatgggaggtgggagggagtggcttagaggtgtctgcctatgcttaaagccaactgtggaagttttgttttcccttttttgtataataaagtgaaaaacaaaggtt

SEQ ID NO: 331811 - DNA, 4147 bp, Homo sapiens
gccagacaaagcccgagatggcgaagcggagcgacggctaatggcgagccccacgcgccgcgctccgcccgccccgctccggtgaggtggctttgaccccgggttgcccggccagcacgaccgaggaggtggctggacagctggaggatgaacggagaagccgactgccccacagacctggaaatggccgcccccaaaggccaagaccgttggtcccaggaagacatgctgactttgctggaatgcatgaagaacaaccttccatccaatgacagctccaagttcaaaaccaccgaatcacacatggactgggaaaaagtagcatttaaagacttttctggagacatgtgcaagctcaaatgggtggagatttctaatgaggtgaggaagttccgtacattgacagaattgatcctcgatgctcaggaacatgttaaaaatccttacaaaggcaaaaaactcaagaaacacccagacttcccaaagaagcccctgaccccttatttccgcttcttcatggagaagcgggccaagtatgcgaaactccaccctgagatgagcaacctggacctaaccaagattctgtccaagaaatacaaggagcttccggagaagaagaagatgaaatatattcaggacttccagagagagaaacaggagttcgagcgaaacctggcccgattcagggaggatcaccccgacctaatccagaatgccaagaaatcggacatcccagagaagcccaaaaccccccagcagctgtggtacacccacgagaagaaggtgtatctcaaagtgcggccagatgccactacgaaggaggtgaaggactccctggggaagcagtggtctcagctctcggacaaaaagaggctgaaatggattcataaggccctggagcagcggaaggagtacgaggagatcatgagagactatatccagaagcacccagagctgaacatcagtgaggagggtatcaccaagtccaccctcaccaaggccgaacgccagctcaaggacaagtttgacgggcgacccaccaagccacctccgaacagctactcgctgtactgcgcagagctcatggccaacatgaaggacgtgcccagcacagagcgcatggtgctgtgcagccagcagtggaagctgctgtcccagaaggagaaggacgcctatcacaagaagtgtgatcagaaaaagaaagattacgaggtggagctgctccgtttcctcgagagcctgcctgaggaggagcagcagcgggtcttgggggaagagaagatgctgaacatcaacaagaagcaggccaccagccccgcctccaagaagccagcccaggaagggggcaagggcggctccgagaagcccaagcggcccgtgtcggccatgttcatcttctcggaggagaaacggcggcagctgcaggaggagcggcctgagctctccgagagcgagctgacccgcctgctggcccgaatgtggaacgacctgtctgagaagaagaaggccaagtacaaggcccgagaggcggcgctcaaggctcagtcggagaggaagcccggcggggagcgcgaggaacggggcaagctgcccgagtcccccaaaagagctgaggagatctggcaacagagcgttatcggcgactacctggcccgcttcaagaatgaccgggtgaaggccttgaaagccatggaaatgacctggaataacatggaaaagaaggagaaactgatgtggattaagaaggcagccgaagaccaaaagcgatatgagagagagctgagtgagatgcgggcacctccagctgctacaaattcttccaagaagatgaaattccagggagaacccaagaagcctcccatgaacggttaccagaagttctcccaggagctgctgtccaatggggagctgaaccacctgccgctgaaggagcgcatggtggagatcggcagtcgctggcagcgcatctcccagagccagaaggagcactacaaaaagctggccgaggagcagcaaaagcagtacaaggtgcacctggacctctgggttaagagcctgtctccccaggaccgtgcagcatataaagagtacatctccaataaacgtaagagcatgaccaagctgcgaggcccaaaccccaaatccagccggactactctgcagtccaagtcggagtccgaggaggatgatgaagaggatgaggatgacgaggacgaggatgaagaagaggaagatgatgagaatggggactcctctgaagatggcggcgactcctctgagtccagcagcgaggacgagagcgaggatggggatgagaatgaagaggatgacgaggacgaagacgacgacgaggatgacgatgaggatgaagataatgagtccgagggcagcagctccagctcctcctcctcaggggactcctcagactctgactccaactgaggctcagccccaccccagggcagccagggagagcccaggagctcccctccccaactgaccacctttgtttctcccccatgttctgtcccttgcccccctggcctcccccactttctttctttctttaaaaaaaaaaaaaaaaatacggtgggggtagggggctggaggagcccaggccaggactctgcagcctcagagacatcagcccttgggggtcctcctccagggacagcaactatcagactaagccagcaccggaccagcctggcccaccccacccacttctgcacttgcggttccggcatggacaatggaccggagagtgggggtggggggtcccaaagagtttgatgaggccctccacacctgcggcccaatccaaggtggggtggaagcttggggaagacccattccttcccagaggggcctgccacctggacccctgcattggaactggaggcagggaacatggggaggaggagggtcggtgccttcaagaaaacaggcactgccctggtggccctctcccctgccccctgcaggaaggagctgcctggacccgttcatgggggagggggcagaagtgttttttatatatgtgtatatatttttttttaagctctgagctgtcaacgagacgtttcctaccgatctcggctgccgtctctgttgtcatttctgggagagggagggtttaggggtagatttggaaccttttaaaaatggtcttgatgtatgtggaagagagtatgtgtatgtgtgttcctgtacatagcatgggtgcagctgtggatgtgtgcaaaagagtgtgagtgtgtgtgtgtgtgtgtaaaggggtctgtcctagagcccacatcagtttgttgtgaatctggaaaaagggtcggtgagggccgggagatgttgaccctggtgggagcaggctgaggctgccccgttctccacatcctctgttttgcccagtctctgattccattagggggagtgtgctgaagccattctcggatgcttcccagaccaggctccctctgccagagtcacatgcatccgagctgctggtctccattgtccagcaggaaggcggaaaggcaggcaagatggtgtgaagcttaaagcttgtatttgatggaaaaggtctcccctgttcatctgagaggccaagcctggccaccccaggctcagaacctgggcttcaagaaatgtgctgggagctcctaacttacacatccctccagccttccttgaatcctcccaccaccccctatttcctttaatttctcaggtctgctccctcctcccccaaccccacagctgggcaagaagtctgcaaaagctgcatctgcagctgtctctaactcttcccagccatctcccgtattttttggtaccttgattccttgactcttaataagccaagccaccttatctctgtagttcttattttttgttgactaaatttggggggttcttttttatggtcatgtcactgacctattaaattggggcttggtgcttttccaccttccccctctgaatgaaagccaaggaatgggggaagagcgggaactctgccgcggaggtggagcaagaacggtgaagggccctggtcccagagaggctggtgggtccctctcccaaaggaaggcagacagtctctgctttgccttggaccttggtgctggggataatacgggatcctctagat

SEQ ID NO: 331812 - DNA, 4991 bp, Homo sapiens
cggccgctccgctccggggctggcggcggctgcgctgcgtccgggtccccgccgggttgcggaggcggggggaaccggccggggggaggcgggaggaggagactggggcgcgtgcccgcttccgtggccgcgcgcgccctttacccgcccttcctcttcccccgccctccagcctggggcctccccggggcgggcgctccgaggaggaggagattttttctttttttttttttttggctggggttgggaagcggggcggagggcgggcgctcgctgcacgcgggagctaggagcaggccctcgcgtggccaggggagggcgcgcgccgcggagccgggctgcaggggctgggggagggggtcacgaggaagaggaggggcgcactcccattcccatagaccccttaagtctaataaggtcatggctgagtctctcagagtgtggacctgcccccttctactctgggcggttagaaagtcgttagtcgttcacctctcagccttcctgagtgggaactggtatgtcttccaaagggtgaggtggctttgaccccgggttgcccggccagcacgaccgaggaggtggctggacagctggaggatgaacggagaagccgactgccccacagacctggaaatggccgcccccaaaggccaagaccgttggtcccaggaagacatgctgactttgctggaatgcatgaagaacaaccttccatccaatgacagctccaagttcaaaaccaccgaatcacacatggactgggaaaaagtagcatttaaagacttttctggagacatgtgcaagctcaaatgggtggagatttctaatgaggtgaggaagttccgtacattgacagaattgatcctcgatgctcaggaacatgttaaaaatccttacaaaggcaaaaaactcaagaaacacccagacttcccaaagaagcccctgaccccttatttccgcttcttcatggagaagcgggccaagtatgcgaaactccaccctgagatgagcaacctggacctaaccaagattctgtccaagaaatacaaggagcttccggagaagaagaagatgaaatatattcaggacttccagagagagaaacaggagttcgagcgaaacctggcccgattcagggaggatcaccccgacctaatccagaatgccaagaaatcggacatcccagagaagcccaaaaccccccagcagctgtggtacacccacgagaagaaggtgtatctcaaagtgcggccagatgagatcatgagagactatatccagaagcacccagagctgaacatcagtgaggagggtatcaccaagtccaccctcaccaaggccgaacgccagctcaaggacaagtttgacgggcgacccaccaagccacctccgaacagctactcgctgtactgcgcagagctcatggccaacatgaaggacgtgcccagcacagagcgcatggtgctgtgcagccagcagtggaagctgctgtcccagaaggagaaggacgcctatcacaagaagtgtgatcagaaaaagaaagattacgaggtggagctgctccgtttcctcgagagcctgcctgaggaggagcagcagcgggtcttgggggaagagaagatgctgaacatcaacaagaagcaggccaccagccccgcctccaagaagccagcccaggaagggggcaagggcggctccgagaagcccaagcggcccgtgtcggccatgttcatcttctcggaggagaaacggcggcagctgcaggaggagcggcctgagctctccgagagcgagctgacccgcctgctggcccgaatgtggaacgacctgtctgagaagaagaaggccaagtacaaggcccgagaggcggcgctcaaggctcagtcggagaggaagcccggcggggagcgcgaggaacggggcaagctgcccgagtcccccaaaagagctgaggagatctggcaacagagcgttatcggcgactacctggcccgcttcaagaatgaccgggtgaaggccttgaaagccatggaaatgacctggaataacatggaaaagaaggagaaactgatgtggattaagaaggcagccgaagaccaaaagcgatatgagagagagctgagtgagatgcgggcacctccagctgctacaaattcttccaagaagatgaaattccagggagaacccaagaagcctcccatgaacggttaccagaagttctcccaggagctgctgtccaatggggagctgaaccacctgccgctgaaggagcgcatggtggagatcggcagtcgctggcagcgcatctcccagagccagaaggagcactacaaaaagctggccgaggagcagcaaaagcagtacaaggtgcacctggacctctgggttaagagcctgtctccccaggaccgtgcagcatataaagagtacatctccaataaacgtaagagcatgaccaagctgcgaggcccaaaccccaaatccagccggactactctgcagtccaagtcggagtccgaggaggatgatgaagaggatgaggatgacgaggacgaggatgaagaagaggaagatgatgagaatggggactcctctgaagatggcggcgactcctctgagtccagcagcgaggacgagagcgaggatggggatgagaatgaagaggatgacgaggacgaagacgacgacgaggatgacgatgaggatgaagataatgagtccgagggcagcagctccagctcctcctcctcaggggactcctcagactctgactccaactgaggctcagccccaccccagggcagccagggagagcccaggagctcccctccccaactgaccacctttgtttctcccccatgttctgtcccttgcccccctggcctcccccactttctttctttctttaaaaaaaaaaaaaaaaatacggtgggggtagggggctggaggagcccaggccaggactctgcagcctcagagacatcagcccttgggggtcctcctccagggacagcaactatcagactaagccagcaccggaccagcctggcccaccccacccacttctgcacttgcggttccggcatggacaatggaccggagagtgggggtggggggtcccaaagagtttgatgaggccctccacacctgcggcccaatccaaggtggggtggaagcttggggaagacccattccttcccagaggggcctgccacctggacccctgcattggaactggaggcagggaacatggggaggaggagggtcggtgccttcaagaaaacaggcactgccctggtggccctctcccctgccccctgcaggaaggagctgcctggacccgttcatgggggagggggcagaagtgttttttatatatgtgtatatatttttttttaagctctgagctgtcaacgagacgtttcctaccgatctcggctgccgtctctgttgtcatttctgggagagggagggtttaggggtagatttggaaccttttaaaaatggtcttgatgtatgtggaagagagtatgtgtatgtgtgttcctgtacatagcatgggtgcagctgtggatgtgtgcaaaagagtgtgagtgtgtgtgtgtgtgtgtaaaggggtctgtcctagagcccacatcagtttgttgtgaatctggaaaaagggtcggtgagggccgggagatgttgaccctggtgggagcaggctgaggctgccccgttctccacatcctctgttttgcccagtctctgattccattagggggagtgtgctgaagccattctcggatgcttcccagaccaggctccctctgccagagtcacatgcatccgagctgctggtctccattgtccagcaggaaggcggaaaggcaggcaagatggtgtgaagcttaaagcttgtatttgatggaaaaggtctcccctgttcatctgagaggccaagcctggccaccccaggctcagaacctgggcttcaagaaatgtgctgggagctcctaacttacacatccctccagccttccttgaatcctcccaccaccccctatttcctttaatttctcaggtctgctccctcctcccccaaccccacagctgggcaagaagtctgcaaaagctgcatctgcagctgtctctaactcttcccagccatctcccgtattttttggtaccttgattccttgactcttaataagccaagccaccttatctctgtagttcttattttttgttgactaaatttggggggttcttttttatggtcatgtcactgacctattaaattggggcttggtgcttttccaccttccccctctgaatgaaagccaaggaatgggggaagagcgggaactctgccgcggaggtggagcaagaacggtgaagggccctggtcccagagaggctggtgggtccctctcccaaaggaaggcagacagtctctgctttgccttggaccttggtgctgggggtggggaggcctgggggggacactccccactcccattccccttcctttgtcctaatcctggaattaagtacaggggtttataggttctatttcttcccaagagccctgcaaagaaccccagtttcctatttggatgcccctacactgttgtgtttcagtggaatgtattttcatttaaaaacaactttgaatggggcactttttctttcctgttttaaaaattgaaaaattcttacagtacaaacaggactgtcagggtgggggtgttggtgctgtaagaggtcactcttgagtgcattttggcactgggatgggatggctggggtgggaagacccccatccccacccccaacttcttttctaatatttaaggagtgttttgtaggattcaacaaccaccacaacttgaatttgtatcatgggaggtgggagggagtggcttagaggtgtctgcctatgcttaaagccaactgtggaagttttgttttcccttttttgtataataaagtgaaaaacaaaggtt

SEQ ID NO: 331813 - DNA, 3445 bp, Homo sapiens
ggagaaggacgcctatcacaagaagtgtgatcagaaaaagaaagattacgaggcagcgggtcttgggggaagagaagatgctgaacatcaacaagaagcaggccaccagccccgcctccaagaagccagcccaggaagggggcaagggcggctccgagaagcccaagcggcccgtgtcggccatgttcatcttctcggaggagaaacggcggcagctgcaggaggagcggcctgagctctccgagagcgagctgacccgcctgctggcccgaatgtggaacgacctgtctgagaagaagaaggccaagtacaaggcccgagaggcggcgctcaaggctcagtcggagaggaagcccggcggggagcgcgaggaacggggcaagctgcccgagtcccccaaaagagctgaggagatctggcaacagagcgttatcggcgactacctggcccgcttcaagaatgaccgggtgaaggccttgaaagccatggaaatgacctggaataacatggaaaagaaggagaaactgatgtggattaagaaggcagccgaagaccaaaagcgatatgagagagagctgagtgagatgcgggcacctccagctgctacaaattcttccaagaagatgaaattccagggagaacccaagaagcctcccatgaacggttaccagaagttctcccaggagctgctgtccaatggggagctgaaccacctgccgctgaaggagcgcatggtggagatcggcagtcgctggcagcgcatctcccagagccagaaggagcactacaaaaagctggccgaggagcagcaaaagcagtacaaggtgcacctggacctctgggttaagagcctgtctccccaggaccgtgcagcatataaagagtacatctccaataaacgtaagagcatgaccaagctgcgaggcccaaaccccaaatccagccggactactctgcagtccaagtcggagtccgaggaggatgatgaagaggatgaggatgacgaggacgaggatgaagaagaggaagatgatgagaatggggactcctctgaagatggcggcgactcctctgagtccagcagcgaggacgagagcgaggatggggatgagaatgaagaggatgacgaggacgaagacgacgacgaggatgacgatgaggatgaagataatgagtccgagggcagcagctccagctcctcctcctcaggggactcctcagactctgactccaactgaggctcagccccaccccagggcagccagggagagcccaggagctcccctccccaactgaccacctttgtttctcccccatgttctgtcccttgcccccctggcctcccccactttctttctttctttaaaaaaaaaaaaaaaaatacggtgggggtagggggctggaggagcccaggccaggactctgcagcctcagagacatcagcccttgggggtcctcctccagggacagcaactatcagactaagccagcaccggaccagcctggcccaccccacccacttctgcacttgcggttccggcatggacaatggaccggagagtgggggtggggggtcccaaagagtttgatgaggccctccacacctgcggcccaatccaaggtggggtggaagcttggggaagacccattccttcccagaggggcctgccacctggacccctgcattggaactggaggcagggaacatggggaggaggagggtcggtgccttcaagaaaacaggcactgccctggtggccctctcccctgccccctgcaggaaggagctgcctggacccgttcatgggggagggggcagaagtgttttttatatatgtgtatatatttttttttaagctctgagctgtcaacgagacgtttcctaccgatctcggctgccgtctctgttgtcatttctgggagagggagggtttaggggtagatttggaaccttttaaaaatggtcttgatgtatgtggaagagagtatgtgtatgtgtgttcctgtacatagcatgggtgcagctgtggatgtgtgcaaaagagtgtgagtgtgtgtgtgtgtgtgtaaaggggtctgtcctagagcccacatcagtttgttgtgaatctggaaaaagggtcggtgagggccgggagatgttgaccctggtgggagcaggctgaggctgccccgttctccacatcctctgttttgcccagtctctgattccattagggggagtgtgctgaagccattctcggatgcttcccagaccaggctccctctgccagagtcacatgcatccgagctgctggtctccattgtccagcaggaaggcggaaaggcaggcaagatggtgtgaagcttaaagcttgtatttgatggaaaaggtctcccctgttcatctgagaggccaagcctggccaccccaggctcagaacctgggcttcaagaaatgtgctgggagctcctaacttacacatccctccagccttccttgaatcctcccaccaccccctatttcctttaatttctcaggtctgctccctcctcccccaaccccacagctgggcaagaagtctgcaaaagctgcatctgcagctgtctctaactcttcccagccatctcccgtattttttggtaccttgattccttgactcttaataagccaagccaccttatctctgtagttcttattttttgttgactaaatttggggggttcttttttatggtcatgtcactgacctattaaattggggcttggtgcttttccaccttccccctctgaatgaaagccaaggaatgggggaagagcgggaactctgccgcggaggtggagcaagaacggtgaagggccctggtcccagagaggctggtgggtccctctcccaaaggaaggcagacagtctctgctttgccttggaccttggtgctgggggtggggaggcctgggggggacactccccactcccattccccttcctttgtcctaatcctggaattaagtacaggggtttataggttctatttcttcccaagagccctgcaaagaaccccagtttcctatttggatgcccctacactgttgtgtttcagtggaatgtattttcatttaaaaacaactttgaatggggcactttttctttcctgttttaaaaattgaaaaattcttacagtacaaacaggactgtcagggtgggggtgttggtgctgtaagaggtcactcttgagtgcattttggcactgggatgggatggctggggtgggaagacccccatccccacccccaacttcttttctaatatttaaggagtgttttgtaggattcaacaaccaccacaacttgaatttgtatcatgggaggtgggagggagtggcttagaggtgtctgcctatgcttaaagccaactgtggaagttttgttttcccttttttgtataataaagtgaaaaacaaaggtt

SEQ ID NO: 331814 - DNA, 5429 bp, Homo sapiens
cggccgctccgctccggggctggcggcggctgcgctgcgtccgggtccccgccgggttgcggaggcggggggaaccggccggggggaggcgggaggaggagactggggcgcgtgcccgcttccgtggccgcgcgcgccctttacccgcccttcctcttcccccgccctccagcctggggcctccccggggcgggcgctccgaggaggaggagattttttctttttttttttttttggctggggttgggaagcggggcggagggcgggcgctcgctgcacgcgggagctaggagcaggccctcgcgtggccaggggagggcgcgcgccgcggagccgggctgcaggggctgggggagggggtcacgaggaagaggaggggcgcactcccattcccatagaccccttaagtctaataaggtcatggctgagtctctcagagtgtggacctgcccccttctactctgggcggttagaaagtcgttagtcgttcacctctcagccttcctgagtgggaactggtatgtcttccaaagggtgaggtggctttgaccccgggttgcccggccagcacgaccgaggaggtggctggacagctggaggatgaacggagaagccgactgccccacagacctggaaatggccgcccccaaaggccaagaccgttggtcccaggaagacatgctgactttgctggaatgcatgaagaacaaccttccatccaatgacagctccaagttcaaaaccaccgaatcacacatggactgggaaaaagtagcatttaaagacttttctggagacatgtgcaagctcaaatgggtggagatttctaatgaggtgaggaagttccgtacattgacagaattgatcctcgatgctcaggaacatgttaaaaatccttacaaaggcaaaaaactcaagaaacacccagacttcccaaagaagcccctgaccccttatttccgcttcttcatggagaagcgggccaagtatgcgaaactccaccctgagatgagcaacctggacctaaccaagattctgtccaagaaatacaaggagcttccggagaagaagaagatgaaatatattcaggacttccagagagagaaacaggagttcgagcgaaacctggcccgattcagggaggatcaccccgacctaatccagaatgccaagaaatcggacatcccagagaagcccaaaaccccccagcagctgtggtacacccacgagaagaaggtgtatctcaaagtgcggccagatgagatcatgagagactatatccagaagcacccagagctgaacatcagtgaggagggtatcaccaagtccaccctcaccaaggccgaacgccagctcaaggacaagtttgacgggcgacccaccaagccacctccgaacagctactcgctgtactgcgcagagctcatggccaacatgaaggacgtgcccagcacagagcgcatggtgctgtgcagccagcagtggaagctgctgtcccagaaggagaaggacgcctatcacaagaagtgtgatcagaaaaagaaagattacgaggtggagctgctccgtttcctcgagagcctgcctgaggaggagcagcagcgggtcttgggggaagagaagatgctgaacatcaacaagaagcaggccaccagccccgcctccaagaagccagcccaggaagggggcaagggcggctccgagaagcccaagcggcccgtgtcggccatgttcatcttctcggaggagaaacggcggcagctgcaggaggagcggcctgagctctccgagagcgagctgacccgcctgctggcccgaatgtggaacgacctgtctgagaagaagaaggccaagtacaaggcccgagaggcggcgctcaaggctcagtcggagaggaagcccggcggggagcgcgaggaacggggcaagctgcccgagtcccccaaaagagctgaggagatctggcaacagagcgttatcggcgactacctggcccgcttcaagaatgaccgggtgaaggccttgaaagccatggaaatgacctggaataacatggaaaagaaggagaaactgatgtggattaagaaggcagccgaagaccaaaagcgatatgagagagagctgagtgagatgcgggcacctccagctgctacaaattcttccaagaagatgaaattccagggagaacccaagaagcctcccatgaacggttaccagaagttctcccaggagctgctgtccaatggggagctgaaccacctgccgctgaaggagcgcatggtggagatcggcagtcgctggcagcgcatctcccagagccagaaggagcactacaaaaagctggccgaggagcagcaaaagcagtacaaggtgcacctggacctctgggttaaggtgagagggcaagggacccttggaaggaacagagaggcatcagactaagccagcaccatcctagcctggcccatccacccacttgtgctggctggtctcattcatgatttcattccatgccctcgcaatccttcaggataacggtcactatcacccttttatttttatttttttttttattttttgagacatgcactccagcctgggtgacagagcaagaccctgtttcaaaaaaaaaaaaaaaaaaaaaaaaaaaattagagctgtgttctcagatcccaggggctctctgcagagacccaaaatctagggagcctgggaggggtaagatggggtgatgatatataaatgctcagcccactgcctagcactgggccagcatgctcagtcagcagtagttggctatgttccaacccttgccgcttctgtctcccccagagcctgtctccccaggaccgtgcagcatataaagagtacatctccaataaacgtaagagcatgaccaagctgcgaggcccaaaccccaaatccagccggactactctgcagtccaagtcggagtccgaggaggatgatgaagaggatgaggatgacgaggacgaggatgaagaagaggaagatgatgagaatggggactcctctgaagatggcggcgactcctctgagtccagcagcgaggacgagagcgaggatggggatgagaatgaagaggatgacgaggacgaagacgacgacgaggatgacgatgaggatgaagataatgagtccgagggcagcagctccagctcctcctcctcaggggactcctcagactctgactccaactgaggctcagccccaccccagggcagccagggagagcccaggagctcccctccccaactgaccacctttgtttctcccccatgttctgtcccttgcccccctggcctcccccactttctttctttctttaaaaaaaaaaaaaaaaatacggtgggggtagggggctggaggagcccaggccaggactctgcagcctcagagacatcagcccttgggggtcctcctccagggacagcaactatcagactaagccagcaccggaccagcctggcccaccccacccacttctgcacttgcggttccggcatggacaatggaccggagagtgggggtggggggtcccaaagagtttgatgaggccctccacacctgcggcccaatccaaggtggggtggaagcttggggaagacccattccttcccagaggggcctgccacctggacccctgcattggaactggaggcagggaacatggggaggaggagggtcggtgccttcaagaaaacaggcactgccctggtggccctctcccctgccccctgcaggaaggagctgcctggacccgttcatgggggagggggcagaagtgttttttatatatgtgtatatatttttttttaagctctgagctgtcaacgagacgtttcctaccgatctcggctgccgtctctgttgtcatttctgggagagggagggtttaggggtagatttggaaccttttaaaaatggtcttgatgtatgtggaagagagtatgtgtatgtgtgttcctgtacatagcatgggtgcagctgtggatgtgtgcaaaagagtgtgagtgtgtgtgtgtgtgtgtaaaggggtctgtcctagagcccacatcagtttgttgtgaatctggaaaaagggtcggtgagggccgggagatgttgaccctggtgggagcaggctgaggctgccccgttctccacatcctctgttttgcccagtctctgattccattagggggagtgtgctgaagccattctcggatgcttcccagaccaggctccctctgccagagtcacatgcatccgagctgctggtctccattgtccagcaggaaggcggaaaggcaggcaagatggtgtgaagcttaaagcttgtatttgatggaaaaggtctcccctgttcatctgagaggccaagcctggccaccccaggctcagaacctgggcttcaagaaatgtgctgggagctcctaacttacacatccctccagccttccttgaatcctcccaccaccccctatttcctttaatttctcaggtctgctccctcctcccccaaccccacagctgggcaagaagtctgcaaaagctgcatctgcagctgtctctaactcttcccagccatctcccgtattttttggtaccttgattccttgactcttaataagccaagccaccttatctctgtagttcttattttttgttgactaaatttggggggttcttttttatggtcatgtcactgacctattaaattggggcttggtgcttttccaccttccccctctgaatgaaagccaaggaatgggggaagagcgggaactctgccgcggaggtggagcaagaacggtgaagggccctggtcccagagaggctggtgggtccctctcccaaaggaaggcagacagtctctgctttgccttggaccttggtgctgggggtggggaggcctgggggggacactccccactcccattccccttcctttgtcctaatcctggaattaagtacaggggtttataggttctatttcttcccaagagccctgcaaagaaccccagtttcctatttggatgcccctacactgttgtgtttcagtggaatgtattttcatttaaaaacaactttgaatggggcactttttctttcctgttttaaaaattgaaaaattcttacagtacaaacaggactgtcagggtgggggtgttggtgctgtaagaggtcactcttgagtgcattttggcactgggatgggatggctggggtgggaagacccccatccccacccccaacttcttttctaatatttaaggagtgttttgtaggattcaacaaccaccacaacttgaatttgtatcatgggaggtgggagggagtggcttagaggtgtctgcctatgcttaaagccaactgtggaagttttgttttcccttttttgtataataaagtgaaaaacaaaggtt

SEQ ID NO: 331815 - DNA, 3354 bp, Homo sapiens
caagactgggctccctggcagcacccacggaccccgaccctctgcacctggacagggcggctccgagaagcccaagcggcccgtgtcggccatgttcatcttctcggaggagaaacggcggcagctgcaggaggagcggcctgagctctccgagagcgagctgacccgcctgctggcccgaatgtggaacgacctgtctgagaagaagaaggccaagtacaaggcccgagaggcggcgctcaaggctcagtcggagaggaagcccggcggggagcgcgaggaacggggcaagctgcccgagtcccccaaaagagctgaggagatctggcaacagagcgttatcggcgactacctggcccgcttcaagaatgaccgggtgaaggccttgaaagccatggaaatgacctggaataacatggaaaagaaggagaaactgatgtggattaagaaggcagccgaagaccaaaagcgatatgagagagagctgagtgagatgcgggcacctccagctgctacaaattcttccaagaagatgaaattccagggagaacccaagaagcctcccatgaacggttaccagaagttctcccaggagctgctgtccaatggggagctgaaccacctgccgctgaaggagcgcatggtggagatcggcagtcgctggcagcgcatctcccagagccagaaggagcactacaaaaagctggccgaggagcagcaaaagcagtacaaggtgcacctggacctctgggttaagagcctgtctccccaggaccgtgcagcatataaagagtacatctccaataaacgtaagagcatgaccaagctgcgaggcccaaaccccaaatccagccggactactctgcagtccaagtcggagtccgaggaggatgatgaagaggatgaggatgacgaggacgaggatgaagaagaggaagatgatgagaatggggactcctctgaagatggcggcgactcctctgagtccagcagcgaggacgagagcgaggatggggatgagaatgaagaggatgacgaggacgaagacgacgacgaggatgacgatgaggatgaagataatgagtccgagggcagcagctccagctcctcctcctcaggggactcctcagactctgactccaactgaggctcagccccaccccagggcagccagggagagcccaggagctcccctccccaactgaccacctttgtttctcccccatgttctgtcccttgcccccctggcctcccccactttctttctttctttaaaaaaaaaaaaaaaaatacggtgggggtagggggctggaggagcccaggccaggactctgcagcctcagagacatcagcccttgggggtcctcctccagggacagcaactatcagactaagccagcaccggaccagcctggcccaccccacccacttctgcacttgcggttccggcatggacaatggaccggagagtgggggtggggggtcccaaagagtttgatgaggccctccacacctgcggcccaatccaaggtggggtggaagcttggggaagacccattccttcccagaggggcctgccacctggacccctgcattggaactggaggcagggaacatggggaggaggagggtcggtgccttcaagaaaacaggcactgccctggtggccctctcccctgccccctgcaggaaggagctgcctggacccgttcatgggggagggggcagaagtgttttttatatatgtgtatatatttttttttaagctctgagctgtcaacgagacgtttcctaccgatctcggctgccgtctctgttgtcatttctgggagagggagggtttaggggtagatttggaaccttttaaaaatggtcttgatgtatgtggaagagagtatgtgtatgtgtgttcctgtacatagcatgggtgcagctgtggatgtgtgcaaaagagtgtgagtgtgtgtgtgtgtgtgtaaaggggtctgtcctagagcccacatcagtttgttgtgaatctggaaaaagggtcggtgagggccgggagatgttgaccctggtgggagcaggctgaggctgccccgttctccacatcctctgttttgcccagtctctgattccattagggggagtgtgctgaagccattctcggatgcttcccagaccaggctccctctgccagagtcacatgcatccgagctgctggtctccattgtccagcaggaaggcggaaaggcaggcaagatggtgtgaagcttaaagcttgtatttgatggaaaaggtctcccctgttcatctgagaggccaagcctggccaccccaggctcagaacctgggcttcaagaaatgtgctgggagctcctaacttacacatccctccagccttccttgaatcctcccaccaccccctatttcctttaatttctcaggtctgctccctcctcccccaaccccacagctgggcaagaagtctgcaaaagctgcatctgcagctgtctctaactcttcccagccatctcccgtattttttggtaccttgattccttgactcttaataagccaagccaccttatctctgtagttcttattttttgttgactaaatttggggggttcttttttatggtcatgtcactgacctattaaattggggcttggtgcttttccaccttccccctctgaatgaaagccaaggaatgggggaagagcgggaactctgccgcggaggtggagcaagaacggtgaagggccctggtcccagagaggctggtgggtccctctcccaaaggaaggcagacagtctctgctttgccttggaccttggtgctgggggtggggaggcctgggggggacactccccactcccattccccttcctttgtcctaatcctggaattaagtacaggggtttataggttctatttcttcccaagagccctgcaaagaaccccagtttcctatttggatgcccctacactgttgtgtttcagtggaatgtattttcatttaaaaacaactttgaatggggcactttttctttcctgttttaaaaattgaaaaattcttacagtacaaacaggactgtcagggtgggggtgttggtgctgtaagaggtcactcttgagtgcattttggcactgggatgggatggctggggtgggaagacccccatccccacccccaacttcttttctaatatttaaggagtgttttgtaggattcaacaaccaccacaacttgaatttgtatcatgggaggtgggagggagtggcttagaggtgtctgcctatgcttaaagccaactgtggaagttttgttttcccttttttgtataataaagtgaaaaacaaaggtt

SEQ ID NO: 331816 - DNA, 4457 bp, Homo sapiens
cggccgctccgctccggggctggcggcggctgcgctgcgtccgggtccccgccgggttgcggaggcggggggaaccggccggggggaggcgggaggaggagactggggcgcgtgcccgcttccgtggccgcgcgcgccctttacccgcccttcctcttcccccgccctccagcctggggcctccccggggcgggcgctccgaggaggaggagattttttctttttttttttttttggctggggttgggaagcggggcggagggcgggcgctcgctgcacgcgggagctaggagcaggccctcgcgtggccaggggagggcgcgcgccgcggagccgggctgcaggggctgggggagggggtcacgaggaagaggaggggcgcactcccattcccatagaccccttaagtctaataaggtcatggctgagtctctcagagtgtggacctgcccccttctactctgggcggttagaaagtcgttagtcgttcacctctcagccttcctgagtgggaactggtatgtcttccaaagggtgaggtggctttgaccccgggttgcccggccagcacgaccgaggaggtggctggacagctggaggatgaacggagaagccgactgccccacagacctggaaatggccgcccccaaaggccaagaccgttggtcccaggaagacatgctgactttgctggaatgcatgaagaacaaccttccatccaatgacagctccaagttcaaaaccaccgaatcacacatggactgggaaaaagtagcatttaaagacttttctggagacatgtgcaagctcaaatgggtggagatttctaatgaggtgaggaagttccgtacattgacagaattgatcctcgatgctcaggaacatgttaaaaatccttacaaaggcaaaaaactcaagaaacacccagacttcccaaagaagcccctgaccccttatttccgcttcttcatggagaagcgggccaagtatgcgaaactccaccctgagatgagcaacctggacctaaccaagattctgtccaagaaatacaaggagcttccggagaagaagaagatgaaatatattcaggacttccagagagagaaacaggagttcgagcgaaacctggcccgattcagggaggatcaccccgacctaatccagaatgccaagaaatcggacatcccagagaagcccaaaaccccccagcagctgtggtacacccacgagaagaaggtgtatctcaaagtgcggccagatgagatcatgagagactatatccagaagcacccagagctgaacatcagtgaggagggtatcaccaagtccaccctcaccaaggccgaacgccagctcaaggacaagtttgacgggcgacccaccaagccacctccgaacagctactcgctgtactgcgcagagctcatggccaacatgaaggacgtgcccagcacagagcgcatggtgctgtgcagccagcagtggaagctgctgtcccagaaggagaaggacgcctatcacaagaagtgtgatcagaaaaagaaagattacgaggtggagctgctccgtttcctcgagagcctgcctgaggaggagcagcagcgggtcttgggggaagagaagatgctgaacatcaacaagaagcaggccaccagccccgcctccaagaagccagcccaggaagggggcaagggcggctccgagaagcccaagcggcccgtgtcggccatgttcatcttctcggaggagaaacggcggcagctgcaggaggagcggcctgagctctccgagagcgagctgacccgcctgctggcccgaatgtggaacgacctgtctgagaagaagaaggccaagtacaaggcccgagaggcggcgctcaaggctcagtcggagaggaagcccggcggggagcgcgaggaacggggcaagctgcccgagtcccccaaaagagctgaggagatctggcaacagagcgttatcggcgactacctggcccgcttcaagaatgaccgggtgaaggccttgaaagccatggaaatgacctggaataacatggaaaagaaggagaaactgatgtggattaagaaggcagccgactgccccacagacctggaaatggccgcccccaaaggccaagaccgttggtcccaggaagacatgctgactttgctggaatgcatgaagaacaaccttccatccaatgacagctcctcctcctcaggggactcctcagactctgactccaactgaggctcagccccaccccagggcagccagggagagcccaggagctcccctccccaactgaccacctttgtttctcccccatgttctgtcccttgcccccctggcctcccccactttctttctttctttaaaaaaaaaaaaaaaaatacggtgggggtagggggctggaggagcccaggccaggactctgcagcctcagagacatcagcccttgggggtcctcctccagggacagcaactatcagactaagccagcaccggaccagcctggcccaccccacccacttctgcacttgcggttccggcatggacaatggaccggagagtgggggtggggggtcccaaagagtttgatgaggccctccacacctgcggcccaatccaaggtggggtggaagcttggggaagacccattccttcccagaggggcctgccacctggacccctgcattggaactggaggcagggaacatggggaggaggagggtcggtgccttcaagaaaacaggcactgccctggtggccctctcccctgccccctgcaggaaggagctgcctggacccgttcatgggggagggggcagaagtgttttttatatatgtgtatatatttttttttaagctctgagctgtcaacgagacgtttcctaccgatctcggctgccgtctctgttgtcatttctgggagagggagggtttaggggtagatttggaaccttttaaaaatggtcttgatgtatgtggaagagagtatgtgtatgtgtgttcctgtacatagcatgggtgcagctgtggatgtgtgcaaaagagtgtgagtgtgtgtgtgtgtgtgtaaaggggtctgtcctagagcccacatcagtttgttgtgaatctggaaaaagggtcggtgagggccgggagatgttgaccctggtgggagcaggctgaggctgccccgttctccacatcctctgttttgcccagtctctgattccattagggggagtgtgctgaagccattctcggatgcttcccagaccaggctccctctgccagagtcacatgcatccgagctgctggtctccattgtccagcaggaaggcggaaaggcaggcaagatggtgtgaagcttaaagcttgtatttgatggaaaaggtctcccctgttcatctgagaggccaagcctggccaccccaggctcagaacctgggcttcaagaaatgtgctgggagctcctaacttacacatccctccagccttccttgaatcctcccaccaccccctatttcctttaatttctcaggtctgctccctcctcccccaaccccacagctgggcaagaagtctgcaaaagctgcatctgcagctgtctctaactcttcccagccatctcccgtattttttggtaccttgattccttgactcttaataagccaagccaccttatctctgtagttcttattttttgttgactaaatttggggggttcttttttatggtcatgtcactgacctattaaattggggcttggtgcttttccaccttccccctctgaatgaaagccaaggaatgggggaagagcgggaactctgccgcggaggtggagcaagaacggtgaagggccctggtcccagagaggctggtgggtccctctcccaaaggaaggcagacagtctctgctttgccttggaccttggtgctgggggtggggaggcctgggggggacactccccactcccattccccttcctttgtcctaatcctggaattaagtacaggggtttataggttctatttcttcccaagagccctgcaaagaaccccagtttcctatttggatgcccctacactgttgtgtttcagtggaatgtattttcatttaaaaacaactttgaatggggcactttttctttcctgttttaaaaattgaaaaattcttacagtacaaacaggactgtcagggtgggggtgttggtgctgtaagaggtcactcttgagtgcattttggcactgggatgggatggctggggtgggaagacccccatccccacccccaacttcttttctaatatttaaggagtgttttgtaggattcaacaaccaccacaacttgaatttgtatcatgggaggtgggagggagtggcttagaggtgtctgcctatgcttaaagccaactgtggaagttttgttttcccttttttgtataataaagtgaaaaacaaaggtt

SEQ ID NO: 331817 - DNA, 3270 bp, Homo sapiens
cggccgctccgctccggggctggcggcggctgcgctgcgtccgggtccccgccgggttgcggaggcggggggaaccggccggggggaggcgggaggaggagactggggcgcgtgcccgcttccgtggccgcgcgcgccctttacccgcccttcctcttcccccgccctccagcctggggcctccccggggcgggcgctccgaggaggaggagattttttctttttttttttttttggctggggttgggaagcggggcggagggcgggcgctcgctgcacgcgggagctaggagcaggccctcgcgtggccaggggagggcgcgcgccgcggagccgggctgcaggggctgggggagggggtcacgaggaagaggaggggcgcactcccattcccatagaccccttaagtctaataaggtcatggctgagtctctcagagtgtggacctgcccccttctactctgggcggttagaaagtcgttagtcgttcacctctcagccttcctgagtgggaactggtatgtcttccaaagggtgaggtggctttgaccccgggttgcccggccagcacgaccgaggaggtggctggacagctggaggatgaacggagaagccgactgccccacagacctggaaatggccgcccccaaaggccaagaccgttggtcccaggaagacatgctgactttgctggaatgcatgaagaacaaccttccatccaatgacagctccaagttcaaaaccaccgaatcacacatggactgggaaaaagtagcatttaaagacttttctggagacatgtgcaagctcaaatgggtggagatttctaatgaggtgaggaagttccgtacattgacagaattgatcctcgatgctcaggaacatgttaaaaatccttacaaaggcaaaaaactcaagaaacacccagacttcccaaagaagcccctgaccccttatttccgcttcttcatggagaagcgggccaagtatgcgaaactccaccctgagatgagcaacctggacctaaccaagattctgtccaagaaatacaaggagcttccggagaagaagaagatgaaatatattcaggacttccagagagagaaacaggagttcgagcgaaacctggcccgattcagggaggatcaccccgacctaatccagaatgccaagaaatcggacatcccagagaagcccaaaaccccccagcagctgtggtacacccacgagaagaaggtgtatctcaaagtgcggccagatgccactacgaaggaggtgaaggactccctggggaagcagtggtctcagctctcggacaaaaagaggctgaaatggattcataaggccctggagcagcggaaggagtacgaggagatcatgagagactatatccagaagcacccagagctgaacatcagtgaggagggtatcaccaagtccaccctcaccaaggccgaacgccagctcaaggacaagtttgacgggcgacccaccaagccacctccgaacagctactcgctgtactgcgcagagctcatggccaacatgaaggacgtgcccagcacagagcgcatggtgctgtgcagccagcagtggaagctgctgtcccagaaggagaaggacgcctatcacaagaagtgtgatcagtgttttttatatatgtgtatatatttttttttaagctctgagctgtcaacgagacgtttcctaccgatctcggctgccgtctctgttgtcatttctgggagagggagggtttaggggtagatttggaaccttttaaaaatggtcttgatgtatgtggaagagagtatgtgtatgtgtgttcctgtacatagcatgggtgcagctgtggatgtgtgcaaaagagtgtgagtgtgtgtgtgtgtgtgtaaaggggtctgtcctagagcccacatcagtttgttgtgaatctggaaaaagggtcggtgagggccgggagatgttgaccctggtgggagcaggctgaggctgccccgttctccacatcctctgttttgcccagtctctgattccattagggggagtgtgctgaagccattctcggatgcttcccagaccaggctccctctgccagagtcacatgcatccgagctgctggtctccattgtccagcaggaaggcggaaaggcaggcaagatggtgtgaagcttaaagcttgtatttgatggaaaaggtctcccctgttcatctgagaggccaagcctggccaccccaggctcagaacctgggcttcaagaaatgtgctgggagctcctaacttacacatccctccagccttccttgaatcctcccaccaccccctatttcctttaatttctcaggtctgctccctcctcccccaaccccacagctgggcaagaagtctgcaaaagctgcatctgcagctgtctctaactcttcccagccatctcccgtattttttggtaccttgattccttgactcttaataagccaagccaccttatctctgtagttcttattttttgttgactaaatttggggggttcttttttatggtcatgtcactgacctattaaattggggcttggtgcttttccaccttccccctctgaatgaaagccaaggaatgggggaagagcgggaactctgccgcggaggtggagcaagaacggtgaagggccctggtcccagagaggctggtgggtccctctcccaaaggaaggcagacagtctctgctttgccttggaccttggtgctgggggtggggaggcctgggggggacactccccactcccattccccttcctttgtcctaatcctggaattaagtacaggggtttataggttctatttcttcccaagagccctgcaaagaaccccagtttcctatttggatgcccctacactgttgtgtttcagtggaatgtattttcatttaaaaacaactttgaatggggcactttttctttcctgttttaaaaattgaaaaattcttacagtacaaacaggactgtcagggtgggggtgttggtgctgtaagaggtcactcttgagtgcattttggcactgggatgggatggctggggtgggaagacccccatccccacccccaacttcttttctaatatttaaggagtgttttgtaggattcaacaaccaccacaacttgaatttgtatcatgggaggtgggagggagtggcttagaggtgtctgcctatgcttaaagccaactgtggaagttttgttttcccttttttgtataataaagtgaaaaacaaaggtt

SEQ ID NO: 331818 - DNA, 2113 bp, Homo sapiens
cggccgctccgctccggggctggcggcggctgcgctgcgtccgggtccccgccgggttgcggaggcggggggaaccggccggggggaggcgggaggaggagactggggcgcgtgcccgcttccgtggccgcgcgcgccctttacccgcccttcctcttcccccgccctccagcctggggcctccccggggcgggcgctccgaggaggaggagattttttctttttttttttttttggctggggttgggaagcggggcggagggcgggcgctcgctgcacgcgggagctaggagcaggccctcgcgtggccaggggagggcgcgcgccgcggagccgggctgcaggggctgggggagggggtcacgaggaagaggaggggcgcactcccattcccatagaccccttaagtctaataaggtcatggctgagtctctcagagtgtggacctgcccccttctactctgggcggttagaaagtcgttagtcgttcacctctcagccttcctgagtgggaactggtatgtcttccaaagggtgaggtggctttgaccccgggttgcccggccagcacgaccgaggaggtggctggacagctggaggatgaacggagaagccgactgccccacagacctggaaatggccgcccccaaaggccaagaccgttggtcccaggaagacatgctgactttgctggaatgcatgaagaacaaccttccatccaatgacagctccaagttcaaaaccaccgaatcacacatggactgggaaaaagtagcatttaaagacttttctggagacatgtgcaagctcaaatgggtggagatttctaatgaggtgaggaagttccgtacattgacagaattgatcctcgatgctcaggaacatgttaaaaatccttacaaaggcaaaaaactcaagaaacacccagacttcccaaagaagcccctgaccccttatttccgcttcttcatggagaagcgggccaagtatgcgaaactccaccctgagatgagcaacctggacctaaccaagattctgtccaagaaatacaaggagcttccggagaagaagaagatgaaatatattcaggacttccagagagagaaacaggagttcgagcgaaacctggcccgattcagggaggatcaccccgacctaatccagaatgccaagaaatcggacatcccagagaagcccaaaaccccccagcagctgtggtacacccacgagaagaaggtgtatctcaaagtgcggccagatgagatcatgagagactatatccagaagcacccagagctgaacatcagtgaggagggtatcaccaagtccaccctcaccaaggccgaacgccagctcaaggacaagtttgacgggcgacccaccaagccacctccgaacagctactcgctgtactgcgcagagctcatggccaacatgaaggacgtgcccagcacagagcgcatggtgctgtgcagccagcagtggaagctgctgtcccagaaggagaaggacgcctatcacaagaagtgtgatcagaaaaagaaagattacgaggtggagctgctccgtttcctcgagagcctgcctgaggaggagcagcagcgggtcttgggggaagagaagatgctgaacatcaacaagaagcaggccaccagccccgcctccaagaagccagcccaggaagggggcaagggcggctccgagaagcccaagcggcccgtgtcggccatgttcatcttctcggaggagaaacggcggcagctgcaggaggagcggcctgagctctccgagagcgagctgacccgcctgctggcccgaatgtggaacgacctgtctgagaagaagaaggcacggtcaggcccgacgaggcggcggtcaagccagcggaaggaacccgggggagcggagaacgggcaagccgcccagtcccaaaagccgggactgcacaagagaactggatctggccgtcagatacgtgagctaaacggaaaccggaactgcagaagacgggggtaaggcggacacggtaagagagagagccacgaataaaaaaagagaagccagaaacagaaggcacgacggagggccaaggacgcccagaccccaaacaagc

SEQ ID NO: 331819 - DNA, 1453 bp, Homo sapiens
cggccgctccgctccggggctggcggcggctgcgctgcgtccgggtccccgccgggttgcggaggcggggggaaccggccggggggaggcgggaggaggagactggggcgcgtgcccgcttccgtggccgcgcgcgccctttacccgcccttcctcttcccccgccctccagcctggggcctccccggggcgggcgctccgaggaggaggagattttttctttttttttttttttggctggggttgggaagcggggcggagggcgggcgctcgctgcacgcgggagctaggagcaggccctcgcgtggccaggggagggcgcgcgccgcggagccgggctgcaggggctgggggagggggtcacgaggaagaggaggggcgcactcccattcccatagaccccttaagtctaataaggtcatggctgagtctctcagagtgtggacctgcccccttctactctgggcggttagaaagtcgttagtcgttcacctctcagccttcctgagtgggaactggtatgtcttccaaagggtgaggtggctttgaccccgggttgcccggccagcacgaccgaggaggtggctggacagctggaggatgaacggagaagccgactgccccacagacctggaaatggccgcccccaaaggccaagaccgttggtcccaggaagacatgctgactttgctggaatgcatgaagaacaaccttccatccaatgacagctccaagttcaaaaccaccgaatcacacatggactgggaaaaagtagcatttaaagacttttctggagacatgtgcaagctcaaatgggtggagatttctaatgaggtgaggaagttccgtacattgacagaattgatcctcgatgctcaggaacatgttaaaaatccttacaaaggcaaaaaactcaagaaacacccagacttcccaaagaagcccctgaccccttatttccgcttcttcatggagaagcgggccaagtatgcgaaactccaccctgagatgagcaacctggacctaaccaagattctgtccaagaaatacaaggagcttccggagaagaagaagatgaaatatattcaggacttccagagagagaaacaggagttcgagcgaaacctggcccgattcagggaggatcaccccgacctaatccagaatgccaagaaatcggacatcccagagaagcccaaaaccccccagcagctgtggtacacccacgagaagaaggtgtatctcaaagtgcggccagatgccactacgaaggaggtgaaggactccctggggaagcagtggtctcagctctcggacaaaaagaggctgaaatggattcataaggccctggagcagcggaaggagtacgagagatcatgggagaccacatgtgccctcctggagctgacacagatggggagagaacacacctggtgtgggaagctgtatggga

SEQ ID NO: 331820 - DNA, 939 bp, Homo sapiens
cggccgctccgctccggggctggcggcggctgcgctgcgtccgggtccccgccgggttgcggaggcggggggaaccggccggggggaggcgggaggaggagactggggcgcgtgcccgcttccgtggccgcgcgcgccctttacccgcccttcctcttcccccgccctccagcctggggcctccccggggcgggcgctccgaggaggaggagattttttctttttttttttttttggctggggttgggaagcggggcggagggcgggcgctcgctgcacgcgggagctaggagcaggccctcgcgtggccaggggagggcgcgcgccgcggagccgggctgcaggggctgggggagggggtcacgaggaagaggaggggcgcactcccattcccatagaccccttaagtctaataaggtcatggctgagtctctcagagtgtggacctgcccccttctactctgggcggttagaaagtcgttagtcgttcacctctcagccttcctgagtgggaactggtatgtcttccaaagggtgaggtggctttgaccccgggttgcccggccagcacgaccgaggaggtggctggacagctggaggatgaacggagaagccgactgccccacagacctggaaatggccgcccccaaaggccaagaccgttggtcccaggaagacatgctgactttgctggaatgcatgaagaacaaccttccatccaatgacagctccaagttcaaaaccaccgaatcacacatggactgggaaaaagtagcatttaaagacttttctggagacatgtgcaagctcaaatgggtggagatttctaatgaggtgaggaagttccgtacattgacagaattgatcctcgatgctcaggaacatgtaatcctacaaggcaataactcaagaacaccgtagcttcctaccggtcagtcc

SEQ ID NO: 331821 - DNA, 3625 bp, Homo sapiens
ggtagcggcggcggcggcggctagcggagcggcaggcggtggagcgaggccgcgcgcgccgaagatggctgagaagcagaagcacgacgggcgggtgaagatcggacactacgtgctgggcgacacgctgggcgtcggcaccttcggcaaagtgaagattggagaacatcaattaacaggccataaagtggcagttaaaatcttaaatagacagaagattcgcagtttagatgttgttggaaaaataaaacgagaaattcaaaatctaaaactctttcgtcatcctcatattatcaaactataccaggtgatcagcactccaacagatttttttatggtaatggaatatgtgtctggaggtgaattatttgactacatctgtaagcatggacgggttgaagagatggaagccaggcggctctttcagcagattctgtctgctgtggattactgtcataggcatatggttgttcatcgagacctgaaaccagagaatgtcctgttggatgcacacatgaatgccaagatagccgatttcggattatctaatatgatgtcagatggtgaatttctgagaactagttgcggatctccaaattatacagcacctgaagtcatctcaggcagattgtatgcaggtcctgaagttgatatctggagctgtggtgttatcttgtatgctcttctttgtggcaccctcccatttgatgatgagcatgtacctacgttatttaagaagatccgagggggtgtcttttatatcccagaatatctcaatcgttctgtcgccactctcctgatgcatatgctgcaggttgacccactgaaacgagcaactatcaaagacataagagagcatgaatggtttaaacaaggtttgcccagttacttatttcctgaagacccttcctatgatgctaacgtcattgatgatgaggctgtgaaagaagtgtgtgaaaaatttgaatgtacagaatcagaagtaatgaacagtttatatagtggtgaccctcaagaccagcttgcagtggcttatcatcttatcattgacaatcggagaataatgaaccaagccagtgagttctacctcgcctctagtcctccatctggttcttttatggatgatagtgccatgcatattcccccaggcctgaaacctcatccagaaaggatgccacctcttatagcagacagccccaaagcaagatgtccattggatgcactgaatacgactaagcccaaatctttagctgtgaaaaaagccaagtggcatcttggaatccgaagtcagagcaaaccgtatgacattatggctgaagtttaccgagctatgaagcagctggattttgaatggaaggtagtgaatgcataccatcttcgtgtaagaagaaaaaatccagtgactggcaattacgtgaaaatgagcttacaactttacctggttgataacaggagctatcttttggactttaaaagcattgatgatgaagtagtggagcagagatctggttcctcaacacctcagcgttcctgttctgctgctggcttacacagaccaagatcaagttttgattccacaactgcagagagccattcactttctggctctctcactggctctttgaccggaagcacattgtcttcagtttcacctcgcctgggcagtcacaccatggatttttttgaaatgtgtgccagtctgattactactttagcccgttgatctgtctctagtttctttctgttattgcactatgaaaatcagttatattctttaaatttttatcttacttttggataatatccactgcaatactaattgagaaacatgaattatttccaggggcacacaatgctattgaaattactgaaaacaaaatatctgacatcttatttacttgtagaaatctgtaattctattgtgcctatgataaattcacataggcaatatctttaataggttaatatcaatgaagatttttaattacaataatgagttcactacagacgattaacacaccacactggcgaaccatctcaatgtaagggtggtttggcaacacctccttgctttgctgtttggtgtaggtaaatctagtttacttcctaaatttcagtaggctttatgctgtgtttatgcgcccaatttattttaacaaaagaagattaaaaagtaaaagaaccacgagtaagatattatttaaatgttgaaatcttaaaaacctgcctccaagatttcagaagccaagtttttctaacagtatttgtacaaatactgcctagtgtattcaacagaaggactgtggtcatgtaacaggtaaccacaattttcaggtttcttaaaaacagctgtaactaactcaggatttttatcttgagatttccctgaataatatatttatcttaagagccttcaagtttcaaattaatattggaacatctggaattgcaacaacttttgtcttttacataaacttacgtcatttaaaaaatgtcttcaaaatctacctttctcaaattctttttgcctctatttatttttgcatttcaccaacagtgataaaatagttaaatgaaacaaagcaaagtatcaacagtcccttaaatgagaatccttatctttgatctttattttctgtgttaggtgttagggtcctggtgcagctcataatgctaattcttcattggaagccactcccttcacctcacctcacctagtcactattgtctttgttcattgtttgatcctgagtggttgattgatatagctttgaatcttttctagtccaagtttgaaaacactgttctggccctaagggctggctatgacctttactgttgaacctgatagggcagggaagctttgaacatcaagaaaaaatttttatcttaaataaataaatatatatattcacacaccagtgcttttaagcaaaaaccagtttttttgtttgtttgttttgctttgtgcaggttttctttaagattaaaaaaacacaaactatagcagggtagataatagtttattgattatattttgttttatttgttatttttatgttgtaattaacacttatttacctggattaccctaaaaaaattaagctcttgaaaacaaaaaaatgacattaccttgacaggcttctctttgccaaaagtaatgtatgttctgccaagaagcaaatgagaatgttagactaagtttctcctgtgttagtggaaaacaagtgtgtctatctttaaatattctttgaatcaggagtttgcgttgtgtcacatcatatggctttgcagatcttttaaaaactgatgttaaataacttataagtccaacttcttaatatcaagataaatgaatagttcaccaatttgggaaggagggcgggttgcaatttgagatagtttaaggtttaattattgaaagactgccatcttgtggcaccaaaaggtaatttttacatgattatttgtatagtgataagcagtcctgctgtgttagcctggtccattatagatatggcatagttttgggttctctaaatgggtccatacctcttttgggaaaaaacagggccacctcataatatttgcctgattatgaatggaattaccttagaaataagga

SEQ ID NO: 331822 - DNA, 1560 bp, Homo sapiens
ggtagcggcggcggcggcggctagcggagcggcaggcggtggagcgaggccgcgcgcgccgaagatggctgagaagcagaagcacgacgggcgggtgaagatcggacactacgtgctgggcgacacgctgggcgtcggcaccttcggcaaagtgaagattggagaacatcaattaacaggccataaagtggcagttaaaatcttaaatagacagaagattcgcagtttagatgttgttggaaaaataaaacgagaaattcaaaatctaaaactctttcgtcatcctcatattatcaaactataccaggtgatcagcactccaacagatttttttatggtaatggaatatgtgtctggaggtgaattatttgactacatctgtaagcatggacgggttgaagagatggaagccaggcggctctttcagcagattctgtctgctgtggattactgtcataggcatatggttgttcatcgagacctgaaaccagagaatgtcctgttggatgcacacatgaatgccaagatagccgatttcggattatctaatatgatgtcagatggtgaatttctgagaactagttgcggatctccaaattatacagcacctgaagtcatctcaggcagattgtatgcaggtcctgaagttgatatctggagctgtggtgttatcttgtatgctcttctttgtggcaccctcccatttgatgatgagcatgtacctacgttatttaagaagatccgagggggtgtcttttatatcccagaatatctcaatcgttctgtcgccactctcctgatgcatatgctgcaggttgacccactgaaacgagcaactatcaaagacataagagagcatgaatggtttaaacaaggtttgcccagttacttatttcctgaagacccttcctatgatgctaacgtcattgatgatgaggctgtgaaagaagtgtgtgaaaaatttgaatgtacagaatcagaagtaatgaacagtttatatagtggtgaccctcaagaccagcttgcagtggcttatcatcttatcattgacaatcggagaataatgaaccaagccagtgagttctacctcgcctctagtcctccatctggttcttttatggatgatagtgccatgcatattcccccaggcctgaaacctcatccagaaaggatgccacctcttatagcagacagccccaaagcaagatgtccattggatgcactgaatacgactaagcccaaatctttagctgtgaaaaaagccaagtggcatcttggaatccgaagtcagagcaaaccgtatgacattatggctgaagtttaccgagctatgaagcagctggattttgaatggaaggtagtgaatgcataccatcttcgtgtaagaagaaaaaatccagtgactggcaattacgtgaaaatgagcttacaactttacctggttgataacaggagctatcttttggactttaaaagcattgatggtaaggaagctatgcatgcaggacctacccaccggatgtcttcgagatgattttaacatctggtcaactagtgcca

SEQ ID NO: 331823 - DNA, 3679 bp, Homo sapiens
ggtagcggcggcggcggcggctagcggagcggcaggcggtggagcgaggccgcgcgcgccgaagatggctgagaagcagaagcacgacgggcgggtgaagatcggacactacgtgctgggcgacacgctgggcgtcggcaccttcggcaaagtgaagattggagaacatcaattaacaggccataaagtggcagttaaaatcttaaatagacagaagattcgcagtttagatgttgttggaaaaataaaacgagaaattcaaaatctaaaactctttcgtcatcctcatattatcaaactataccaggtgatcagcactccaacagatttttttatggtaatggaatatgtgtctggaggtgaattatttgactacatctgtaagcatggacgggttgaagagatggaagccaggcggctctttcagcagattctgtctgctgtggattactgtcataggcatatggttgttcatcgagacctgaaaccagagaatgtcctgttggatgcacacatgaatgccaagatagccgatttcggattatctaatatgatgtcagatggtgaatttctgagaactagttgcggatctccaaattatacagcacctgaagtcatctcaggcagattgtatgcaggtcctgaagttgatatctggagctgtggtgttatcttgtatgctcttctttgtggcaccctcccatttgatgatgagcatgtacctacgttatttaagaagatccgagggggtgtcttttatatcccagaatatctcaatcgttctgtcgccactctcctgatgcatatgctgcaggttgacccactgaaacgagcaactatcaaagacataagagagcatgaatggtttaaacaaggtttgcccagttacttatttcctgaagacccttcctatgatgctaacgtcattgatgatgaggctgtgaaagaagtgtgtgaaaaatttgaatgtacagaatcagaagtaatgaacagtttatatagtggtgaccctcaagaccagcttgcagtggcttatcatcttatcattgacaatcggagaataatgaaccaagccagtgagttctacctcgcctctagtcctccatctggttcttttatggatgatagtgccatgcatattcccccaggcctgaaacctcatccagaaaggatgccacctcttatagcagacagccccaaagcaagatgtccattggatgcactgaatacgactaagcccaaatctttagctgtgaaaaaagccaagtggcatcttggaatccgaagtcagagcaaaccgtatgacattatggctgaagtttaccgagctatgaagcagctggattttgaatggaaggtagtgaatgcataccatcttcgtgtaagaagaaaaaatccagtgactggcaattacgtgaaaatgagcttacaactttacctggttgataacaggagctatcttttggactttaaaagcattgatgatgaagtagtggagcagagatctggttcctcaacacctcagcgttcctgttctgctgctggcttacacagaccaagatcaagttttgattccacaactgcagagagccattcactttctggctctctcactggctctttgaccggaagcacattgtcttcagtttcacctcgcctgggcagtcacaccatggatttttttgaaatgtgtgccagtctgattactactttagcccgttgatctgtctctagtttctttctgttattgcactatgaaaatcagttatattctttaaatttttatcttacttttggataatatccactgcaatactaattgagaaacatgaattatttccaggggcacacaatgctattgaaattactgaaaacaaaatatctgacatcttatttacttgtagaaatctgtaattctattgtgcctatgataaattcacataggcaatatctttaataggttaatatcaatgaagatttttaattacaataatgagttcactacagacgattaacacaccacactggcgaaccatctcaatgtaagggtggtttggcaacacctccttgctttgctgtttggtgtaggtaaatctagtttacttcctaaatttcagtaggctttatgctgtgtttatgcgcccaatttattttaacaaaagaagattaaaaagtaaaagaaccacgagtaagatattatttaaatgttgaaatcttaaaaacctgcctccaagatttcagaagccaagtttttctaacagtatttgtacaaatactgcctagtgtattcaacagaaggactgtggtcatgtaacaggtaaccacaattttcaggtttcttaaaaacagctgtaactaactcaggatttttatcttgagatttccctgaataatatatttatcttaagagccttcaagtttcaaattaatattggaacatctggaattgcaacaacttttgtcttttacataaacttacgtcatttaaaaaatgtcttcaaaatctacctttctcaaattctttttgcctctatttatttttgcatttcaccaacagtgataaaatagttaaatgaaacaaagcaaagtatcaacagtcccttaaatgagaatccttatctttgatctttattttctgtgttaggtgttagggtcctggtgcagctcataatgctaattcttcattggaagccactcccttcacctcacctcacctagtcactattgtctttgttcattgtttgatcctgagtggttgattgatatagctttgaatcttttctagtccaagtttgaaaacactgttctggccctaagggctggctatgacctttactgttgaacctgatagggcagggaagctttgaacatcaagaaaaaatttttatcttaaataaataaatatatatattcacacaccagtgcttttaagcaaaaaccagtttttttgtttgtttgttttgctttgtgcaggttttctttaagattaaaaaaacacaaactatagcagggtagataatagtttattgattatattttgttttagtaaaagtatttaattttaaattctgtgtaatttatctaatttgtatttattcatttgttatttttatgttgtaattaacacttatttacctggattaccctaaaaaaattaagctcttgaaaacaaaaaaatgacattaccttgacaggcttctctttgccaaaagtaatgtatgttctgccaagaagcaaatgagaatgttagactaagtttctcctgtgttagtggaaaacaagtgtgtctatctttaaatattctttgaatcaggagtttgcgttgtgtcacatcatatggctttgcagatcttttaaaaactgatgttaaataacttataagtccaacttcttaatatcaagataaatgaatagttcaccaatttgggaaggagggcgggttgcaatttgagatagtttaaggtttaattattgaaagactgccatcttgtggcaccaaaaggtaatttttacatgattatttgtatagtgataagcagtcctgctgtgttagcctggtccattatagatatggcatagttttgggttctctaaatgggtccatacctcttttgggaaaaaacagggccacctcataatatttgcctgattatgaatggaattaccttagaaataagga

SEQ ID NO: 331824 - DNA, 267 bp, Homo sapiens
tctcttagggaagaggactggccctgtacttcctgggtctgtgaaattcagggctccatgagcttggataggaaaaaaatggcatcttcattttcactaagctgtacctggaatttagcatttctttccattacgaatgtggcaatgagcctgtgggttcatcaggacccaggagtttgccactaagagaataaaaaaacagactttccgtctcacactgtaactgcagacactttgagatgtggtttattcatcactgcattaaat

SEQ ID NO: 331825 - DNA, 269 bp, Homo sapiens
atagacagttttatttcttcttttcaatctgtatggttttctttgcctttttcttgcctattgtactggctaggacttccagtgtaatgtttaatagaaatcctgagactggacatccttgccttattttcaatctgaggagaaagcattcagttgttcatcattaacagacaatgttagctgaaggtttttcagagcttgtgtactctaccaggatgaagaaggtcccttctatttccagtttgctaagagttttaaaattgtgaatg

SEQ ID NO: 331826 - DNA, 274 bp, Homo sapiens
cccatcactcactcccactcaggccccagccctaatgtcgccttttcagaggggtcctgactgcccaaaataaagtaacgtctccttgctcttcatcacatttctggaaaattctaggagtgggtgggaaagtcataaatgtcctgtctcagagtctgaccctctggaggcctcagattggcccccagctccttccagactccagcaaggtccccgggaagctgacatgtgttaagtgccaggtccctctgtcatctgtactttgcaactgggg

SEQ ID NO: 331827 - DNA, 196 bp, Homo sapiens
taaaatctctctcaaacatcccactttattatctgccccaaacatttctcacccagattattatgctaccattctactcatcttcaagatcctgggcttaataatacctcatccacacatttgtccagagaagtccttctaaacagcagtgaagagaccactcccctacttactataacccactttcaagacaaaa

SEQ ID NO: 331828 - DNA, 420 bp, Homo sapiens
gaggttaggggaaagagggaatggtggtggcagagagaggttttcttctgcatcccagaagaaaaactcagcaaaaaataagcgttaggagttcatttttagacatgctgggcttaatggtgcctaatgggcattcgggccagcaaggagacgtgaagcgtggagtggctcaggagctcttctagtctagggaagcggatgcctttctgaacctaacttatacaggcgattttataagttactctgagctttccatgggtggcctcatatcctgtcagtgactcacgtgttcaaccttgatcaccaatgttttcctcctagagtggtttggtcaagtgggctagccctgggggtaaggaggaatttgttttctttatggcaggctgcagctagactgagactcccttaggtcatctactc

SEQ ID NO: 331829 - DNA, 449 bp, Homo sapiens
ctgagttcagagtgagccactaccacgtggagaatgggaaagtggagaagttagtgcaagacaggagcttaattcccaatgacagagtgatcatttggggctgttctttaagaagaagatcagtgcctccctcactttaagcagtgcttctagggttttctaggaagtctagaaaacacacacagatcccaacaagaatggacactgatgggtgaggacagctgctccctgaggagatggccactgggcactgttggcacatcattctgggaaatttcagtttagagcttattagaagagacccagacactaaaggtcaaaggcgggacatgaggagcacagggagagggatgtctattggcattcagagatctgttatactgtcaactaaaccgctctctgaatttgagcattatggtcatacattatgagaggaaaaagatcaacac

SEQ ID NO: 331830 - DNA, 130 bp, Homo sapiens
gacaaatggatggacaggtggatggatgggtgggtggatgaatggatgggtgggcagatgaatggacagatgagtggatagatggatagggtagatggatggatgacggaagagaaaaatgaacagatgg

SEQ ID NO: 331831 - DNA, 295 bp, Homo sapiens
gtggtatggtaacgtacgtgcttctttattagatcattatctatgggtctaataattattttgaagtaatgttgaatgtaatgtgatatgaaaatatctgcaatccctggtaataataaagatactgctgatttgtttcctatctggtacaactacacttaaccaaataaaacagctaggtgtttctgctaagaaacactgcgtggtaacgtttcccggatagcccaaatgatctctatcttctggtgtttacaccatgtgtagtcccttctcacaatataccatacaataaaag

SEQ ID NO: 331832 - DNA, 580 bp, Homo sapiens
ctatgtctaatggtaagaaagctgagactcagagaggttaggtaacttgttacaaagtgagcaaacagataaccaagactggaacccagatctcttgactccaaatgttagatttttcccagtctaccattttgctttgtcttgaagcatagtgccaggaacttgttaggtatttaacaggtgtttgtcaaattaatgtataactatatatgtggaatctcctatatatcttttttctatagtgaaattctaaaagtatctataattggtagctggtaatggtcttgctcactagctataaacagctagaaaaaatgagtaatatatatgatacatctgttttcacacattggatgatacaagatcatgctccaagagagaaggtaaacaaatggggtgagccctatagtcaactcaattttcagtctgggagcactttctggaatgtggcatagggagggggaacccaagcaaagcttgaaagtttcactgagttgagaaaacaaagagaggagtttgggaaggcctaagtgacttgaactgcaaggtagagtatcagagaaaagggagataagcccag

SEQ ID NO: 331833 - DNA, 279 bp, Homo sapiens
cctaattatactataatagaatttcaaaagaatcttttttgaattagaaaacatcccctctacttgctgcataatatcctcttcggtcctctatactaaatgagtccatttggaaagtaaggaggggtataaattaccttttttccaggaatcaacaagccaggtttttactccattatcatatgtcctgttttgttttactaaatctcttgtacttaaataaggtttccgcttaatcagtcaccagaaaagagagcaggatttttttttaattaaaat

SEQ ID NO: 331834 - DNA, 768 bp, Homo sapiens
tccagcctgggcgacagagcaagactctgtctcaagaaaaaaaaaattatgatgatggttgcacaattctgtgattaaactaaaaaccactgaagtgtacacttttaattgagttaattgtatgtatgttaattagatctaaacaaacttttttttaaggttaaggctttacaaaagaaataaaaccaaaacaagaaaagggataaaaatataggctctaatcatgtggaaatccttagacagttaatttttaaatggcatgaaaaagaaggaaattgacaaagagcctacaaaactttgagataattttctaggaatctggggttcccaccgtgaagtctcctcaaactccttagcatatacagttctgaggcttagagaagtttcagaaagaaaattcttccaatgaacctacagcattgaatgccaaaatacccatgtttgtttgggtttttttatttattcattttgagacagggtcttgttctgttgcccaggttggagtgcagtggcacaatcatagctcagtgcagcctcaacctgtcgggttcaagcaatcctcctgtctcagcctcccaagtagctgggactacagatgcgtgctaccacttccagctaatctctttattttatgctttgtagaaactgtccattgcccaggctggtctcaaactcccaggctcaagcaatcctcccacctcagcctcccaaagtgctaggattacaggtgtgagccatcgcatccatcccccacttttactattaagt

SEQ ID NO: 331835 - DNA, 143 bp, Homo sapiens
gcggctgatctttaagaagcaccccacgctaggcaggcattttcagatagattaaacctatttgcaaaatgcggtaagatcgctaattagtcatcactgctttcagctgagaagagtgaggccatggattaactaacattcca

SEQ ID NO: 331836 - DNA, 2602 bp, Homo sapiens
tacaggctctgtgctgattgcaaggcactcttgagagaaattcattcttattttgcagaagaagaactgaaacttcattaagtcattaagcaacttgctcaggtggtggaactgagctttaaatatggactttttccagtctcaattcagcattatactaggctgcctccatgtgtttttcaaagccccattcaagttttacttctatggtaaactaattttacatacacaaatcttttcattttctgaacttcctttatggctttactgtcaccccactagtatttgatgtcttagctattaactaattcctgattatttcacttgtcacatcaggaaccctatcctcttagttctcccattgagatttcactgctggactaagattattcttgattcgtagtcattggtttctgtttccattcattttcagcactgattatgttaatcgtattgcttgagttttttctttgttcaatgttgtttattacattcattttgtttcatatacacacattttttttttttaactggcattttgaggacattggtttaatggaaggaaaaaggaatggtgcaaagcacatggtatttgaattccaaagaccttgaccctcagcattagcaagtcacttgttttctgagcctcagttttcttactctcaaatgaggtaatatccgaaagtactttgacaacacactaaagcctgatgcagatttcctttttgaagtaattgtgctgtttctattcatattggatatggtattctatggtattggctatagatacatacattttaaaatgttatttaacagcatgtaaatgttcatttcatgccatgtgatcatgttcccctttatgattttttaaggctgtcttacaagcctaacagtgtactaagtcattaaaagatatatttaaagtaaaatagtctcttttctcaagtacaagctaagaaatgctcataataataaaataagagaatgtagaatgaggagttagagtgtatatgtatgtgtatacaatttttgatagatggtattttgttatttcatatctgtgttgaaaacagtcttttagtttgtcagacatctttttcagtacctgctatgtgcaggcaggtattgagaaaggtctgagaatactgagggttaataagagatggtatattctccagagaaataaataccactaaagtataagagcagatgtcctttttggaagaatgcctgtggtgatggaataagaaaagccatatagaggggtgaggaaaagcttttcttaccaagtgtgtgagctgagttttggaggatgattaggcaagagttagttggcctggtggagaaacaggagccagacattcagctggaggaacaggagtgtggaacagtgtgggtaacacaatggggtgtgtctggtttcagaattataagaaatagtctttagggggaacagaaatgaaggagactaaatagatgatgataaattatctgtgaatatgtactggttcctacatattcaaagtgtgctaagtttgtacagccattacttgtaaggttctaggagttgtctctctaggggttggtttgtaccatagtccattatgtacatctagaacaattctttctttcccggaactgagcccaaggtgggctttctacagtgcacctctggctctggggcagctcaagcaatcagaaagaactgaggcactggtagaaaacaactctgaggatgaacaggataatgttcctgaagtggaatgtggtatcccttcatggttaaatggttgcatacttcagggtcacctatggaaaggtgtcctcagggtagctaaaagtggttaatttccttgtgttttgacttacagatcatttctaggtggacttggggaaaataaagttacttataaaaatattgcttcattggcatttggaggtgttgtattgaaggaggaagtgggttcctatcaccagaaccctctctaggtgtttcagataggaaactgggttgtagaccttgtcccagtaatatctccagcagctccaacacattttgtcaacttcgtattcgttttttaagtttttttccttgctgttggccacctttaccttcttttttttttttttccttctttttcccttattttttgagacagtctcactctggcgcccaagctggagtacagtggggtcatatcggctaactgcaacctccacctcccaggttcaagcgatgctcctgtaatcctagctattcaggaggctgacgcaggagacttgcttgaatataggaggcagacgttgcagtgagccgaggtcacaccattcactccagcctgggcaacaagagcgaaactccgtttcaaaaaaaaaaaaaaatgacttggacttgtggtgaggggaggtcatctgtagactcctggacctgtttttgccttacttattctctaaagactgaaatatttcctaaaatgtatgggcactgtttaccagaaagtaccttagttaaaacataaaatcatttatgccttataaagctatattttttcaattgctttactgagtcataggaggctaataaatttgtgtaaattgtcta

SEQ ID NO: 331837 - DNA, 1142 bp, Homo sapiens
aaaaaaatctcactctgtcacccaggctggagtgcagtggcatgatctcaggtcgctgcaacctctgcctccagggttcaagcaactctcctgcttcagcctcctgagtagctgggactacaggcatgcaccaccacgccaggctaattttttgtattttttagtagagacagggtttcaccatattggccaggctggtcttgaactccagacctcatgattcgcctgcctcggcctcccaaaatgctgggattacagatatgagccatcatgcccagccgcaaccctaatttttcattcagtcataataccaacagttatctcatgtacctctgagtgccttcttcccaaaagccagcagtaccatacctgctgtcagcaagtgtgtaatataccatagtgataaatatgaccaaaagccataaatgactgtgagatgtatgagaatgacacgtcacattagtaagaagagaaaaattttggccatgtttatgatttgaaatatgttttcctctatcacatttagaaatatagttacaaaatgcccttagttttatcctgattcatcatggtcactgaggagcatcgtctcatatgcctggtatgtgacatgtgtctcttcaacagtaaaagacttggcattggctgggcatggtggctcacgcctgtaatcccagcactttgggaggccgaggtcaggagttagagaccattctgaccaatatgatcaaaccccgtctctactaaaaatacaaaaattagcggggtgtggtggcatgctcctgtaatcctagctattcaggaggctgacgcaggagacttgcttgaatataggaggcagacgttgcagtgagccgaggtcacaccattcactccagcctgggcaacaagagcgaaactccgtttcaaaaaaaaaaaaaaatgacttggacttgtggtgaggggaggtcatctgtagactcctggacctgtttttgccttacttattctctaaagactgaaatatttcctaaaatgtatgggcactgtttaccagaaagtaccttagttaaaacataaaatcatttatgccttataaagctatattttttcaattgctttactgagtcataggaggctaataaatttgtgtaaattgtcta

SEQ ID NO: 331838 - DNA, 438 bp, Homo sapiens
attgtcaatagtagaaagggcagagcctcttctgccatctggagggttgagcgtctcccagctccctggaactttgggatggtttcgggcccctgtgccccatggcacgtggatgcttcaaggctagtggggacagtctcttctgcttttgtggtgactcaaacgacactgtgttcttaggggaaggaatggggactcggggccgtttaatgccccctccgaagtgggcatagggcctggacatccacccgttaattaatccattaaagggcaaatcaaccgacagcctccttattatacaaaaaaggggaacagttttgttaattcattagctggttattaagtgaaaagtcccgagtcctgttggcatttaacatcacagaaggaaatccccagaaatgctgatttctttgggatttccacatgccaaatgatttt

SEQ ID NO: 331839 - DNA, 668 bp, Homo sapiens
gagaacaacattgcatgcaacagtttagcatcactcttttcaacctagtagacaaggtccataaaggaagacaggctgaaatgaaaaggaaaacaaactaaagtagtagtatatgtatattagaaaggaaggcagaaaaaagttacttcaggaaaaacgggagaaaatataggagaaggaattcacttggttaaaaaaaaaaggaaaagaaaactagatatgaacaagtgcagtacaaaaatgaagaaatgtataagagagtaggtaggcttgttagagcccccagagtgaaaaaaagaaaaggtagaatatcaaaagaaagtttataggaacaagctagccaccatcaatcacctttgtcctctattccaatcatctcctaactggataatctgctgcccctctctgaagctctctccatgtagcagctgatgacctttttttttgggtggcagggtctcgctctgtactcccaggtgggaatgcagtggtacgatcatggctcactgcagcctcgccctcctgggctcaagaatcctcccatatcatttttttatgtttttgtacagacacgggctcactatgttgctcaggctggtctccaactcctgggctcaagcaatcctctcaacttggcctcccaaaatgctgggattacaggcgtgagc

SEQ ID NO: 331840 - DNA, 183 bp, Homo sapiens
ggctgagacaatcatttattaaatccataatatagtatagctgatagactcctttttcactggaacatcctatccctttacagatgttctccacgcaccttcatgactccctggacagctagcaggcctccagttttatagggtgactactaaaagtatttgattgtctccgtcattcacaca

SEQ ID NO: 331841 - DNA, 2159 bp, Homo sapiens
catcatggcggccgcggggtttggtgtctgtgcctgagcagcgctggagccggagccggttcccgggtcctgcggctgaggagcccctccgctgtccacggcccctaccggcggggggcggctgggtccctcggcggagctcgggagatgtgactgcctgagggcggtggtggtgtcagcgtccggggccgggggagggggtgtctcgggcagagacccccgggcttggggcagctgaggcggccgggcctcctctacacggggcccgccttccgctgtctgggccgcgagagtccttcgtcccttacagccccgccccggctttgggacactgcgggtggtctgtttcccccagcttgggacaccccgttttctgaggcgtggaagagcgtcgccccggagtaagctgcccgtgccgcgccccgacagcttccctcagccccaagccgccccttattccggatcccggccccaactttggccacggagcctcccattcaaatccctcccttgctgtcaaggggtctccccttcccccaaggtggctcccgcgagcctctaatgccctgacttcttccaatgtcacctacggcccccttagtctcagctcagccaaaaactttaatgcaaaggaaaagtctggattggttccacaggccttttaaaaagcggacttaaaagttgctggcaatgcattccttttcgtcagagtcgagggcaaactcgctgaaatctgggtgacccgtgtccttttccggagagcaaagcagagaagcgagagcggccactagttcggcaggaaatttgttggaagatgaagaagctaagatagggggttggtgacttccacaggaaaagttctggaggagtagccaaagaccatcagcgtttcctttatgtgtgagaattgaaatgactagcattattgacccttttcagcatcccctgtgaatatttctgtttaggtttttcttcttgaaaagaaattgttattcagcccgtttaaaacaaatcaagaaacttttgggtaacattgcaattacatgaaattgataaccgcgaaaataattggaactcctgcttgcaagtgtcaacctaaaaaaagtgcttccttttgttatggaagatgtctttctgtgattgacttcaattgctgacttgtggagatgcagcgaatgtgaaatcccacgtatatgccatttccctctacgctcgctgaccgttctggaagatcttgaaccctcttctggaaaggggtacctattattactttatggggcagcagcctggaaaagtacttggggaccaaagaaggccaagcttgcctgccctgcattttatcaaaggagcagggaagaaggaatcatcgaggcatgggggtccacactgcaatgtttttgtggaacatggtgagtgcttttcaaaatttctgctcatggttttcctcatgcattcatcttaggccttcaaggaactttgaacaacagtacttgcgacagttccttccaattccacttaataaatttgttactgtagttatctcttagtggaactttctttgtataagaaaaagttacttcgtgacttcggctttattcaaaatctatttgagttgcttatttcttgcctgattcctctgctaattcactgttgaccttggacaagccactttactgttccagggctttagtttcctgaggggctggacttcagtggtttcttagggtccctggttctatgattctgctctaaccgaagtcgtgggctcttctgacaagcatggattctttactgctttgtctacagagagcttttatcatattctcaaagtggtttgtgttcctgagaaagttaagaatcatagatactggttgacgctaatatccttgaccttttccttcgtaagtaggacttgaaaatactcactttggagccatgtgggaaaaatcaagtggggaagcagcattccttgtgaattttagatagacagcttctgtcttaccttccataaggagtaatctcttcctcgttgatgaagctttcatcctgtcttctccctgtttagaatgatatttgggccaataaaggttatctgtgacatttttatgaacatatttggcatttgaatgctgcccgtacattttatgttgttcatgtcc

SEQ ID NO: 331842 - DNA, 279 bp, Homo sapiens
  misc_feature (27)..(28): n is a, c, g, or t
gcctactactactactactactaaatnngcggccgctcgacacgtgatgtgccactatattttacacgtatctcttggtatgcatcttttatagacgctcttttctaagtggcgtgtgcatagcgtcctgccctgccccctcgggggcctgtggtggctccccctctgcttctcggggtccagtgcattttgtttctgtatatgattctctgtggttttttttgaatccaaatctgtcctctgtagtattttttaaataaatcagtgtttacattagaa

SEQ ID NO: 331843 - DNA, 203 bp, Homo sapiens
gagagagagagagagagagagctcttttctaagtggcgtgtgcatagcgtcctgccctgccccctcgggggcctgtggtggctccccctctgcttctcggggtccagtgcattttgtttctgtatatgattctctgtggttttttttgaatccaaatctgtcctctgtagtattttttaaataaatcagtgtttacattagaa

SEQ ID NO: 331844 - DNA, 6628 bp, Homo sapiens
gccccgcgcgcagcccggcggcgcaggtaaggccggccgcgccatggtggacccggtgggcttcgcggaggcgtggaaggcgcagttcccggactcagagcccccgcgcatggagctgcgctcagtgggcgacatcgagcaggagctggagcgctgcaaggcctccattcggcgcctggagcaggaggtgaactaggagcgcttccgcatgatctacctgcagacgttgctggccaaggaaaagaagagctatgaccggcagcgatggggcttccggcgcgcggcgcaggcccccgacggcgcctccgagccccgagcgtccgcgtcgcgcccgcagccagcgcccgccgacggagccgacccgccgcccgccgaggagcccgaggcccggcccgacggcgagggttctccgggtaaggccaggcccgggaccgcccgcaggcccggggcagccgcgtcgggggaacgggacgaccggggaccccccgccagcgtggcggcgctcaggtccaacttcgagcggatccgcaagggccatggccagcccggggcggacgccgagaagcccttctacgtgaacgtcgagtttcaccacgagcgcggcctggtgaaggtcaacgacaaagaggtgtcggaccgcatcagctccctgggcagccaggccatgcagatggagcgcaaaaagtcccagcacggcgcgggctcgagcgtgggggatgcatccaggcccccttaccggggacgctcctcggagagcagctgcggcgtcgacggcgactacgaggacgccgagttgaacccccgcttcctgaaggacaacctgatcgacgccaatggcggtagcaggcccccttggccgcccctggagtaccagccctaccagagcatctacgtcgggggcatgatggaaggggagggcaagggcccgctcctgcgcagccagagcacctctgagcaggagaagcgccttacctggccccgcaggtcctactccccccggagttttgaggattgcggaggcggctataccccggactgcagctccaatgagaacctcacctccagcgaggaggacttctcctctggccagtccagccgcgtgtccccaagccccaccacctaccgcatgttccgggacaaaagccgctctccctcgcagaactcgcaacagtccttcgacagcagcagtccccccacgccgcagtgccataagcggcaccggcactgcccggttgtcgtgtccgaggccaccatcgtgggcgtccgcaagaccgggcagatctggcccaacgatggcgagggcgccttccatggagacgcagaagcccttcagcggccagtagcatctgactttgagcctcagggtctgagtgaagccgctcgttggaactccaaggaaaaccttctcgctggacccagtgaaaatgaccccaaccttttcgttgcactgtatgattttgtggccagtggagataacactctaagcataactaaaggtgaaaagctccgggtcttaggctataatcacaatggggaatggtgtgaagcccaaaccaaaaatggccaaggctgggtcccaagcaactacatcacgccagtcaacagtctggagaaacactcctggtaccatgggcctgtgtcccgcaatgccgctgagtatctgctgagcagcgggatcaatggcagcttcttggtgcgtgagagtgagagcagtcctggccagaggtccatctcgctgagatacgaagggagggtgtaccattacaggatcaacactgcttctgatggcaagctctacgtctcctccgagagccgcttcaacaccctggccgagttggttcatcatcattcaacggtggccgacgggctcatcaccacgctccattatccagccccaaagcgcaacaagcccactgtctatggtgtgtcccccaactacgacaagtgggagatggaacgcacggacatcaccatgaagcacaagctgggcgggggccagtacggggaggtgtacgagggcgtgtggaagaaatacagcctgacggtggccgtgaagaccttgaaggaggacaccatggaggtggaagagttcttgaaagaagctgcagtcatgaaagagatcaaacaccctaacctggtgcagctccttggggtctgcacccgggagcccccgttctatatcatcactgagttcatgacctacgggaacctcctggactacctgagggagtgcaaccggcaggaggtgaacgccgtggtgctgctgtacatggccactcagatctcgtcagccatggagtacctggagaagaaaaacttcatccacagagatcttgctgcccgaaactgcctggtaggggagaaccacttggtgaaggtagctgattttggcctgagcaggttgatgacaggggacacctacacagcccatgctggagccaagttccccatcaaatggactgcacccgagagcctggcctacaacaagttctccatcaagtccgacgtctgggcatttggagtattgctttgggaaattgctacctatggcatgtccccttacccgggaattgacctgtcccaggtgtatgagctgctagagaaggactaccgcatggagcgcccagaaggctgcccagagaaggtctatgaactcatgcgagcatgttggcagtggaatccctctgaccggccctcctttgctgaaatccaccaagcctttgaaacaatgttccaggaatccagtatctcagacgaagtggaaaaggagctggggaaacaaggcgtccgtggggctgtgagtaccttgctgcaggccccagagctgcccaccaagacgaggacctccaggagagctgcagagcacagagacaccactgacgtgcctgagatgcctcactccaagggccagggagagagcgatcctctggaccatgagcctgccgtgtctccattgctccctcgaaaagagcgaggtcccccggagggcggcctgaatgaagatgagcgccttctccccaaagacaaaaagaccaacttgttcagcgccttgatcaagaagaagaagaagacagccccaacccctcccaaacgcagcagctccttccgggagatggacggccagccggagcgcagaggggccggcgaggaagagggccgagacatcagcaacggggcactggctttcacccccttggacacagctgacccagccaagtccccaaagcccagcaatggggctggggtccccaatggagccctccgggagtccgggggctcaggcttccggtctccccacctgtggaagaagtccagcacgctgaccagcagccgcctagccaccggcgaggaggagggcggtggcagctccagcaagcgcttcctgcgctcttgctccgcctcctgcgttccccatggggccaaggacacggagtggaggtcagtcacgctgcctcgggacttgcagtccacgggaagacagtttgactcgtccacatttggagggcacaaaagtgagaagccggctctgcctcggaagagggcaggggagaacaggtctgaccaggtgacccgaggcacagtaacgcctccccccaggctggtgaaaaagaatgaggaagctgctgatgaggtcttcaaagacatcatggagtccagcccgggctccagcccgcccaacctgactccaaaacccctccggcggcaggtcaccgtggcccctgcctcgggcctcccccacaaggaagaagctggaaagggcagtgccttagggacccctgctgcagctgagccagtgacccccaccagcaaagcaggctcaggtgcaccagggggcaccagcaagggccccgccgaggagtccagagtgaggaggcacaagcactcctctgagtcgccagggagggacaaggggaaattgtccaggctcaaacctgccccgccgcccccaccagcagcctctgcagggaaggctggaggaaagccctcgcagagcccgagccaggaggcggccggggaggcagtcctgggcgcaaagacaaaagccacgagtctggttgatgctgtgaacagtgacgctgccaagcccagccagccgggagagggcctcaaaaagcccgtgctcccggccactccaaagccacagtccgccaagccgtcggggacccccatcagcccagcccccgttccctccacgttgccatcagcatcctcggccctggcaggggaccagccgtcttccaccgccttcatccctctcatatcaacccgagtgtctcttcggaaaacccgccagcctccagagcggatcgccagcggcgccatcaccaagggcgtggtcctggacagcaccgaggcgctgtgcctcgccatctctaggaactccgagcagatggccagccacagcgcagtgctggaggccggcaaaaacctctacacgttctgcgtgagctatgtggattccatccagcaaatgaggaacaagtttgccttccgagaggccatcaacaaactggagaataatctccgggagcttcagatctgcccggcgacagcaggcagtggtccagcggccactcaggacttcagcaagctcctcagttcggtgaaggaaatcagtgacatagtgcagaggtagcagcagtcaggggtcaggtgtcaggcccgtcggagctgcctgcagcacatgcgggctcgcccatacccgtgacagtggctgacaagggactagtgagtcagcaccttggcccaggagctctgcgccaggcagagctgagggccctgtggagtccagctctactacctacgtttgcaccgcctgccctcccgcaccttcctcctccccgctccgtctctgtcctcgaattttatctgtggagttcctgctccgtggactgcagtcggcatgccaggacccgccagccccgctcccacctagtgccccagactgagctctccaggccaggtgggaacggctgatgtggactgtctttttcatttttttctctctggagcccctcctcccccggctgggcctccttcttccacttctccaagaatggaagcctgaactgaggccttgtgtgtcaggccctctgcctgcactccctggccttgcccgtcgtgtgctgaagacatgtttcaagaaccgcatttcgggaagggcatgcacgggcatgcacacggctggtcactctgccctctgctgctgcccggggtggggtgcactcgccatttcctcacgtgcaggacagctcttgatttgggtggaaaacagggtgctaaagccaaccagcctttgggtcctgggcaggtgggagctgaaaaggatcgaggcatggggcatgtcctttccatctgtccacatccccagagcccagctcttgctctcttgtgacgtgcactgtgaatcctggcaagaaagcttgagtctcaagggtggcaggtcactgtcactgccgacatccctcccccagcagaatggaggcaggggacaagggaggcagtggctagtggggtgaacagctggtgccaaatagccccagactgggcccaggcaggtctgcaagggcccagagtgaaccgtcctttcacacatctgggtgccctgaaagggcccttcccctcccccactcctctaagacaaagtagattcttacaaggccctttcctttggaacaagacagccttcacttttctgagttcttgaagcatttcaaagccctgcctctgtgtagccgccctgagagagaatagagctgccactgggcacctgcgcacaggtgggaggaaagggcctggccagtcctggtcctggctgcactcttgaactgggcgaatgtcttatttaattaccgtgagtgacatagcctcatgttctgtgggggtcatcagggagggttaggaaaaccacaaacggagcccctgaaagcctcacgtatttcacagagcacgcctgccatcttctccccgaggctgccccaggccggagcccagatacgggggctgtgactctgggcagggacccggggtctcctggaccttgacagagcagctaactccgagagcagtgggcaggtggccgcccctgaggcttcacgccgggagaagccaccttcccaccccttcataccgcctcgtgccagcagcctcgcacaggccctagctttacgctcatcacctaaacttgtactttatttttctgatagaaatggtttcctctggatcgttttatgcggttcttacagcacatcacctctttgcccccgacggctgtgacgcagccggagggaggcactagtcaccgacagcggccttgaagacagagcaaagcgcccacccaggtcccccgactgcctgtctccatgaggtactggtcccttccttttgttaacgtgatgtgccactatattttacacgtatctcttggtatgcatcttttatagacgctcttttctaagtggcgtgtgcatagcgtcctgccctgccccctcgggggcctgtggtggctccccctctgcttctcggggtccagtgcattttgtttctgtatatgattctctgtggttttttttgaatccaaatctgtcctctgtagtattttttaaataaatcagtgtttacattagaa

SEQ ID NO: 331845 - DNA, 5379 bp, Homo sapiens
gagaataaaactaattttttctcccaattttctcttcctttttcttttttctgttcccccctttctcttccagaagcccttcagcggccagtagcatctgactttgagcctcagggtctgagtgaagccgctcgttggaactccaaggaaaaccttctcgctggacccagtgaaaatgaccccaaccttttcgttgcactgtatgattttgtggccagtggagataacactctaagcataactaaaggtgaaaagctccgggtcttaggctataatcacaatggggaatggtgtgaagcccaaaccaaaaatggccaaggctgggtcccaagcaactacatcacgccagtcaacagtctggagaaacactcctggtaccatgggcctgtgtcccgcaatgccgctgagtatctgctgagcagcgggatcaatggcagcttcttggtgcgtgagagtgagagcagtcctggccagaggtccatctcgctgagatacgaagggagggtgtaccattacaggatcaacactgcttctgatggcaagctctacgtctcctccgagagccgcttcaacaccctggccgagttggttcatcatcattcaacggtggccgacgggctcatcaccacgctccattatccagccccaaagcgcaacaagcccactgtctatggtgtgtcccccaactacgacaagtgggagatggaacgcacggacatcaccatgaagcacaagctgggcgggggccagtacggggaggtgtacgagggcgtgtggaagaaatacagcctgacggtggccgtgaagaccttgaaggaggacaccatggaggtggaagagttcttgaaagaagctgcagtcatgaaagagatcaaacaccctaacctggtgcagctccttggggtctgcacccgggagcccccgttctatatcatcactgagttcatgacctacgggaacctcctggactacctgagggagtgcaaccggcaggaggtgaacgccgtggtgctgctgtacatggccactcagatctcgtcagccatggagtacctggagaagaaaaacttcatccacagagatcttgctgcccgaaactgcctggtaggggagaaccacttggtgaaggtagctgattttggcctgagcaggttgatgacaggggacacctacacagcccatgctggagccaagttccccatcaaatggactgcacccgagagcctggcctacaacaagttctccatcaagtccgacgtctgggcatttggagtattgctttgggaaattgctacctatggcatgtccccttacccgggaattgacctgtcccaggtgtatgagctgctagagaaggactaccgcatggagcgcccagaaggctgcccagagaaggtctatgaactcatgcgagcatgttggcagtggaatccctctgaccggccctcctttgctgaaatccaccaagcctttgaaacaatgttccaggaatccagtatctcagacgaagtggaaaaggagctggggaaacaaggcgtccgtggggctgtgagtaccttgctgcaggccccagagctgcccaccaagacgaggacctccaggagagctgcagagcacagagacaccactgacgtgcctgagatgcctcactccaagggccagggagagagcgatcctctggaccatgagcctgccgtgtctccattgctccctcgaaaagagcgaggtcccccggagggcggcctgaatgaagatgagcgccttctccccaaagacaaaaagaccaacttgttcagcgccttgatcaagaagaagaagaagacagccccaacccctcccaaacgcagcagctccttccgggagatggacggccagccggagcgcagaggggccggcgaggaagagggccgagacatcagcaacggggcactggctttcacccccttggacacagctgacccagccaagtccccaaagcccagcaatggggctggggtccccaatggagccctccgggagtccgggggctcaggcttccggtctccccacctgtggaagaagtccagcacgctgaccagcagccgcctagccaccggcgaggaggagggcggtggcagctccagcaagcgcttcctgcgctcttgctccgcctcctgcgttccccatggggccaaggacacggagtggaggtcagtcacgctgcctcgggacttgcagtccacgggaagacagtttgactcgtccacatttggagggcacaaaagtgagaagccggctctgcctcggaagagggcaggggagaacaggtctgaccaggtgacccgaggcacagtaacgcctccccccaggctggtgaaaaagaatgaggaagctgctgatgaggtcttcaaagacatcatggagtccagcccgggctccagcccgcccaacctgactccaaaacccctccggcggcaggtcaccgtggcccctgcctcgggcctcccccacaaggaagaagctggaaagggcagtgccttagggacccctgctgcagctgagccagtgacccccaccagcaaagcaggctcaggtgcaccagggggcaccagcaagggccccgccgaggagtccagagtgaggaggcacaagcactcctctgagtcgccagggagggacaaggggaaattgtccaggctcaaacctgccccgccgcccccaccagcagcctctgcagggaaggctggaggaaagccctcgcagagcccgagccaggaggcggccggggaggcagtcctgggcgcaaagacaaaagccacgagtctggttgatgctgtgaacagtgacgctgccaagcccagccagccgggagagggcctcaaaaagcccgtgctcccggccactccaaagccacagtccgccaagccgtcggggacccccatcagcccagcccccgttccctccacgttgccatcagcatcctcggccctggcaggggaccagccgtcttccaccgccttcatccctctcatatcaacccgagtgtctcttcggaaaacccgccagcctccagagcggatcgccagcggcgccatcaccaagggcgtggtcctggacagcaccgaggcgctgtgcctcgccatctctaggaactccgagcagatggccagccacagcgcagtgctggaggccggcaaaaacctctacacgttctgcgtgagctatgtggattccatccagcaaatgaggaacaagtttgccttccgagaggccatcaacaaactggagaataatctccgggagcttcagatctgcccggcgacagcaggcagtggtccagcggccactcaggacttcagcaagctcctcagttcggtgaaggaaatcagtgacatagtgcagaggtagcagcagtcaggggtcaggtgtcaggcccgtcggagctgcctgcagcacatgcgggctcgcccatacccgtgacagtggctgacaagggactagtgagtcagcaccttggcccaggagctctgcgccaggcagagctgagggccctgtggagtccagctctactacctacgtttgcaccgcctgccctcccgcaccttcctcctccccgctccgtctctgtcctcgaattttatctgtggagttcctgctccgtggactgcagtcggcatgccaggacccgccagccccgctcccacctagtgccccagactgagctctccaggccaggtgggaacggctgatgtggactgtctttttcatttttttctctctggagcccctcctcccccggctgggcctccttcttccacttctccaagaatggaagcctgaactgaggccttgtgtgtcaggccctctgcctgcactccctggccttgcccgtcgtgtgctgaagacatgtttcaagaaccgcatttcgggaagggcatgcacgggcatgcacacggctggtcactctgccctctgctgctgcccggggtggggtgcactcgccatttcctcacgtgcaggacagctcttgatttgggtggaaaacagggtgctaaagccaaccagcctttgggtcctgggcaggtgggagctgaaaaggatcgaggcatggggcatgtcctttccatctgtccacatccccagagcccagctcttgctctcttgtgacgtgcactgtgaatcctggcaagaaagcttgagtctcaagggtggcaggtcactgtcactgccgacatccctcccccagcagaatggaggcaggggacaagggaggcagtggctagtggggtgaacagctggtgccaaatagccccagactgggcccaggcaggtctgcaagggcccagagtgaaccgtcctttcacacatctgggtgccctgaaagggcccttcccctcccccactcctctaagacaaagtagattcttacaaggccctttcctttggaacaagacagccttcacttttctgagttcttgaagcatttcaaagccctgcctctgtgtagccgccctgagagagaatagagctgccactgggcacctgcgcacaggtgggaggaaagggcctggccagtcctggtcctggctgcactcttgaactgggcgaatgtcttatttaattaccgtgagtgacatagcctcatgttctgtgggggtcatcagggagggttaggaaaaccacaaacggagcccctgaaagcctcacgtatttcacagagcacgcctgccatcttctccccgaggctgccccaggccggagcccagatacgggggctgtgactctgggcagggacccggggtctcctggaccttgacagagcagctaactccgagagcagtgggcaggtggccgcccctgaggcttcacgccgggagaagccaccttcccaccccttcataccgcctcgtgccagcagcctcgcacaggccctagctttacgctcatcacctaaacttgtactttatttttctgatagaaatggtttcctctggatcgttttatgcggttcttacagcacatcacctctttgcccccgacggctgtgacgcagccggagggaggcactagtcaccgacagcggccttgaagacagagcaaagcgcccacccaggtcccccgactgcctgtctccatgaggtactggtcccttccttttgttaacgtgatgtgccactatattttacacgtatctcttggtatgcatcttttatagacgctcttttctaagtggcgtgtgcatagcgtcctgccctgccccctcgggggcctgtggtggctccccctctgcttctcggggtccagtgcattttgtttctgtatatgattctctgtggttttttttgaatccaaatctgtcctctgtagtattttttaaataaatcagtgtttacattagaa

SEQ ID NO: 331846 - DNA, 4993 bp, Homo sapiens
cagcagaagtgatcttctaaacactctgtcctgtgtggagagctccttatgtgagattttgctgtgtagtgaattaaggctcagccaaactggctcacgtgagctctttgagcttgcctgtctctgtgggctgaaggctgttccctgtttccttcagctctacgtctcctccgagagccgcttcaacaccctggccgagttggttcatcatcattcaacggtggccgacgggctcatcaccacgctccattatccagccccaaagcgcaacaagcccactgtctatggtgtgtcccccaactacgacaagtgggagatggaacgcacggacatcaccatgaagcacaagctgggcgggggccagtacggggaggtgtacgagggcgtgtggaagaaatacagcctgacggtggccgtgaagaccttgaaggaggacaccatggaggtggaagagttcttgaaagaagctgcagtcatgaaagagatcaaacaccctaacctggtgcagctccttggggtctgcacccgggagcccccgttctatatcatcactgagttcatgacctacgggaacctcctggactacctgagggagtgcaaccggcaggaggtgaacgccgtggtgctgctgtacatggccactcagatctcgtcagccatggagtacctggagaagaaaaacttcatccacagagatcttgctgcccgaaactgcctggtaggggagaaccacttggtgaaggtagctgattttggcctgagcaggttgatgacaggggacacctacacagcccatgctggagccaagttccccatcaaatggactgcacccgagagcctggcctacaacaagttctccatcaagtccgacgtctgggcatttggagtattgctttgggaaattgctacctatggcatgtccccttacccgggaattgacctgtcccaggtgtatgagctgctagagaaggactaccgcatggagcgcccagaaggctgcccagagaaggtctatgaactcatgcgagcatgttggcagtggaatccctctgaccggccctcctttgctgaaatccaccaagcctttgaaacaatgttccaggaatccagtatctcagacgaagtggaaaaggagctggggaaacaaggcgtccgtggggctgtgagtaccttgctgcaggccccagagctgcccaccaagacgaggacctccaggagagctgcagagcacagagacaccactgacgtgcctgagatgcctcactccaagggccagggagagagcgatcctctggaccatgagcctgccgtgtctccattgctccctcgaaaagagcgaggtcccccggagggcggcctgaatgaagatgagcgccttctccccaaagacaaaaagaccaacttgttcagcgccttgatcaagaagaagaagaagacagccccaacccctcccaaacgcagcagctccttccgggagatggacggccagccggagcgcagaggggccggcgaggaagagggccgagacatcagcaacggggcactggctttcacccccttggacacagctgacccagccaagtccccaaagcccagcaatggggctggggtccccaatggagccctccgggagtccgggggctcaggcttccggtctccccacctgtggaagaagtccagcacgctgaccagcagccgcctagccaccggcgaggaggagggcggtggcagctccagcaagcgcttcctgcgctcttgctccgcctcctgcgttccccatggggccaaggacacggagtggaggtcagtcacgctgcctcgggacttgcagtccacgggaagacagtttgactcgtccacatttggagggcacaaaagtgagaagccggctctgcctcggaagagggcaggggagaacaggtctgaccaggtgacccgaggcacagtaacgcctccccccaggctggtgaaaaagaatgaggaagctgctgatgaggtcttcaaagacatcatggagtccagcccgggctccagcccgcccaacctgactccaaaacccctccggcggcaggtcaccgtggcccctgcctcgggcctcccccacaaggaagaagctggaaagggcagtgccttagggacccctgctgcagctgagccagtgacccccaccagcaaagcaggctcaggtgcaccagggggcaccagcaagggccccgccgaggagtccagagtgaggaggcacaagcactcctctgagtcgccagggagggacaaggggaaattgtccaggctcaaacctgccccgccgcccccaccagcagcctctgcagggaaggctggaggaaagccctcgcagagcccgagccaggaggcggccggggaggcagtcctgggcgcaaagacaaaagccacgagtctggttgatgctgtgaacagtgacgctgccaagcccagccagccgggagagggcctcaaaaagcccgtgctcccggccactccaaagccacagtccgccaagccgtcggggacccccatcagcccagcccccgttccctccacgttgccatcagcatcctcggccctggcaggggaccagccgtcttccaccgccttcatccctctcatatcaacccgagtgtctcttcggaaaacccgccagcctccagagcggatcgccagcggcgccatcaccaagggcgtggtcctggacagcaccgaggcgctgtgcctcgccatctctaggaactccgagcagatggccagccacagcgcagtgctggaggccggcaaaaacctctacacgttctgcgtgagctatgtggattccatccagcaaatgaggaacaagtttgccttccgagaggccatcaacaaactggagaataatctccgggagcttcagatctgcccggcgacagcaggcagtggtccagcggccactcaggacttcagcaagctcctcagttcggtgaaggaaatcagtgacatagtgcagaggtagcagcagtcaggggtcaggtgtcaggcccgtcggagctgcctgcagcacatgcgggctcgcccatacccgtgacagtggctgacaagggactagtgagtcagcaccttggcccaggagctctgcgccaggcagagctgagggccctgtggagtccagctctactacctacgtttgcaccgcctgccctcccgcaccttcctcctccccgctccgtctctgtcctcgaattttatctgtggagttcctgctccgtggactgcagtcggcatgccaggacccgccagccccgctcccacctagtgccccagactgagctctccaggccaggtgggaacggctgatgtggactgtctttttcatttttttctctctggagcccctcctcccccggctgggcctccttcttccacttctccaagaatggaagcctgaactgaggccttgtgtgtcaggccctctgcctgcactccctggccttgcccgtcgtgtgctgaagacatgtttcaagaaccgcatttcgggaagggcatgcacgggcatgcacacggctggtcactctgccctctgctgctgcccggggtggggtgcactcgccatttcctcacgtgcaggacagctcttgatttgggtggaaaacagggtgctaaagccaaccagcctttgggtcctgggcaggtgggagctgaaaaggatcgaggcatggggcatgtcctttccatctgtccacatccccagagcccagctcttgctctcttgtgacgtgcactgtgaatcctggcaagaaagcttgagtctcaagggtggcaggtcactgtcactgccgacatccctcccccagcagaatggaggcaggggacaagggaggcagtggctagtggggtgaacagctggtgccaaatagccccagactgggcccaggcaggtctgcaagggcccagagtgaaccgtcctttcacacatctgggtgccctgaaagggcccttcccctcccccactcctctaagacaaagtagattcttacaaggccctttcctttggaacaagacagccttcacttttctgagttcttgaagcatttcaaagccctgcctctgtgtagccgccctgagagagaatagagctgccactgggcacctgcgcacaggtgggaggaaagggcctggccagtcctggtcctggctgcactcttgaactgggcgaatgtcttatttaattaccgtgagtgacatagcctcatgttctgtgggggtcatcagggagggttaggaaaaccacaaacggagcccctgaaagcctcacgtatttcacagagcacgcctgccatcttctccccgaggctgccccaggccggagcccagatacgggggctgtgactctgggcagggacccggggtctcctggaccttgacagagcagctaactccgagagcagtgggcaggtggccgcccctgaggcttcacgccgggagaagccaccttcccaccccttcataccgcctcgtgccagcagcctcgcacaggccctagctttacgctcatcacctaaacttgtactttatttttctgatagaaatggtttcctctggatcgttttatgcggttcttacagcacatcacctctttgcccccgacggctgtgacgcagccggagggaggcactagtcaccgacagcggccttgaagacagagcaaagcgcccacccaggtcccccgactgcctgtctccatgaggtactggtcccttccttttgttaacgtgatgtgccactatattttacacgtatctcttggtatgcatcttttatagacgctcttttctaagtggcgtgtgcatagcgtcctgccctgccccctcgggggcctgtggtggctccccctctgcttctcggggtccagtgcattttgtttctgtatatgattctctgtggttttttttgaatccaaatctgtcctctgtagtattttttaaataaatcagtgtttacattagaa

SEQ ID NO: 331847 - DNA, 6598 bp, Homo sapiens
gccccgcgcgcagcccggcggcgcaggtaaggccggccgcgccatggtggacccggtgggcttcgcggaggcgtggaaggcgcagttcccggactcagagcccccgcgcatggagctgcgctcagtgggcgacatcgagcaggagctggagcgctgcaaggcctccattcggcgcctggagcaggaggtgaactaggagcgcttccgcatgatctacctgcagacgttgctggccaaggaaaagaagagctatgaccggcagcgatggggcttccggcgcgcggcgcaggcccccgacggcgcctccgagccccgagcgtccgcgtcgcgcccgcagccagcgcccgccgacggagccgacccgccgcccgccgaggagcccgaggcccggcccgacggcgagggttctccgggtaaggccaggcccgggaccgcccgcaggcccggggcagccgcgtcgggggaacgggacgaccggggaccccccgccagcgtggcggcgctcaggtccaacttcgagcggatccgcaagggccatggccagcccggggcggacgccgagaagcccttctacgtgaacgtcgagtttcaccacgagcgcggcctggtgaaggtcaacgacaaagaggtgtcggaccgcatcagctccctgggcagccaggccatgcagatggagcgcaaaaagtcccagcacggcgcgggctcgagcgtgggggatgcatccaggcccccttaccggggacgctcctcggagagcagctgcggcgtcgacggcgactacgaggacgccgagttgaacccccgcttcctgaaggacaacctgatcgacgccaatggcggtagcaggcccccttggccgcccctggagtaccagccctaccagagcatctacgtcgggggcatgatggaaggggagggcaagggcccgctcctgcgcagccagagcacctctgagcaggagaagcgccttacctggccccgcaggtcctactccccccggagttttgaggattgcggaggcggctataccccggactgcagctccaatgagaacctcacctccagcgaggaggacttctcctctggccagtccagccgcgtgtccccaagccccaccacctaccgcatgttccgggacaaaagccgctctccctcgcagaactcgcaacagtccttcgacagcagcagtccccccacgccgcagtgccataagcggcaccggcactgcccggttgtcgtgtccgaggccaccatcgtgggcgtccgcaagaccgggcagatctggcccaacgatggcgagggcgccttccatggagacgcagaagcccttcagcggccagtagcatctgactttgagcctcagggtctgagtgaagccgctcgttggaactccaaggaaaaccttctcgctggacccagtgaaaatgaccccaaccttttcgttgcactgtatgattttgtggccagtggagataacactctaagcataactaaaggtgaaaagctccgggtcttaggctataatcacaatggggaatggtgtgaagcccaaaccaaaaatggccaaggctgggtcccaagcaactacatcacgccagtcaacagtctggagaaacactcctggtaccatgggcctgtgtcccgcaatgccgctgagtatctgctgagcagcgggatcaatggcagcttcttggtgcgtgagagtgagagcagtcctggccagaggtccatctcgctgagatacgaagggagggtgtaccattacaggatcaacactgcttctgatggcaagctctacgtctcctccgagagccgcttcaacaccctggccgagttggttcatcatcattcaacggtggccgacgggctcatcaccacgctccattatccagccccaaagcgcaacaagcccactgtctatggtgtgtcccccaactacgacaagtgggagatggaacgcacggacatcaccatgaagcacaagctgggcgggggccagtacggggaggtgtacgagggcgtgtggaagaaatacagcctgacggtggccgtgaagaccttgaaggaggacaccatggaggtggaagagttcttgaaagaagctgcagtcatgaaagagatcaaacaccctaacctggtgcagctccttggggtctgcacccgggagcccccgttctatatcatcactgagttcatgacctacgggaacctcctggactacctgagggagtgcaaccggcaggaggtgaacgccgtggtgctgctgtacatggccactcagatctcgtcagccatggagtacctggagaagaaaaacttcatccacagagatcttgctgcccgaaactgcctggtaggggagaaccacttggtgaaggtagctgattttggcctgagcaggttgatgacaggggacacctacacagcccatgctggagccaagttccccatcaaatggactgcacccgagagcctggcctacaacaagttctccatcaagtccgacgtctgggcatttggagtattgctttgggaaattgctacctatggcatgtccccttacccgggaattgacctgtcccaggtgtatgagctgctagagaaggactaccgcatggagcgcccagaaggctgcccagagaaggtctatgaactcatgcgagcatgttggcagtggaatccctctgaccggccctcctttgctgaaatccaccaagcctttgaaacaatgttccaggaatccagtatctcagacgaagtggaaaaggagctggggaaacaaggcgtccgtggggctgtgagtaccttgctgcaggccccagagctgcccaccaagacgaggacctccaggagagctgcagagcacagagacaccactgacgtgcctgagatgcctcactccaagggccagggagagagcgatcctctggaccatgagcctgccgtgtctccattgctccctcgaaaagagcgaggtcccccggagggcggcctgaatgaagatgagcgccttctccccaaagacaaaaagaccaacttgttcagcgccttgatcaagaagaagaagaagacagccccaacccctcccaaacgcagcagctccttccgggagatggacggccagccggagcgcagaggggccggcgaggaagagggccgagacatcagcaacggggcactggctttcacccccttggacacagctgacccagccaagtccccaaagcccagcaatggggctggggtccccaatggagccctccgggagtccgggggctcaggcttccggtctccccacctgtggaagaagtccagcacgctgaccagcagccgcctagccaccggcgaggaggagggcggtggcagctccagcaagcgcttcctgcgctcttgctccgcctcctgcgttccccatggggccaaggacacggagtggaggtcagtcacgctgcctcgggacttgcagtccacgggaagacagtttgactcgtccacatttggagggcacaaaagtgagaagccggctctgcctcggaagagggcaggggagaacaggtctgaccaggtgacccgaggcacagtaacgcctccccccaggctggtgaaaaagaatgaggaagctgctgatgaggtcttcaaagacatcatggagtccagcccgggctccagcccgcccaacctgactccaaaacccctccggcggcaggtcaccgtggcccctgcctcgggcctcccccacaaggaagaagctggaaagggcagtgccttagggacccctgctgcagctgagccagtgacccccaccagcaaagcaggctcaggtgcaccagggggcaccagcaagggccccgccgaggagtccagagtgaggaggcacaagcactcctctgagtcgccagggagggacaaggggaaattgtccaggctcaaacctgccccgccgcccccaccagcagcctctgcagggaaggctggaggaaagccctcgcagagcccgagccaggaggcggccggggaggcagtcctgggcgcaaagacaaaagccacgagtctggttgatgctgtgaacagtgacgctgccaagcccagccagccgggagagggcctcaaaaagcccgtgctcccggccactccaaagccacagtccgccaagccgtcggggacccccatcagcccagcccccgttccctccacgttgccatcagcatcctcggccctggcaggggaccagccgtcttccaccgccttcatccctctcatatcaacccgagtgtctcttcggaaaacccgccagcctccagagcggatcgccagcggcgccatcaccaagggcgtggtcctggacagcaccgaggcgctgtgcctcgccatctctaggaactccgagcagatggccagccacagcgcagtgctggaggccggcaaaaacctctacacgttctgcgtgagctatgtggattccatccagcaaatgaggaacaagtttgccttccgagaggccatcaacaaactggagaataatctccgggagcttcagatctgcccggcgacagcaggcagtggtccagcggccactcaggacttcagcaagctcctcagttcggtgaaggaaatcagtgacatagtgcagaggtagcagcagtcaggggtcaggtgtcaggcccgtcggagctgcctgcagcacatgcgggctcgcccatacccgtgacagtggctgacaagggactagtgagtcagcaccttggcccaggagctctgcgccaggcagagctgagggccctgtggagtccagctctactacctacgtttgcaccgcctgccctcccgcaccttcctcctccccgctccgtctctgtcctcgaattttatctgtggagttcctgctccgtggactgcagtcggcatgccaggacccgccagccccgctcccacctagtgccccagactgagctctccaggccaggtgggaacggctgatgtggactgtctttttcatttttttctctctggagcccctcctcccccggctgggcctccttcttccacttctccaagaatggaagcctgaactgaggccttgtgtgtcaggccctctgcctgcactccctggccttgcccgtcgtgtgctgaagacatgtttcaagaaccgcatttcgggaagggcatgcacgggcatgcacacggctggtcactctgccctctgctgctgcccggggtggggtgcactcgccatttcctcacgtgcaggacagctcttgatttgggtggaaaacagggtgctaaagccaaccagcctttgggtcctgggcaggtgggagctgaaaaggatcgaggcatggggcatgtcctttccatctgtccacatccccagagcccagctcttgctctcttgtgacgtgcactgtgaatcctggcaagaaagcttgagtctcaagggtggcaggtcactgtcactgccgacatccctcccccagcagaatggaggcaggggacaagggaggcagtggctagtggggtgaacagctggtgccaaatagccccagaagtgaaccgtcctttcacacatctgggtgccctgaaagggcccttcccctcccccactcctctaagacaaagtagattcttacaaggccctttcctttggaacaagacagccttcacttttctgagttcttgaagcatttcaaagccctgcctctgtgtagccgccctgagagagaatagagctgccactgggcacctgcgcacaggtgggaggaaagggcctggccagtcctggtcctggctgcactcttgaactgggcgaatgtcttatttaattaccgtgagtgacatagcctcatgttctgtgggggtcatcagggagggttaggaaaaccacaaacggagcccctgaaagcctcacgtatttcacagagcacgcctgccatcttctccccgaggctgccccaggccggagcccagatacgggggctgtgactctgggcagggacccggggtctcctggaccttgacagagcagctaactccgagagcagtgggcaggtggccgcccctgaggcttcacgccgggagaagccaccttcccaccccttcataccgcctcgtgccagcagcctcgcacaggccctagctttacgctcatcacctaaacttgtactttatttttctgatagaaatggtttcctctggatcgttttatgcggttcttacagcacatcacctctttgcccccgacggctgtgacgcagccggagggaggcactagtcaccgacagcggccttgaagacagagcaaagcgcccacccaggtcccccgactgcctgtctccatgaggtactggtcccttccttttgttaacgtgatgtgccactatattttacacgtatctcttggtatgcatcttttatagacgctcttttctaagtggcgtgtgcatagcgtcctgccctgccccctcgggggcctgtggtggctccccctctgcttctcggggtccagtgcattttgtttctgtatatgattctctgtggttttttttgaatccaaatctgtcctctgtagtattttttaaataaatcagtgtttacattagaa

SEQ ID NO: 331848 - DNA, 3218 bp, Homo sapiens
gccccgcgcgcagcccggcggcgcaggtaaggccggccgcgccatggtggacccggtgggcttcgcggaggcgtggaaggcgcagttcccggactcagagcccccgcgcatggagctgcgctcagtgggcgacatcgagcaggagctggagcgctgcaaggcctccattcggcgcctggagcaggaggtgaactaggagcgcttccgcatgatctacctgcagacgttgctggccaaggaaaagaagagctatgaccggcagcgatggggcttccggcgcgcggcgcaggcccccgacggcgcctccgagccccgagcgtccgcgtcgcgcccgcagccagcgcccgccgacggagccgacccgccgcccgccgaggagcccgaggcccggcccgacggcgagggttctccgggtaaggccaggcccgggaccgcccgcaggcccggggcagccgcgtcgggggaacgggacgaccggggaccccccgccagcgtggcggcgctcaggtccaacttcgagcggatccgcaagggccatggccagcccggggcggacgccgagaagcccttctacgtgaacgtcgagtttcaccacgagcgcggcctggtgaaggtcaacgacaaagaggtgtcggaccgcatcagctccctgggcagccaggccatgcagatggagcgcaaaaagtcccagcacggcgcgggctcgagcgtgggggatgcatccaggcccccttaccggggacgctcctcggagagcagctgcggcgtcgacggcgactacgaggacgccgagttgaacccccgcttcctgaaggacaacctgatcgacgccaatggcggtagcaggcccccttggccgcccctggagtaccagccctaccagagcatctacgtcgggggcatgatggaaggggagggcaagggcccgctcctgcgcagccagagcacctctgagcaggagaagcgccttacctggccccgcaggtcctactccccccggagttttgaggattgcggaggcggctataccccggactgcagctccaatgagaacctcacctccagcgaggaggacttctcctctggccagtccagccgcgtgtccccaagccccaccacctaccgcatgttccgggacaaaagccgctctccctcgcagaactcgcaacagtccttcgacagcagcagtccccccacgccgcagtgccataagcggcaccggcactgcccggttgtcgtgtccgaggccaccatcgtgggcgtccgcaagaccgggcagatctggcccaacgatggcgagggcgccttccatggagacgcagaagcccttcagcggccagtagcatctgactttgagcctcagggtctgagtgaagccgctcgttggaactccaaggaaaaccttctcgctggacccagtgaaaatgaccccaaccttttcgttgcactgtatgattttgtggccagtggagataacactctaagcataactaaaggtgaaaagctccgggtcttaggctataatcacaatggggaatggtgtgaagcccaaaccaaaaatggccaaggctgggtcccaagcaactacatcacgccagtcaacagtctggagaaacactcctggtaccatgggcctgtgtcccgcaatgccgctgagtatctgctgagcagcgggatcaatggcagcttcttggtgcgtgagagtgagagcagtcctggccagaggtccatctcgctgagatacgaagggagggtgtaccattacaggatcaacactgcttctgatggcaagctctacgtctcctccgagagccgcttcaacaccctggccgagttggttcatcatcattcaacggtggccgacgggctcatcaccacgctccattatccagccccaaagcgcaacaagcccactgtctatggtgtgtcccccaactacgacaagtgggagatggaacgcacggacatcaccatgaagcacaagctgggcgggggccagtacggggaggtgtacgagggcgtgtggaagaaatacagcctgacggtggccgtgaagaccttgaaggaggacaccatggaggtggaagagttcttgaaagaagctgcagtcatgaaagagatcaaacaccctaacctggtgcagctccttggggtctgcacccgggagcccccgttctatatcatcactgagttcatgacctacgggaacctcctggactacctgagggagtgcaaccggcaggaggtgaacgccgtggtgctgctgtacatggccactcagatctcgtcagccatggagtacctggagaagaaaaacttcatccacagagatcttgctgcccgaaactgcctggtaggggagaaccacttggtgaaggtagctgattttggcctgagcaggttgatgacaggggacacctacacagcccatgctggagccaagttccccatcaaatggactgcacccgagagcctggcctacaacaagttctccatcaagtccgacgtctgggcatttggagtattgctttgggaaattgctacctatggcatgtccccttacccgggaattgacctgtcccaggtgtatgagctgctagagaaggactaccgcatggagcgcccagaaggctgcccagagaaggtctatgaactcatgcgagcatgttggcagtggaatccctctgaccggccctcctttgctgaaatccaccaagcctttgaaacaatgttccaggaatccagtatctcagacgaagtggaaaaggagctggggaaacaaggcgtccgtggggctgtgagtaccttgctgcaggccccagagctgcccaccaagacgaggacctccaggagagctgcagagcacagagacaccactgacgtgcctgagatgcctcactccaagggccagggagagagcgatcctctggaccatgagcctgccgtgtctccattgctccctcgaaaagagcgaggtcccccggagggcggcctgaatgaagatgagcgccttctccccaaagacaaaaagaccaacttgttcagcgccttgatcaagaagaagaagaagacagccccctcgggggcctgtggtggctccccctctgcttctcggggtccagtgcattttgtttctgtatatgattctctgtggttttttttgaatccaaatctgtcctctgtagtattttttaaataaatcagtgtttacattagaa

SEQ ID NO: 331849 - DNA, 484 bp, Homo sapiens
agtgctgggattacaggtgtgagccaccgtgcccggcccctaatttttgtatttttagtagagatggggtttcgccatgttggccagggtggtcttgaattcctgacctcaaataatcctcccacttcagcctcccaaagtgctgggattacaggcgtgagccaccgcacccagccttgtcctggtcttctgatgataaagagcctggtaaaatgtcagagcctgggctgctgctggggccatcccttctgaggtctgctgcaaaggtaactgattttaaatgtagtgtagtgaaatgctacacatcttgaacagcctttctctttcggttttctttcagcatttggagtattgctttgggaaattgctacctatggcatgtccccttacccgggaattgacctgtcccaggtgtatgagctgctagagaaggactaccgcatggagcgcccagaaggctgcccagagaaggtctatgaactca

SEQ ID NO: 331850 - DNA, 564 bp, Homo sapiens
atatgggagtgactgttcctggtccccagtactaggctttgtcagtctgtttagtcctcatgttagtctcattttcatgagaatttctttacttcagactttgataaccgtgaagaaagaacaagatagaaggtgagctgtttggcttagtaattttctacacctactagagcgggactgggaaaaatatatttgtaaatgcagttcttgctgtcactgtctctctggggttttacaatccatattcctgccagcatctaacgtcttttcaaattcttaatgtctataacaggacatgatgacattcatcgttttgacttgttgcagcaaaagatggttagcaggattggaatgttgctttcattctagacttttccttgagaactgctagccccgtattgctagccagatctcatggatgatctgacttgggtttcatctgtccaggttggcagtggaatccctctgaccggccctcctttgctgaaatccaccaagcctttgaaacaatgttccaggaatccagtatctcagacggtaaagtacccatcccggggtacctgc

SEQ ID NO: 331851 - DNA, 424 bp, Homo sapiens
gtgtggagagctccttatgtgagattttgctgtgtagtgaattaaggctcagccaaactggctcacgtgagctctttgagcttgcctgtctctgtgggctgaaggctgttccctgtttccttcagctctacgtctcctccgagagccgcttcaacaccctggccgagttggttcatcatcattcaacggtggccgacgggctcatcaccacgctccattatccagccccaaagcgcaacaagcccactgtctatggtgtgtcccccaactacgacaagtgggagatggaacgcacggacatcaccatgaagcacaagctgggcgggggccagtacggggaggtgtacgagggcgtgtggaagaaatacagcctgacggtggccgtgaagaccttgaaggtaggctgggactgccgggggtgccc

SEQ ID NO: 331852 - DNA, 5749 bp, Homo sapiens
  misc_feature (25)..(25): n is a, c, g, or t
ggccttccccctgcgaggatcgccnttggcccgggttggctttggaaagcggcggtggctttgggccgggctcggcctcgggaacgccaggggcccctgggtgcggacgggcgcggccaggagggggttaaggcgcaggcggcggcggggcgggggcgggcctggcgggcgccctctccgggccctttgttaacaggcgcgtcccggccagcggagacgcggccgccctgggcgggcgcgggcggcgggcggcggtgagggcggcctgcggggcggcgcccgggggccgggccgagccgggcctgagccgggcccggaccgagctgggagaggggctccggcccgatcgttcgcttggcgcaaaatgttggagatctgcctgaagctggtgggctgcaaatccaagaaggggctgtcctcgtcctccagctgttatctggaagaagcccttcagcggccagtagcatctgactttgagcctcagggtctgagtgaagccgctcgttggaactccaaggaaaaccttctcgctggacccagtgaaaatgaccccaaccttttcgttgcactgtatgattttgtggccagtggagataacactctaagcataactaaaggtgaaaagctccgggtcttaggctataatcacaatggggaatggtgtgaagcccaaaccaaaaatggccaaggctgggtcccaagcaactacatcacgccagtcaacagtctggagaaacactcctggtaccatgggcctgtgtcccgcaatgccgctgagtatctgctgagcagcgggatcaatggcagcttcttggtgcgtgagagtgagagcagtcctggccagaggtccatctcgctgagatacgaagggagggtgtaccattacaggatcaacactgcttctgatggcaagctctacgtctcctccgagagccgcttcaacaccctggccgagttggttcatcatcattcaacggtggccgacgggctcatcaccacgctccattatccagccccaaagcgcaacaagcccactgtctatggtgtgtcccccaactacgacaagtgggagatggaacgcacggacatcaccatgaagcacaagctgggcgggggccagtacggggaggtgtacgagggcgtgtggaagaaatacagcctgacggtggccgtgaagaccttgaaggaggacaccatggaggtggaagagttcttgaaagaagctgcagtcatgaaagagatcaaacaccctaacctggtgcagctccttggggtctgcacccgggagcccccgttctatatcatcactgagttcatgacctacgggaacctcctggactacctgagggagtgcaaccggcaggaggtgaacgccgtggtgctgctgtacatggccactcagatctcgtcagccatggagtacctggagaagaaaaacttcatccacagagatcttgctgcccgaaactgcctggtaggggagaaccacttggtgaaggtagctgattttggcctgagcaggttgatgacaggggacacctacacagcccatgctggagccaagttccccatcaaatggactgcacccgagagcctggcctacaacaagttctccatcaagtccgacgtctgggcatttggagtattgctttgggaaattgctacctatggcatgtccccttacccgggaattgacctgtcccaggtgtatgagctgctagagaaggactaccgcatggagcgcccagaaggctgcccagagaaggtctatgaactcatgcgagcatgttggcagtggaatccctctgaccggccctcctttgctgaaatccaccaagcctttgaaacaatgttccaggaatccagtatctcagacgaagtggaaaaggagctggggaaacaaggcgtccgtggggctgtgagtaccttgctgcaggccccagagctgcccaccaagacgaggacctccaggagagctgcagagcacagagacaccactgacgtgcctgagatgcctcactccaagggccagggagagagcgatcctctggaccatgagcctgccgtgtctccattgctccctcgaaaagagcgaggtcccccggagggcggcctgaatgaagatgagcgccttctccccaaagacaaaaagaccaacttgttcagcgccttgatcaagaagaagaagaagacagccccaacccctcccaaacgcagcagctccttccgggagatggacggccagccggagcgcagaggggccggcgaggaagagggccgagacatcagcaacggggcactggctttcacccccttggacacagctgacccagccaagtccccaaagcccagcaatggggctggggtccccaatggagccctccgggagtccgggggctcaggcttccggtctccccacctgtggaagaagtccagcacgctgaccagcagccgcctagccaccggcgaggaggagggcggtggcagctccagcaagcgcttcctgcgctcttgctccgcctcctgcgttccccatggggccaaggacacggagtggaggtcagtcacgctgcctcgggacttgcagtccacgggaagacagtttgactcgtccacatttggagggcacaaaagtgagaagccggctctgcctcggaagagggcaggggagaacaggtctgaccaggtgacccgaggcacagtaacgcctccccccaggctggtgaaaaagaatgaggaagctgctgatgaggtcttcaaagacatcatggagtccagcccgggctccagcccgcccaacctgactccaaaacccctccggcggcaggtcaccgtggcccctgcctcgggcctcccccacaaggaagaagctggaaagggcagtgccttagggacccctgctgcagctgagccagtgacccccaccagcaaagcaggctcaggtgcaccagggggcaccagcaagggccccgccgaggagtccagagtgaggaggcacaagcactcctctgagtcgccagggagggacaaggggaaattgtccaggctcaaacctgccccgccgcccccaccagcagcctctgcagggaaggctggaggaaagccctcgcagagcccgagccaggaggcggccggggaggcagtcctgggcgcaaagacaaaagccacgagtctggttgatgctgtgaacagtgacgctgccaagcccagccagccgggagagggcctcaaaaagcccgtgctcccggccactccaaagccacagtccgccaagccgtcggggacccccatcagcccagcccccgttccctccacgttgccatcagcatcctcggccctggcaggggaccagccgtcttccaccgccttcatccctctcatatcaacccgagtgtctcttcggaaaacccgccagcctccagagcggatcgccagcggcgccatcaccaagggcgtggtcctggacagcaccgaggcgctgtgcctcgccatctctaggaactccgagcagatggccagccacagcgcagtgctggaggccggcaaaaacctctacacgttctgcgtgagctatgtggattccatccagcaaatgaggaacaagtttgccttccgagaggccatcaacaaactggagaataatctccgggagcttcagatctgcccggcgacagcaggcagtggtccagcggccactcaggacttcagcaagctcctcagttcggtgaaggaaatcagtgacatagtgcagaggtagcagcagtcaggggtcaggtgtcaggcccgtcggagctgcctgcagcacatgcgggctcgcccatacccgtgacagtggctgacaagggactagtgagtcagcaccttggcccaggagctctgcgccaggcagagctgagggccctgtggagtccagctctactacctacgtttgcaccgcctgccctcccgcaccttcctcctccccgctccgtctctgtcctcgaattttatctgtggagttcctgctccgtggactgcagtcggcatgccaggacccgccagccccgctcccacctagtgccccagactgagctctccaggccaggtgggaacggctgatgtggactgtctttttcatttttttctctctggagcccctcctcccccggctgggcctccttcttccacttctccaagaatggaagcctgaactgaggccttgtgtgtcaggccctctgcctgcactccctggccttgcccgtcgtgtgctgaagacatgtttcaagaaccgcatttcgggaagggcatgcacgggcatgcacacggctggtcactctgccctctgctgctgcccggggtggggtgcactcgccatttcctcacgtgcaggacagctcttgatttgggtggaaaacagggtgctaaagccaaccagcctttgggtcctgggcaggtgggagctgaaaaggatcgaggcatggggcatgtcctttccatctgtccacatccccagagcccagctcttgctctcttgtgacgtgcactgtgaatcctggcaagaaagcttgagtctcaagggtggcaggtcactgtcactgccgacatccctcccccagcagaatggaggcaggggacaagggaggcagtggctagtggggtgaacagctggtgccaaatagccccagactgggcccaggcaggtctgcaagggcccagagtgaaccgtcctttcacacatctgggtgccctgaaagggcccttcccctcccccactcctctaagacaaagtagattcttacaaggccctttcctttggaacaagacagccttcacttttctgagttcttgaagcatttcaaagccctgcctctgtgtagccgccctgagagagaatagagctgccactgggcacctgcgcacaggtgggaggaaagggcctggccagtcctggtcctggctgcactcttgaactgggcgaatgtcttatttaattaccgtgagtgacatagcctcatgttctgtgggggtcatcagggagggttaggaaaaccacaaacggagcccctgaaagcctcacgtatttcacagagcacgcctgccatcttctccccgaggctgccccaggccggagcccagatacgggggctgtgactctgggcagggacccggggtctcctggaccttgacagagcagctaactccgagagcagtgggcaggtggccgcccctgaggcttcacgccgggagaagccaccttcccaccccttcataccgcctcgtgccagcagcctcgcacaggccctagctttacgctcatcacctaaacttgtactttatttttctgatagaaatggtttcctctggatcgttttatgcggttcttacagcacatcacctctttgcccccgacggctgtgacgcagccggagggaggcactagtcaccgacagcggccttgaagacagagcaaagcgcccacccaggtcccccgactgcctgtctccatgaggtactggtcccttccttttgttaacgtgatgtgccactatattttacacgtatctcttggtatgcatcttttatagacgctcttttctaagtggcgtgtgcatagcgtcctgccctgccccctcgggggcctgtggtggctccccctctgcttctcggggtccagtgcattttgtttctgtatatgattctctgtggttttttttgaatccaaatctgtcctctgtagtattttttaaataaatcagtgtttacattagaa

SEQ ID NO: 331853 - DNA, 6715 bp, Homo sapiens
catcatggcggccgcggggtttggtgtctgtgcctgagcagcgctggagccggagccggttcccgggtcctgcggctgaggagcccctccgctgtccacggcccctaccggcggggggcggctgggtccctcggcggagctcgggagatgtgactgcctgagggcggtggtggtgtcagcgtccggggccgggggagggggtgtctcgggcagagacccccgggcttggggcagctgaggcggccgggcctcctctacacggggcccgccttccgctgtctgggccgcgagagtccttcgtcccttacagccccgccccggctttgggacactgcgggtggtctgtttcccccagcttgggacaccccgttttctgaggcgtggaagagcgtcgccccggagtaagctgcccgtgccgcgccccgacagcttccctcagccccaagccgccccttattccggatcccggccccaactttggccacggagcctcccattcaaatccctcccttgctgtcaaggggtctccccttcccccaaggtggctcccgcgagcctctaatgccctgacttcttccaatgtcacctacggcccccttagtctcagctcagccaaaaactttaatgcaaaggaaaagtctggattggttccacaggccttttaaaaagcggacttaaaagttgctggcaatgcattccttttcgtcagagtcgagggcaaactcgctgaaatctgggtgacccgtgtccttttccggagagcaaagcagagaagcgagagcggccactagttcggcaggaaatttgttggaagatgaagaagctaagatagggggttggtgacttccacaggaaaagttctggaggagtagccaaagaccatcagcgtttcctttatgtgtgagaattgaaatgactagcattattgacccttttcagcatcccctgtgaatatttctgtttaggtttttcttcttgaaaagaaattgttattcagcccgtttaaaacaaatcaagaaacttttgggtaacattgcaattacatgaaattgataaccgcgaaaataattggaactcctgcttgcaagtgtcaacctaaaaaaagtgcttccttttgttatggaagatgtctttctgtgattgacttcaattgctgacttgtggagatgcagcgaatgtgaaatcccacgtatatgccatttccctctacgctcgctgaccgttctggaagatcttgaaccctcttctggaaaggggtacctattattactttatggggcagcagcctggaaaagtacttggggaccaaagaaggccaagcttgcctgccctgcattttatcaaaggagcagggaagaaggaatcatcgaggcatgggggtccacactgcaatgtttttgtggaacatgaagcccttcagcggccagtagcatctgactttgagcctcagggtctgagtgaagccgctcgttggaactccaaggaaaaccttctcgctggacccagtgaaaatgaccccaaccttttcgttgcactgtatgattttgtggccagtggagataacactctaagcataactaaaggtgaaaagctccgggtcttaggctataatcacaatggggaatggtgtgaagcccaaaccaaaaatggccaaggctgggtcccaagcaactacatcacgccagtcaacagtctggagaaacactcctggtaccatgggcctgtgtcccgcaatgccgctgagtatctgctgagcagcgggatcaatggcagcttcttggtgcgtgagagtgagagcagtcctggccagaggtccatctcgctgagatacgaagggagggtgtaccattacaggatcaacactgcttctgatggcaagctctacgtctcctccgagagccgcttcaacaccctggccgagttggttcatcatcattcaacggtggccgacgggctcatcaccacgctccattatccagccccaaagcgcaacaagcccactgtctatggtgtgtcccccaactacgacaagtgggagatggaacgcacggacatcaccatgaagcacaagctgggcgggggccagtacggggaggtgtacgagggcgtgtggaagaaatacagcctgacggtggccgtgaagaccttgaaggaggacaccatggaggtggaagagttcttgaaagaagctgcagtcatgaaagagatcaaacaccctaacctggtgcagctccttggggtctgcacccgggagcccccgttctatatcatcactgagttcatgacctacgggaacctcctggactacctgagggagtgcaaccggcaggaggtgaacgccgtggtgctgctgtacatggccactcagatctcgtcagccatggagtacctggagaagaaaaacttcatccacagagatcttgctgcccgaaactgcctggtaggggagaaccacttggtgaaggtagctgattttggcctgagcaggttgatgacaggggacacctacacagcccatgctggagccaagttccccatcaaatggactgcacccgagagcctggcctacaacaagttctccatcaagtccgacgtctgggcatttggagtattgctttgggaaattgctacctatggcatgtccccttacccgggaattgacctgtcccaggtgtatgagctgctagagaaggactaccgcatggagcgcccagaaggctgcccagagaaggtctatgaactcatgcgagcatgttggcagtggaatccctctgaccggccctcctttgctgaaatccaccaagcctttgaaacaatgttccaggaatccagtatctcagacgaagtggaaaaggagctggggaaacaaggcgtccgtggggctgtgagtaccttgctgcaggccccagagctgcccaccaagacgaggacctccaggagagctgcagagcacagagacaccactgacgtgcctgagatgcctcactccaagggccagggagagagcgatcctctggaccatgagcctgccgtgtctccattgctccctcgaaaagagcgaggtcccccggagggcggcctgaatgaagatgagcgccttctccccaaagacaaaaagaccaacttgttcagcgccttgatcaagaagaagaagaagacagccccaacccctcccaaacgcagcagctccttccgggagatggacggccagccggagcgcagaggggccggcgaggaagagggccgagacatcagcaacggggcactggctttcacccccttggacacagctgacccagccaagtccccaaagcccagcaatggggctggggtccccaatggagccctccgggagtccgggggctcaggcttccggtctccccacctgtggaagaagtccagcacgctgaccagcagccgcctagccaccggcgaggaggagggcggtggcagctccagcaagcgcttcctgcgctcttgctccgcctcctgcgttccccatggggccaaggacacggagtggaggtcagtcacgctgcctcgggacttgcagtccacgggaagacagtttgactcgtccacatttggagggcacaaaagtgagaagccggctctgcctcggaagagggcaggggagaacaggtctgaccaggtgacccgaggcacagtaacgcctccccccaggctggtgaaaaagaatgaggaagctgctgatgaggtcttcaaagacatcatggagtccagcccgggctccagcccgcccaacctgactccaaaacccctccggcggcaggtcaccgtggcccctgcctcgggcctcccccacaaggaagaagctggaaagggcagtgccttagggacccctgctgcagctgagccagtgacccccaccagcaaagcaggctcaggtgcaccagggggcaccagcaagggccccgccgaggagtccagagtgaggaggcacaagcactcctctgagtcgccagggagggacaaggggaaattgtccaggctcaaacctgccccgccgcccccaccagcagcctctgcagggaaggctggaggaaagccctcgcagagcccgagccaggaggcggccggggaggcagtcctgggcgcaaagacaaaagccacgagtctggttgatgctgtgaacagtgacgctgccaagcccagccagccgggagagggcctcaaaaagcccgtgctcccggccactccaaagccacagtccgccaagccgtcggggacccccatcagcccagcccccgttccctccacgttgccatcagcatcctcggccctggcaggggaccagccgtcttccaccgccttcatccctctcatatcaacccgagtgtctcttcggaaaacccgccagcctccagagcggatcgccagcggcgccatcaccaagggcgtggtcctggacagcaccgaggcgctgtgcctcgccatctctaggaactccgagcagatggccagccacagcgcagtgctggaggccggcaaaaacctctacacgttctgcgtgagctatgtggattccatccagcaaatgaggaacaagtttgccttccgagaggccatcaacaaactggagaataatctccgggagcttcagatctgcccggcgacagcaggcagtggtccagcggccactcaggacttcagcaagctcctcagttcggtgaaggaaatcagtgacatagtgcagaggtagcagcagtcaggggtcaggtgtcaggcccgtcggagctgcctgcagcacatgcgggctcgcccatacccgtgacagtggctgacaagggactagtgagtcagcaccttggcccaggagctctgcgccaggcagagctgagggccctgtggagtccagctctactacctacgtttgcaccgcctgccctcccgcaccttcctcctccccgctccgtctctgtcctcgaattttatctgtggagttcctgctccgtggactgcagtcggcatgccaggacccgccagccccgctcccacctagtgccccagactgagctctccaggccaggtgggaacggctgatgtggactgtctttttcatttttttctctctggagcccctcctcccccggctgggcctccttcttccacttctccaagaatggaagcctgaactgaggccttgtgtgtcaggccctctgcctgcactccctggccttgcccgtcgtgtgctgaagacatgtttcaagaaccgcatttcgggaagggcatgcacgggcatgcacacggctggtcactctgccctctgctgctgcccggggtggggtgcactcgccatttcctcacgtgcaggacagctcttgatttgggtggaaaacagggtgctaaagccaaccagcctttgggtcctgggcaggtgggagctgaaaaggatcgaggcatggggcatgtcctttccatctgtccacatccccagagcccagctcttgctctcttgtgacgtgcactgtgaatcctggcaagaaagcttgagtctcaagggtggcaggtcactgtcactgccgacatccctcccccagcagaatggaggcaggggacaagggaggcagtggctagtggggtgaacagctggtgccaaatagccccagactgggcccaggcaggtctgcaagggcccagagtgaaccgtcctttcacacatctgggtgccctgaaagggcccttcccctcccccactcctctaagacaaagtagattcttacaaggccctttcctttggaacaagacagccttcacttttctgagttcttgaagcatttcaaagccctgcctctgtgtagccgccctgagagagaatagagctgccactgggcacctgcgcacaggtgggaggaaagggcctggccagtcctggtcctggctgcactcttgaactgggcgaatgtcttatttaattaccgtgagtgacatagcctcatgttctgtgggggtcatcagggagggttaggaaaaccacaaacggagcccctgaaagcctcacgtatttcacagagcacgcctgccatcttctccccgaggctgccccaggccggagcccagatacgggggctgtgactctgggcagggacccggggtctcctggaccttgacagagcagctaactccgagagcagtgggcaggtggccgcccctgaggcttcacgccgggagaagccaccttcccaccccttcataccgcctcgtgccagcagcctcgcacaggccctagctttacgctcatcacctaaacttgtactttatttttctgatagaaatggtttcctctggatcgttttatgcggttcttacagcacatcacctctttgcccccgacggctgtgacgcagccggagggaggcactagtcaccgacagcggccttgaagacagagcaaagcgcccacccaggtcccccgactgcctgtctccatgaggtactggtcccttccttttgttaacgtgatgtgccactatattttacacgtatctcttggtatgcatcttttatagacgctcttttctaagtggcgtgtgcatagcgtcctgccctgccccctcgggggcctgtggtggctccccctctgcttctcggggtccagtgcattttgtttctgtatatgattctctgtggttttttttgaatccaaatctgtcctctgtagtattttttaaataaatcagtgtttacattagaa

SEQ ID NO: 331854 - DNA, 6782 bp, Homo sapiens
gccccgcgcgcagcccggcggcgcaggtaaggccggccgcgccatggtggacccggtgggcttcgcggaggcgtggaaggcgcagttcccggactcagagcccccgcgcatggagctgcgctcagtgggcgacatcgagcaggagctggagcgctgcaaggcctccattcggcgcctggagcaggaggtgaactaggagcgcttccgcatgatctacctgcagacgttgctggccaaggaaaagaagagctatgaccggcagcgatggggcttccggcgcgcggcgcaggcccccgacggcgcctccgagccccgagcgtccgcgtcgcgcccgcagccagcgcccgccgacggagccgacccgccgcccgccgaggagcccgaggcccggcccgacggcgagggttctccgggtaaggccaggcccgggaccgcccgcaggcccggggcagccgcgtcgggggaacgggacgaccggggaccccccgccagcgtggcggcgctcaggtccaacttcgagcggatccgcaagggccatggccagcccggggcggacgccgagaagcccttctacgtgaacgtcgagtttcaccacgagcgcggcctggtgaaggtcaacgacaaagaggtgtcggaccgcatcagctccctgggcagccaggccatgcagatggagcgcaaaaagtcccagcacggcgcgggctcgagcgtgggggatgcatccaggcccccttaccggggacgctcctcggagagcagctgcggcgtcgacggcgactacgaggacgccgagttgaacccccgcttcctgaaggacaacctgatcgacgccaatggcggtagcaggcccccttggccgcccctggagtaccagccctaccagagcatctacgtcgggggcatgatggaaggggagggcaagggcccgctcctgcgcagccagagcacctctgagcaggagaagcgccttacctggccccgcaggtcctactccccccggagttttgaggattgcggaggcggctataccccggactgcagctccaatgagaacctcacctccagcgaggaggacttctcctctggccagtccagccgcgtgtccccaagccccaccacctaccgcatgttccgggacaaaagccgctctccctcgcagaactcgcaacagtccttcgacagcagcagtccccccacgccgcagtgccataagcggcaccggcactgcccggttgtcgtgtccgaggccaccatcgtgggcgtccgcaagaccgggcagatctggcccaacgatggcgagggcgccttccatggagacgcagaagcccttcagcggccagtagcatctgactttgagcctcagggtctgagtgaagccgctcgttggaactccaaggaaaaccttctcgctggacccagtgaaaatgaccccaaccttttcgttgcactgtatgattttgtggccagtggagataacactctaagcataactaaaggtgaaaagctccgggtcttaggctataatcacaatggggaatggtgtgaagcccaaaccaaaaatggccaaggctgggtcccaagcaactacatcacgccagtcaacagtctggagaaacactcctggtaccatgggcctgtgtcccgcaatgccgctgagtatctgctgagcagcgggatcaatggcagcttcttggtgcgtgagagtgagagcagtcctggccagaggtccatctcgctgagatacgaagggagggtgtaccattacaggatcaacactgcttctgatggcaagctctacgtctcctccgagagccgcttcaacaccctggccgagttggttcatcatcattcaacggtggccgacgggctcatcaccacgctccattatccagccccaaagcgcaacaagcccactgtctatggtgtgtcccccaactacgacaagtgggagatggaacgcacggacatcaccatgaagcacaagctgggcgggggccagtacggggaggtgtacgagggcgtgtggaagaaatacagcctgacggtggccgtgaagaccttgaaggaggacaccatggaggtggaagagttcttgaaagaagctgcagtcatgaaagagatcaaacaccctaacctggtgcagctccttggggtctgcacccgggagcccccgttctatatcatcactgagttcatgacctacgggaacctcctggactacctgagggagtgcaaccggcaggaggtgaacgccgtggtgctgctgtacatggccactcagatctcgtcagccatggagtacctggagaagaaaaacttcatccacagagatcttgctgcccgaaactgcctggtaggggagaaccacttggtgaaggtagctgattttggcctgagcaggttgatgacaggggacacctacacagcccatgctggagccaagttccccatcaaatggactgcacccgagagcctggcctacaacaagttctccatcaagtccgacgtctgggcatttggagtattgctttgggaaattgctacctatggcatgtccccttacccgggaattgacctgtcccaggtgtatgagctgctagagaaggactaccgcatggagcgcccagaaggctgcccagagaaggtctatgaactcatgcgagcatgttggcagtggaatccctctgaccggccctcctttgctgaaatccaccaagcctttgaaacaatgttccaggaatccagtatctcagacgaagtggaaaaggagctggggaaacaaggcgtccgtggggctgtgagtaccttgctgcaggccccagagctgcccaccaagacgaggacctccaggagagctgcagagcacagagacaccactgacgtgcctgagatgcctcactccaagggccagggagagagcgatcctctggaccatgagcctgccgtgtctccattgctccctcgaaaagagcgaggtcccccggagggcggcctgaatgaagatgagcgccttctccccaaagacaaaaagaccaacttgttcagcgccttgatcaagaagaagaagaagacagccccaacccctcccaaacgcagcagctccttccgggagatggacggccagccggagcgcagaggggccggcgaggaagagggccgagacatcagcaacggggcactggctttcacccccttggacacagctgacccagccaagtccccaaagcccagcaatggggctggggtccccaatggagccctccgggagtccgggggctcaggcttccggtctccccacctgtggaagaagtccagcacgctgaccagcagccgcctagccaccggcgaggaggagggcggtggcagctccagcaagcgcttcctgcgctcttgctccgcctcctgcgttccccatggggccaaggacacggagtggaggtcagtcacgctgcctcgggacttgcagtccacgggaagacagtttgactcgtccacatttggagggcacaaaagtgagaagccggctctgcctcggaagagggcaggggagaacaggtctgaccaggtgacccgaggcacagtaacgcctccccccaggctggtgaaaaagaatgaggaagctgctgatgaggtcttcaaagacatcatggagtccagcccgggctccagcccgcccaacctgactccaaaacccctccggcggcaggtcaccgtggcccctgcctcgggcctcccccacaaggaagaagctggaaagggcagtgccttagggacccctgctgcagctgagccagtgacccccaccagcaaagcaggctcaggtgcaccagggggcaccagcaagggccccgccgaggagtccagagtgaggaggcacaagcactcctctgagtcgccagggagggacaaggggaaattgtccaggctcaaacctgccccgccgcccccaccagcagcctctgcagggaaggctggaggaaagccctcgcagagcccgagccaggaggcggccggggaggcagtcctgggcgcaaagacaaaagccacgagtctggttgatgctgtgaacagtgacgctgccaagcccagccagccgggagagggcctcaaaaagcccgtgctcccggccactccaaagccacagtccgccaagccgtcggggacccccatcagcccagcccccgttccctccacgttgccatcagcatcctcggccctggcaggggaccagccgtcttccaccgccttcatccctctcatatcaacccgagtgtctcttcggaaaacccgccagcctccagagcggatcgccagcggcgccatcaccaagggcgtggtcctggacagcaccgaggcgctgtgcctcgccatctctaggaactccgagcagatggccagccacagcgcagtgctggaggccggcaaaaacctctacacgttctgcgtgagctatgtggattccatccagcaaatgaggaacaagtttgccttccgagaggccatcaacaaactggagaataatctccgggagcttcagatctgcccggcgacagcaggcagtggtccagcggccactcaggacttcagcaagctcctcagttcggtgaaggaaatcagtgacatagtgcagaggtagcagcagtcaggggtcaggtgtcaggcccgtcggagctgcctgcagcacatgcgggctcgcccatacccgtgacagtggctgacaagggactagtgagtcagcaccttggcccaggagctctgcgccaggcagagctgagggccctgtggagtccagctctactacctacgtttgcaccgcctgccctcccgcaccttcctcctccccgctccgtctctgtcctcgaattttatctgtggagttcctgctccgtggactgcagtcggcatgccaggacccgccagccccgctcccacctagtgccccagactgagctctccaggccaggtgggaacggctgatgtggactgtctttttcatttttttctctctggagcccctcctcccccggctgggcctccttcttccacttctccaagaatggaagcctgaactgaggccttgtgtgtcaggccctctgcctgcactccctggccttgcccgtcgtgtgctgaagacatgtttcaagaaccgcatttcgggaagggcatgcacgggcatgcacacggctggtcactctgccctctgctgctgcccggggtggggtgcactcgccatttcctcacgtgcaggacagctcttgatttgggtggaaaacagggtgctaaagccaaccagcctttgggtcctgggcaggtgggagctgaaaaggatcgaggcatggggcatgtcctttccatctgtccacatccccagagcccagctcttgctctcttgtgacgtgcactgtgaatcctggcaagaaagcttgagtctcaagggtggcaggtcactgtcactgccgacatccctcccccagcagaatggaggcaggggacaagggaggcagtggctagtggggtgaacagctggtgccaaatagccccagactgggcccaggcaggtctgcaagggcccagagtgaaccgtcctttcacacatctgggtgccctgaaagggcccttcccctcccccactcctctaagacaaagtagattcttacaaggccctttcctttggaacaagacagccttcacttttctgagttcttgaagcatttcaaagccctgcctctgtgtagccgccctgagagagaatagagctgccactgggcacctgcgcacaggtgggaggaaagggcctggccagtcctggtcctggctgcactcttgaactgggcgaatgtcttatttaattaccgtgagtgacatagcctcatgttctgtgggggtcatcagggagggttaggaaaaccacaaacggagcccctgaaagcctcacgtatttcacagagcacgcctgccatcttctccccgaggctgccccaggccggagcccagatacgggggctgtgactctgggcagggacccggggtctcctggaccttgacagagcagctaactccgagagcagtgggcaggtggccgcccctgaggcttcacgccgggagaagccaccttcccaccccttcataccgcctcgtgccagcagcctcgcacaggccctagctttacgctcatcacctaaacttgtactttatttttctgatagaaatggtttcctctggatcgttttatgcggttcttacagcacatcacctctttgcccccgacggctgtgacgcagccggagggaggcactagtcaccgacagcggccttgaagacagagcaaagcgcccacccaggtcccccgactgcctgtctccatgaggtactggtcccttccttttgttaacgtgatgtgccactatattttacacgtatctcttggtatgcatcttttatagacgctcttttctaagtggcgtgtgcatagcgtcctgccctgccccctcgggggcctgtggtggctccccctctgcttctcggggtccagtgcattttgtttctgtatatgattctctgtggttttttttgaatccaaatctgtcctctgtagtattttttaaataaatcagtgtttacattagaaacaacaacacaaagaagcccgagggcccaaaagccgggcgcgcgacaagagggcaacgaacggccctggccaagcgggtccctgacccaaggctggcacaagggagaccgcggcccctaaaggacgcgatattcgaaagccggtaaccgtaggg

SEQ ID NO: 331855 - DNA, 6454 bp, Homo sapiens
gccccgcgcgcagcccggcggcgcaggtaaggccggccgcgccatggtggacccggtgggcttcgcggaggcgtggaaggcgcagttcccggactcagagcccccgcgcatggagctgcgctcagtgggcgacatcgagcaggagctggagcgctgcaaggcctccattcggcgcctggagcaggaggtgaactaggagcgcttccgcatgatctacctgcagacgttgctggccaaggaaaagaagagctatgaccggcagcgatggggcttccggcgcgcggcgcaggcccccgacggcgcctccgagccccgagcgtccgcgtcgcgcccgcagccagcgcccgccgacggagccgacccgccgcccgccgaggagcccgaggcccggcccgacggcgagggttctccgggtaaggccaggcccgggaccgcccgcaggcccggggcagccgcgtcgggggaacgggacgaccggggaccccccgccagcgtggcggcgctcaggtccaacttcgagcggatccgcaagggccatggccagcccggggcggacgccgagaagcccttctacgtgaacgtcgagtttcaccacgagcgcggcctggtgaaggtcaacgacaaagaggtgtcggaccgcatcagctccctgggcagccaggccatgcagatggagcgcaaaaagtcccagcacggcgcgggctcgagcgtgggggatgcatccaggcccccttaccggggacgctcctcggagagcagctgcggcgtcgacggcgactacgaggacgccgagttgaacccccgcttcctgaaggacaacctgatcgacgccaatggcggtagcaggcccccttggccgcccctggagtaccagccctaccagagcatctacgtcgggggcatgatggaaggggagggcaagggcccgctcctgcgcagccagagcacctctgagcaggagaagcgccttacctggccccgcaggtcctactccccccggagttttgaggattgcggaggcggctataccccggactgcagctccaatgagaacctcacctccagcgaggaggacttctcctctggccagtccagccgcgtgtccccaagccccaccacctaccgcatgttccgggacaaaagccgctctccctcgcagaactcgcaacagtccttcgacagcagcagtccccccacgccgcagtgccataagcggcaccggcactgcccggttgtcgtgtccgaggccaccatcgtgggcgtccgcaagaccgggcagatctggcccaacgatggcgagggcgccttccatggagacgcaggtgaaaagctccgggtcttaggctataatcacaatggggaatggtgtgaagcccaaaccaaaaatggccaaggctgggtcccaagcaactacatcacgccagtcaacagtctggagaaacactcctggtaccatgggcctgtgtcccgcaatgccgctgagtatctgctgagcagcgggatcaatggcagcttcttggtgcgtgagagtgagagcagtcctggccagaggtccatctcgctgagatacgaagggagggtgtaccattacaggatcaacactgcttctgatggcaagctctacgtctcctccgagagccgcttcaacaccctggccgagttggttcatcatcattcaacggtggccgacgggctcatcaccacgctccattatccagccccaaagcgcaacaagcccactgtctatggtgtgtcccccaactacgacaagtgggagatggaacgcacggacatcaccatgaagcacaagctgggcgggggccagtacggggaggtgtacgagggcgtgtggaagaaatacagcctgacggtggccgtgaagaccttgaaggaggacaccatggaggtggaagagttcttgaaagaagctgcagtcatgaaagagatcaaacaccctaacctggtgcagctccttggggtctgcacccgggagcccccgttctatatcatcactgagttcatgacctacgggaacctcctggactacctgagggagtgcaaccggcaggaggtgaacgccgtggtgctgctgtacatggccactcagatctcgtcagccatggagtacctggagaagaaaaacttcatccacagagatcttgctgcccgaaactgcctggtaggggagaaccacttggtgaaggtagctgattttggcctgagcaggttgatgacaggggacacctacacagcccatgctggagccaagttccccatcaaatggactgcacccgagagcctggcctacaacaagttctccatcaagtccgacgtctgggcatttggagtattgctttgggaaattgctacctatggcatgtccccttacccgggaattgacctgtcccaggtgtatgagctgctagagaaggactaccgcatggagcgcccagaaggctgcccagagaaggtctatgaactcatgcgagcatgttggcagtggaatccctctgaccggccctcctttgctgaaatccaccaagcctttgaaacaatgttccaggaatccagtatctcagacgaagtggaaaaggagctggggaaacaaggcgtccgtggggctgtgagtaccttgctgcaggccccagagctgcccaccaagacgaggacctccaggagagctgcagagcacagagacaccactgacgtgcctgagatgcctcactccaagggccagggagagagcgatcctctggaccatgagcctgccgtgtctccattgctccctcgaaaagagcgaggtcccccggagggcggcctgaatgaagatgagcgccttctccccaaagacaaaaagaccaacttgttcagcgccttgatcaagaagaagaagaagacagccccaacccctcccaaacgcagcagctccttccgggagatggacggccagccggagcgcagaggggccggcgaggaagagggccgagacatcagcaacggggcactggctttcacccccttggacacagctgacccagccaagtccccaaagcccagcaatggggctggggtccccaatggagccctccgggagtccgggggctcaggcttccggtctccccacctgtggaagaagtccagcacgctgaccagcagccgcctagccaccggcgaggaggagggcggtggcagctccagcaagcgcttcctgcgctcttgctccgcctcctgcgttccccatggggccaaggacacggagtggaggtcagtcacgctgcctcgggacttgcagtccacgggaagacagtttgactcgtccacatttggagggcacaaaagtgagaagccggctctgcctcggaagagggcaggggagaacaggtctgaccaggtgacccgaggcacagtaacgcctccccccaggctggtgaaaaagaatgaggaagctgctgatgaggtcttcaaagacatcatggagtccagcccgggctccagcccgcccaacctgactccaaaacccctccggcggcaggtcaccgtggcccctgcctcgggcctcccccacaaggaagaagctggaaagggcagtgccttagggacccctgctgcagctgagccagtgacccccaccagcaaagcaggctcaggtgcaccagggggcaccagcaagggccccgccgaggagtccagagtgaggaggcacaagcactcctctgagtcgccagggagggacaaggggaaattgtccaggctcaaacctgccccgccgcccccaccagcagcctctgcagggaaggctggaggaaagccctcgcagagcccgagccaggaggcggccggggaggcagtcctgggcgcaaagacaaaagccacgagtctggttgatgctgtgaacagtgacgctgccaagcccagccagccgggagagggcctcaaaaagcccgtgctcccggccactccaaagccacagtccgccaagccgtcggggacccccatcagcccagcccccgttccctccacgttgccatcagcatcctcggccctggcaggggaccagccgtcttccaccgccttcatccctctcatatcaacccgagtgtctcttcggaaaacccgccagcctccagagcggatcgccagcggcgccatcaccaagggcgtggtcctggacagcaccgaggcgctgtgcctcgccatctctaggaactccgagcagatggccagccacagcgcagtgctggaggccggcaaaaacctctacacgttctgcgtgagctatgtggattccatccagcaaatgaggaacaagtttgccttccgagaggccatcaacaaactggagaataatctccgggagcttcagatctgcccggcgacagcaggcagtggtccagcggccactcaggacttcagcaagctcctcagttcggtgaaggaaatcagtgacatagtgcagaggtagcagcagtcaggggtcaggtgtcaggcccgtcggagctgcctgcagcacatgcgggctcgcccatacccgtgacagtggctgacaagggactagtgagtcagcaccttggcccaggagctctgcgccaggcagagctgagggccctgtggagtccagctctactacctacgtttgcaccgcctgccctcccgcaccttcctcctccccgctccgtctctgtcctcgaattttatctgtggagttcctgctccgtggactgcagtcggcatgccaggacccgccagccccgctcccacctagtgccccagactgagctctccaggccaggtgggaacggctgatgtggactgtctttttcatttttttctctctggagcccctcctcccccggctgggcctccttcttccacttctccaagaatggaagcctgaactgaggccttgtgtgtcaggccctctgcctgcactccctggccttgcccgtcgtgtgctgaagacatgtttcaagaaccgcatttcgggaagggcatgcacgggcatgcacacggctggtcactctgccctctgctgctgcccggggtggggtgcactcgccatttcctcacgtgcaggacagctcttgatttgggtggaaaacagggtgctaaagccaaccagcctttgggtcctgggcaggtgggagctgaaaaggatcgaggcatggggcatgtcctttccatctgtccacatccccagagcccagctcttgctctcttgtgacgtgcactgtgaatcctggcaagaaagcttgagtctcaagggtggcaggtcactgtcactgccgacatccctcccccagcagaatggaggcaggggacaagggaggcagtggctagtggggtgaacagctggtgccaaatagccccagactgggcccaggcaggtctgcaagggcccagagtgaaccgtcctttcacacatctgggtgccctgaaagggcccttcccctcccccactcctctaagacaaagtagattcttacaaggccctttcctttggaacaagacagccttcacttttctgagttcttgaagcatttcaaagccctgcctctgtgtagccgccctgagagagaatagagctgccactgggcacctgcgcacaggtgggaggaaagggcctggccagtcctggtcctggctgcactcttgaactgggcgaatgtcttatttaattaccgtgagtgacatagcctcatgttctgtgggggtcatcagggagggttaggaaaaccacaaacggagcccctgaaagcctcacgtatttcacagagcacgcctgccatcttctccccgaggctgccccaggccggagcccagatacgggggctgtgactctgggcagggacccggggtctcctggaccttgacagagcagctaactccgagagcagtgggcaggtggccgcccctgaggcttcacgccgggagaagccaccttcccaccccttcataccgcctcgtgccagcagcctcgcacaggccctagctttacgctcatcacctaaacttgtactttatttttctgatagaaatggtttcctctggatcgttttatgcggttcttacagcacatcacctctttgcccccgacggctgtgacgcagccggagggaggcactagtcaccgacagcggccttgaagacagagcaaagcgcccacccaggtcccccgactgcctgtctccatgaggtactggtcccttccttttgttaacgtgatgtgccactatattttacacgtatctcttggtatgcatcttttatagacgctcttttctaagtggcgtgtgcatagcgtcctgccctgccccctcgggggcctgtggtggctccccctctgcttctcggggtccagtgcattttgtttctgtatatgattctctgtggttttttttgaatccaaatctgtcctctgtagtattttttaaataaatcagtgtttacattagaa

SEQ ID NO: 331856 - DNA, 4318 bp, Homo sapiens
cttcagactttgataaccgtgaagaaagaacaagatagaaggtgagctgtttggcttagtaattttctacacctactagagcgggactgggaaaaatatatttgtaaatgcagttcttgctgtcactgtctctctggggttttacaatccatattcctgccagcatctaacgtcttttcaaattcttaatgtctataacaggacatgatgacattcatcgttttgacttgttgcagcaaaagatggttagcaggattggaatgttgctttcattctagacttttccttgagaactgctagccccgtattgctagccagatctcatggatgatctgacttgggtttcatctgtccaggttggcagtggaatccctctgaccggccctcctttgctgaaatccaccaagcctttgaaacaatgttccaggaatccagtatctcagacgaagtggaaaaggagctggggaaacaaggcgtccgtggggctgtgagtaccttgctgcaggccccagagctgcccaccaagacgaggacctccaggagagctgcagagcacagagacaccactgacgtgcctgagatgcctcactccaagggccagggagagagcgatcctctggaccatgagcctgccgtgtctccattgctccctcgaaaagagcgaggtcccccggagggcggcctgaatgaagatgagcgccttctccccaaagacaaaaagaccaacttgttcagcgccttgatcaagaagaagaagaagacagccccaacccctcccaaacgcagcagctccttccgggagatggacggccagccggagcgcagaggggccggcgaggaagagggccgagacatcagcaacggggcactggctttcacccccttggacacagctgacccagccaagtccccaaagcccagcaatggggctggggtccccaatggagccctccgggagtccgggggctcaggcttccggtctccccacctgtggaagaagtccagcacgctgaccagcagccgcctagccaccggcgaggaggagggcggtggcagctccagcaagcgcttcctgcgctcttgctccgcctcctgcgttccccatggggccaaggacacggagtggaggtcagtcacgctgcctcgggacttgcagtccacgggaagacagtttgactcgtccacatttggagggcacaaaagtgagaagccggctctgcctcggaagagggcaggggagaacaggtctgaccaggtgacccgaggcacagtaacgcctccccccaggctggtgaaaaagaatgaggaagctgctgatgaggtcttcaaagacatcatggagtccagcccgggctccagcccgcccaacctgactccaaaacccctccggcggcaggtcaccgtggcccctgcctcgggcctcccccacaaggaagaagctggaaagggcagtgccttagggacccctgctgcagctgagccagtgacccccaccagcaaagcaggctcaggtgcaccagggggcaccagcaagggccccgccgaggagtccagagtgaggaggcacaagcactcctctgagtcgccagggagggacaaggggaaattgtccaggctcaaacctgccccgccgcccccaccagcagcctctgcagggaaggctggaggaaagccctcgcagagcccgagccaggaggcggccggggaggcagtcctgggcgcaaagacaaaagccacgagtctggttgatgctgtgaacagtgacgctgccaagcccagccagccgggagagggcctcaaaaagcccgtgctcccggccactccaaagccacagtccgccaagccgtcggggacccccatcagcccagcccccgttccctccacgttgccatcagcatcctcggccctggcaggggaccagccgtcttccaccgccttcatccctctcatatcaacccgagtgtctcttcggaaaacccgccagcctccagagcggatcgccagcggcgccatcaccaagggcgtggtcctggacagcaccgaggcgctgtgcctcgccatctctaggaactccgagcagatggccagccacagcgcagtgctggaggccggcaaaaacctctacacgttctgcgtgagctatgtggattccatccagcaaatgaggaacaagtttgccttccgagaggccatcaacaaactggagaataatctccgggagcttcagatctgcccggcgacagcaggcagtggtccagcggccactcaggacttcagcaagctcctcagttcggtgaaggaaatcagtgacatagtgcagaggtagcagcagtcaggggtcaggtgtcaggcccgtcggagctgcctgcagcacatgcgggctcgcccatacccgtgacagtggctgacaagggactagtgagtcagcaccttggcccaggagctctgcgccaggcagagctgagggccctgtggagtccagctctactacctacgtttgcaccgcctgccctcccgcaccttcctcctccccgctccgtctctgtcctcgaattttatctgtggagttcctgctccgtggactgcagtcggcatgccaggacccgccagccccgctcccacctagtgccccagactgagctctccaggccaggtgggaacggctgatgtggactgtctttttcatttttttctctctggagcccctcctcccccggctgggcctccttcttccacttctccaagaatggaagcctgaactgaggccttgtgtgtcaggccctctgcctgcactccctggccttgcccgtcgtgtgctgaagacatgtttcaagaaccgcatttcgggaagggcatgcacgggcatgcacacggctggtcactctgccctctgctgctgcccggggtggggtgcactcgccatttcctcacgtgcaggacagctcttgatttgggtggaaaacagggtgctaaagccaaccagcctttgggtcctgggcaggtgggagctgaaaaggatcgaggcatggggcatgtcctttccatctgtccacatccccagagcccagctcttgctctcttgtgacgtgcactgtgaatcctggcaagaaagcttgagtctcaagggtggcaggtcactgtcactgccgacatccctcccccagcagaatggaggcaggggacaagggaggcagtggctagtggggtgaacagctggtgccaaatagccccagactgggcccaggcaggtctgcaagggcccagagtgaaccgtcctttcacacatctgggtgccctgaaagggcccttcccctcccccactcctctaagacaaagtagattcttacaaggccctttcctttggaacaagacagccttcacttttctgagttcttgaagcatttcaaagccctgcctctgtgtagccgccctgagagagaatagagctgccactgggcacctgcgcacaggtgggaggaaagggcctggccagtcctggtcctggctgcactcttgaactgggcgaatgtcttatttaattaccgtgagtgacatagcctcatgttctgtgggggtcatcagggagggttaggaaaaccacaaacggagcccctgaaagcctcacgtatttcacagagcacgcctgccatcttctccccgaggctgccccaggccggagcccagatacgggggctgtgactctgggcagggacccggggtctcctggaccttgacagagcagctaactccgagagcagtgggcaggtggccgcccctgaggcttcacgccgggagaagccaccttcccaccccttcataccgcctcgtgccagcagcctcgcacaggccctagctttacgctcatcacctaaacttgtactttatttttctgatagaaatggtttcctctggatcgttttatgcggttcttacagcacatcacctctttgcccccgacggctgtgacgcagccggagggaggcactagtcaccgacagcggccttgaagacagagcaaagcgcccacccaggtcccccgactgcctgtctccatgaggtactggtcccttccttttgttaacgtgatgtgccactatattttacacgtatctcttggtatgcatcttttatagacgctcttttctaagtggcgtgtgcatagcgtcctgccctgccccctcgggggcctgtggtggctccccctctgcttctcggggtccagtgcattttgtttctgtatatgattctctgtggttttttttgaatccaaatctgtcctctgtagtattttttaaataaatcagtgtttacattagaa

SEQ ID NO: 331857 - DNA, 2307 bp, Homo sapiens
gccccgcgcgcagcccggcggcgcaggtaaggccggccgcgccatggtggacccggtgggcttcgcggaggcgtggaaggcgcagttcccggactcagagcccccgcgcatggagctgcgctcagtgggcgacatcgagcaggagctggagcgctgcaaggcctccattcggcgcctggagcaggaggtgaactaggagcgcttccgcatgatctacctgcagacgttgctggccaaggaaaagaagagctatgaccggcagcgatggggcttccggcgcgcggcgcaggcccccgacggcgcctccgagccccgagcgtccgcgtcgcgcccgcagccagcgcccgccgacggagccgacccgccgcccgccgaggagcccgaggcccggcccgacggcgagggttctccgggtaaggccaggcccgggaccgcccgcaggcccggggcagccgcgtcgggggaacgggacgaccggggaccccccgccagcgtggcggcgctcaggtccaacttcgagcggatccgcaagggccatggccagcccggggcggacgccgagaagcccttctacgtgaacgtcgagtttcaccacgagcgcggcctggtgaaggtcaacgacaaagaggtgtcggaccgcatcagctccctgggcagccaggccatgcagatggagcgcaaaaagtcccagcacggcgcgggctcgagcgtgggggatgcatccaggcccccttaccggggacgctcctcggagagcagctgcggcgtcgacggcgactacgaggacgccgagttgaacccccgcttcctgaaggacaacctgatcgacgccaatggcggtagcaggcccccttggccgcccctggagtaccagccctaccagagcatctacgtcgggggcatgatggaaggggagggcaagggcccgctcctgcgcagccagagcacctctgagcaggagaagcgccttacctggccccgcaggtcctactccccccggagttttgaggattgcggaggcggctataccccggactgcagctccaatgagaacctcacctccagcgaggaggacttctcctctggccagtccagccgcgtgtccccaagccccaccacctaccgcatgttccgggacaaaagccgctctccctcgcagaactcgcaacagtccttcgacagcagcagtccccccacgccgcagtgccataagcggcaccggcactgcccggttgtcgtgtccgaggccaccatcgtgggcgtccgcaagaccgggcagatctggcccaacgatggcgagggcgccttccatggagacgcagaagcccttcagcggccagtagcatctgactttgagcctcagggtctgagtgaagccgctcgttggaactccaaggaaaaccttctcgctggacccagtgaaaatgaccccaaccttttcgttgcactgtatgattttgtggccagtggagataacactctaagcataactaaaggtgaaaagctccgggtcttaggctataatcacaatggggaatggtgtgaagcccaaaccaaaaatggccaaggctgggtcccaagcaactacatcacgccagtcaacagtctggagaaacactcctggtaccatgggcctgtgtcccgcaatgccgctgagtatctgctgagcagcgggatcaatggcagcttcttggtgcgtgagagtgagagcagtcctggccagaggtccatctcgctgagatacgaagggagggtgtaccattacaggatcaacactgcttctgatggcaagctctacgtctcctccgagagccgcttcaacaccctggccgagttggttcatcatcattcaacggtggccgacgggctcatcaccacgctccattatccagccccaaagcgcaacaagcccactgtctatggtgtgtcccccaactacgacaagtgggagatggaacgcacggacatcaccattagtcaccgacagcggccttgaagacagagcaaagcgcccacccaggtcccccgactgcctgtctccatgaggtactggtcccttccttttgttaacgtgatgtgccactatattttacacgtatctcttggtatgcatcttttatagacgctcttttctaagtggcgtgtgcatagcgtcctgccctgccccctcgggggcctgtggtggctccccctctgcttctcggggtccagtgcattttgtttctgtatatgattctctgtggttttttttgaatccaaatctgtcctctgtagtattttttaaataaatcagtgtttacattagaa

SEQ ID NO: 331858 - DNA, 260 bp, Homo sapiens
tccccacaaaaaacatcttaaaataacgtagtgaaccaattttctgataggtaatgtactaggtctcttctaattagcactaagtttcagtagcacaaatataaattttgtgactacataatgaaaatactggctcaatttttagaccacagaaatcttaatgagaagttaaaaacaaaaaccagaactacttcaggaaaagtgttttacaattagtgtgccttcttttttgtttttttttttttctttttgagacggag

SEQ ID NO: 331859 - DNA, 219 bp, Homo sapiens
ccttggccctctagggtgggggacattagttggggttttcccatatctccattttctttggaagggaattgagggaaagcccttggtattgtattttcattcccccgaccgtgtactctctattagcagaaattcttcagaatctaagccacgtcaatgatactcgactacaggacttttactatttgattcttattgttgggatttgtagattatgat

SEQ ID NO: 331860 - DNA, 355 bp, Homo sapiens
tctgagcttgcagctttttggtgtggcttgagggctgttgagtgagctgttttagtcctttttagtctttgtttagtcctgggggagtggggaaggcttgggcatggccccgttggaggttgatttgctgttttgtttcttgtctttgtgttctgtggtacttgctgagagaaaagaaaagtgagccaagcagaaggaggtgggaaaacggacccaaaccccagtgtgccctgccccatgcctttcctttagtggtgggaaacccttatcttgcaaagtgaatgtgtccccttccccaccctctagtgtatttcacagaaaacaaaacctcccaataaaacggttgaaacctgaa

SEQ ID NO: 331861 - DNA, 2270 bp, Homo sapiens
gatgatgtcagggcggtgctggtgttgaagtcgtgcaggggcggtggtggagtgaggagttggactggccggcgtgttagcaggtgaaggaggaggaggagccgagcgggcgctggcaccgaggcctgaccatggacgaggaatacgatgtgatcgtgctggggaccggtctcaccgaatgcatcctgtcgggcatcatgtctgtgaacgggaagaaggtgctgcacatggaccggaacccctactacgggggcgagagctcctccatcacacccctggaggagctgtataagcgttttcagttgctggaggggccccctgagtcgatgggccgaggccgagactggaatgttgacctgattcccaaattcctcatggctaacgggcagctggtaaagatgctactgtatacagaggtgactcgctacctggacttcaaggtggtggagggcagctttgtctacaaggggggcaagatctacaaagtgccgtccactgagactgaggccttggcttccaatctgatgggcatgtttgagaaacggcgcttccgcaagttcctggtgtttgtggcaaacttcgatgagaatgaccccaagacctttgagggcgttgacccccagactaccagcatgcgtgacgtctaccggaagtttgatctgggccaggatgtcatcgatttcactggccatgccctggcgctctaccgcactgatgactacctggaccagccctgccttgagaccgtcaaccgcatcaagttgtacagtgagtccctggcccggtatggcaagagcccatatttatacccgctctacggcttgggcgagctgccccagggttttgcaagattgagtgccatctatggggggacatatatgctgaacaaacctgtggatgacatcatcatggagaacggcaaggtggtgggcgtgaagtctgagggagaggtggcccgctgcaagcagctgatctgtgaccccagctacatcccggaccgtgtgcggaaggctggccaggttatccgcatcatctgtatccttagccaccccatcaagaacaccaacgacgccaactcctgccaaataatcatcccccagaaccaggtcaacaggaagtcagacatctacgtgtgcatgatctcctatgcacacaacgtggcggcccagggcaagtacatagctattgccagcactactgtggagaccacggaccctgaaaaggaggtggagccggctctggagctgttggagcccattgaccagaagtttgtggctatcagtgacttgtatgagcccattgatgatggttgtgagagccaggtgttctgttcctgctcctacgatgccaccacacactttgagacaacctgcaacgacatcaaagacatctacaaacgcatggctggcacggcctttgactttgagaacatgaagcgcaaacagaacgacgtctttggagaagctgagcagtgattgtggccgcccccagcccctgctgccccagcctgtgtctgttctcctcgagggctccagcatcctctgcttcccccaccacgttcccatcacccacctcattgatccactgaccaaatccttaaccctagcgatggcttgggagatggggggttggatagcatcctctttcttggcccttccttatcctaggaaaagagggttcctctccttgtgtgtgtctcttccccccacccctaattcttctgctctgtttgggaagacgtggaggaaaaggtgacttctgcccccaccgctcttacccccactgtagtggcctttggagatgcccccacctcccccccaccaactctcgcgtgttggagagaaggggccctcccagcacaaagttgcattcctcccccctaatttattctaatttattaactttgacccaccctttctgagcctgcagccttcccgtgtggcctgagggctgtcgagtgagctgccccagcccctcccagcccttgcccagcctgggggagtggggaaggcttgggcatggccccgttggaggttgatttgctgttttgtttcttgtctttgtgttctgtggtacttgctgagagaaaagaaaagtgagccaagcagaaggaggtgggaaaacggacccaaaccccagtgtgccctgccccatgcctttcctttagtggtgggaaacccttatcttgcaaagtgaatgtgtccccttccccaccctctagtgtatttcacagaaaacaaaacctcccaataaaacggttgaaacctgaa

SEQ ID NO: 331862 - DNA, 2793 bp, Homo sapiens
ttcctgggccgcagcaccggccgccggcccgccccgcccgccccgccccgcgcctctctagactctcggcgagcagcgtcgcccgcggagccgcgctggtgctgtggcccgggccctggcagccctcccgggaggcgagccggggaggcggtggcccctgccggttgcggcggggcgcgggaagaggcgggactctttgacgcggcggaggggtcgggcgacggccgacgcgccgccatctttggtccagtgcggtggcggcggcggcggtggcggcggcgactgctgcggtgaaggaggaggaggagccgagcgggcgctggcaccgaggcctgaccatggacgaggaatacgatgtgatcgtgctggggaccggtctcaccgaatgcatcctgtcgggcatcatgtctgtgaacgggaagaaggtgctgcacatggaccggaacccctactacgggggcgagagctcctccatcacacccctggaggagctgtataagcgttttcagttgctggaggggccccctgagtcgatgggccgaggccgagactggaatgttgacctgattcccaaattcctcatggctaacgggcagctggtaaagatgctactgtatacagaggtgactcgctacctggacttcaaggtggtggagggcagctttgtctacaaggggggcaagatctacaaagtgccgtccactgagactgaggccttggcttccaatctgatgggcatgtttgagaaacggcgcttccgcaagttcctggtgtttgtggcaaacttcgatgagaatgaccccaagacctttgagggcgttgacccccagactaccagcatgcgtgacgtctaccggaagtttgatctgggccaggatgtcatcgatttcactggccatgccctggcgctctaccgcactgatgactacctggaccagccctgccttgagaccgtcaaccgcatcaagttgtacagtgagtccctggcccggtatggcaagagcccatatttatacccgctctacggcttgggcgagctgccccagggttttgcaagattgagtgccatctatggggggacatatatgctgaacaaacctgtggatgacatcatcatggagaacggcaaggtggtgggcgtgaagtctgagggagaggtggcccgctgcaagcagctgatctgtgaccccagctacatcccggaccgtgtgcggaaggctggccaggttatccgcatcatctgtatccttagccaccccatcaagaacaccaacgacgccaactcctgccaaataatcatcccccagaaccaggtcaacaggaagtcaggtaggccgggcgctggtacagcttcctctagggtgttctctttggggttactctttttctccccatcagtgtgggagctccctgccttacctctctggaaaaaaatttgagccacattgtagccaccacaacttggagccctagggtttgggtggcctggactctttccctctgggagggtggcggcttggatgctacctgctctgcggggctggggaggggcagtcgggccagacttgtgtccagccactggaacccctctctgcgtatggccagcgcctctggcctgagttgacggagctcttcctgtggccagacatctacgtgtgcatgatctcctatgcacacaacgtggcggcccagggcaagtacatagctattgccagcactactgtggagaccacggaccctgaaaaggaggtggagccggctctggagctgttggagcccattgaccagaagtttgtggctatcagtgacttgtatgagcccattgatgatggttgtgagagccaggtgttctgttcctgctcctacgatgccaccacacactttgagacaacctgcaacgacatcaaagacatctacaaacgcatggctggcacggcctttgactttgagaacatgaagcgcaaacagaacgacgtctttggagaagctgagcagtgattgtggccgcccccagcccctgctgccccagcctgtgtctgttctcctcgagggctccagcatcctctgcttcccccaccacgttcccatcacccacctcattgatccactgaccaaatccttaaccctagcgatggcttgggagatggggggttggatagcatcctctttcttggcccttccttatcctaggaaaagagggttcctctccttgtgtgtgtctcttccccccacccctaattcttctgctctgtttgggaagacgtggaggaaaaggtgacttctgcccccaccgctcttacccccactgtagtggcctttggagatgcccccacctcccccccaccaactctcgcgtgttggagagaaggggccctcccagcacaaagttgcattcctcccccctaatttattctaatttattaactttgacccaccctttctgagcctgcagccttcccgtgtggcctgagggctgtcgagtgagctgccccagcccctcccagcccttgcccagcctgggggagtggggaaggcttgggcatggccccgttggaggttgatttgctgttttgtttcttgtctttgtgttctgtggtacttgctgagagaaaagaaaagtgagccaagcagaaggaggtgggaaaacggacccaaaccccagtgtgccctgccccatgcctttcctttagtggtgggaaacccttatcttgcaaagtgaatgtgtccccttccccaccctctagtgtatttcacagaaaacaaaacctcccaataaaacggttgaaacctgaa

SEQ ID NO: 331863 - DNA, 2566 bp, Homo sapiens
ttcctgggccgcagcaccggccgccggcccgccccgcccgccccgccccgcgcctctctagactctcggcgagcagcgtcgcccgcggagccgcgctggtgctgtggcccgggccctggcagccctcccgggaggcgagccggggaggcggtggcccctgccggttgcggcggggcgcgggaagaggcgggactctttgacgcggcggaggggtcgggcgacggccgacgcgccgccatctttggtccagtgcggtggcggcggcggcggtggcggcggcgactgctgcggtgaaggaggaggaggagccgagcgggcgctggcaccgaggcctgaccatggacgaggaatacgatgtgatcgtgctggggaccggtctcaccgaatgcatcctgtcgggcatcatgtctgtgaacgggaagaaggtgctgcacatggaccggaacccctactacgggggcgagagctcctccatcacacccctggaggagctgtataagcgttttcagttgctggaggggccccctgagtcgatgggccgaggccgagactggaatgttgacctgattcccaaattcctcatggctaacgggcagctggtaaagatgctactgtatacagaggtgactcgctacctggacttcaaggtggtggagggcagctttgtctacaaggggggcaagatctacaaagtgccgtccactgagactgaggccttggcttccaatctgatgggcatgtttgagaaacggcgcttccgcaagttcctggtgtttgtggcaaacttcgatgagaatgaccccaagacctttgagggcgttgacccccagactaccagcatgcgtgacgtctaccggaagtttgatctgggccaggatgtcatcgatttcactggccatgccctggcgctctaccgcactgatgactacctggaccagccctgccttgagaccgtcaaccgcatcaagttgtacagtgagtccctggcccggtatggcaagagcccatatttatacccgctctacggcttgggcgagctgccccagggttttgcaagattgagtgccatctatggggggacatatatgctgaacaaacctgtggatgacatcatcatggagaacggcaaggtggtgggcgtgaagtctgagggagaggtggcccgctgcaagcagctgatctgtgaccccagctacatcccggaccgtgtgcggaaggctggccaggttatccgcatcatctgtatccttagccaccccatcaagaacaccaacgacgccaactcctgccaaataatcatcccccagaaccaggtcaacaggaagtcagacatctacgtgtgcatgatctcctatgcacacaacgtggcggcccagggcaagtacatagctattgccagcactactgtggagaccacggaccctgaaaaggaggtggagccggctctggagctgttggagcccattgaccagaagtttgtggctatcagtgacttgtatgagcccattgatgatggttgtgagagccagaagcagctcgtcccagccctgggctcctggctgcccgcccaggatacctgtctgactcaccctgggcgctgggctctggctgtttccaggtgttctgttcctgctcctacgatgccaccacacactttgagacaacctgcaacgacatcaaagacatctacaaacgcatggctggcacggcctttgactttgagaacatgaagcgcaaacagaacgacgtctttggagaagctgagcagtgattgtggccgcccccagcccctgctgccccagcctgtgtctgttctcctcgagggctccagcatcctctgcttcccccaccacgttcccatcacccacctcattgatccactgaccaaatccttaaccctagcgatggcttgggagatggggggttggatagcatcctctttcttggcccttccttatcctaggaaaagagggttcctctccttgtgtgtgtctcttccccccacccctaattcttctgctctgtttgggaagacgtggaggaaaaggtgacttctgcccccaccgctcttacccccactgtagtggcctttggagatgcccccacctcccccccaccaactctcgcgtgttggagagaaggggccctcccagcacaaagttgcattcctcccccctaatttattctaatttattaactttgacccaccctttctgagcctgcagccttcccgtgtggcctgagggctgtcgagtgagctgccccagcccctcccagcccttgcccagcctgggggagtggggaaggcttgggcatggccccgttggaggttgatttgctgttttgtttcttgtctttgtgttctgtggtacttgctgagagaaaagaaaagtgagccaagcagaaggaggtgggaaaacggacccaaaccccagtgtgccctgccccatgcctttcctttagtggtgggaaacccttatcttgcaaagtgaatgtgtccccttccccaccctctagtgtatttcacagaaaacaaaacctcccaataaaacggttgaaacctgaa

SEQ ID NO: 331864 - DNA, 2336 bp, Homo sapiens
ttcctgggccgcagcaccggccgccggcccgccccgcccgccccgccccgcgcctctctagactctcggcgagcagcgtcgcccgcggagccgcgctggtgctgtggcccgggccctggcagccctcccgggaggcgagccggggaggcggtggcccctgccggttgcggcggggcgcgggaagaggcgggactctttgacgcggcggaggggtcgggcgacggccgacgcgccgccatctttggtccagtgcggtggcggcggcggcggtggcggcggcgactgctgcggtgaaggaggaggaggagccgagcgggcgctggcaccgaggcctgaccatggacgaggaatacgatgtgatcgtgctggggaccggtctcaccgaatgcatcctgtcgggcatcatgtctgtgaacgggaagaaggtgctgcacatggaccggaacccctactacgggggcgagagctcctccatcacacccctggaggagctgtataagcgttttcagttgctggaggggccccctgagtcgatgggccgaggccgagactggaatgttgacctgattcccaaattcctcatggctaacgggcagctggtaaagatgctactgtatacagaggtgactcgctacctggacttcaaggtggtggagggcagctttgtctacaaggggggcaagatctacaaagtgccgtccactgagactgaggccttggcttccaatctgatgggcatgtttgagaaacggcgcttccgcaagttcctggtgtttgtggcaaacttcgatgagaatgaccccaagacctttgagggcgttgacccccagactaccagcatgcgtgacgtctaccggaagtttgatctgggccaggatgtcatcgatttcactggccatgccctggcgctctaccgcactgatgactacctggaccagccctgccttgagaccgtcaaccgcatcaagttgtacagtgagtccctggcccggtatggcaagagcccatatttatacccgctctacggcttgggcgagctgccccagggttttgcaagattgagtgccatctatggggggacatatatgctgaacaaacctgtggatgacatcatcatggagaacggcaaggtggtgggcgtgaagtctgagggagaggtggcccgctgcaagcagctgatctgtgaccccagctacatcccggaccgtgtgcggaaggctggccaggttatccgcatcatctgtatccttagccaccccatcaagaacaccaacgacgccaactcctgccaaataatcatcccccagaaccaggtcaacaggaagtcagacatctacgtgtgcatgatctcctatgcacacaacgtggcggcccagggcaagtacatagctattgccagcactactgtggagaccacggaccctgaaaaggaggtggagccggctctggagctgttggagcccattgaccagaagtttgtggctatcagtgacttgtatgagcccattgatgatggttgtgagagccaggtgttctgttcctgctcctacgatgccaccacacactttgagacaacctgcaacgacatcaaagacatctacaaacgcatggctggcacggcctttgactttgagaacatgaagcgcaaacagaacgacgtctttggagaagctgagcagtgattgtggccgcccccagcccctgctgccccagcctgtgtctgttctcctcgagggctccagcatcctctgcttcccccaccacgttcccatcacccacctcattgatccactgaccaaatccttaaccctagcgatggcttgggagatggggggttggatagcatcctctttcttggcccttccttatcctaggaaaagagggttcctctccttgtgtgtgtctcttccccccacccctaattcttctgctctgtttgggaagacgtggaggaaaaggtgacttctgcccccaccgctcttacccccactgtagtggcctttggagatgcccccacctcccccccaccaactctcgcgtgttggagagaaggggccctcccagcacaaagttgcattcctcccccctaatttattctaatttattaactttgacccaccctttctgagcctgcagccttcccgtgtggcctgagggctgtcgagtgagctgccccagcccctcccagcccttgcccagcctgggggagtggggaaggcttgggcatggccccgttgtgtcgagtgagctgccccagcccctcccagcccttgcccagcctgggggagtggggaagccttgggcatggcccactcccccttgcccagcctggggga

SEQ ID NO: 331865 - DNA, 2219 bp, Homo sapiens
tgcggcaccggttgtaactgtcaagttgagggacgggttatattatacgatacgtgggcgtggggccgacagatctgaacatggacgaggaatacgatgtgatcgtgctggggaccggtctcaccgaatgcatcctgtcgggcatcatgtctgtgaacgggaagaaggtgctgcacatggaccggaacccctactacgggggcgagagctcctccatcacacccctggaggagctgtataagcgttttcagttgctggaggggccccctgagtcgatgggccgaggccgagactggaatgttgacctgattcccaaattcctcatggctaacgggcagctggtaaagatgctactgtatacagaggtgactcgctacctggacttcaaggtggtggagggcagctttgtctacaaggggggcaagatctacaaagtgccgtccactgagactgaggccttggcttccaatctgatgggcatgtttgagaaacggcgcttccgcaagttcctggtgtttgtggcaaacttcgatgagaatgaccccaagacctttgagggcgttgacccccagactaccagcatgcgtgacgtctaccggaagtttgatctgggccaggatgtcatcgatttcactggccatgccctggcgctctaccgcactgatgactacctggaccagccctgccttgagaccgtcaaccgcatcaagttgtacagtgagtccctggcccggtatggcaagagcccatatttatacccgctctacggcttgggcgagctgccccagggttttgcaagattgagtgccatctatggggggacatatatgctgaacaaacctgtggatgacatcatcatggagaacggcaaggtggtgggcgtgaagtctgagggagaggtggcccgctgcaagcagctgatctgtgaccccagctacatcccggaccgtgtgcggaaggctggccaggttatccgcatcatctgtatccttagccaccccatcaagaacaccaacgacgccaactcctgccaaataatcatcccccagaaccaggtcaacaggaagtcagacatctacgtgtgcatgatctcctatgcacacaacgtggcggcccagggcaagtacatagctattgccagcactactgtggagaccacggaccctgaaaaggaggtggagccggctctggagctgttggagcccattgaccagaagtttgtggctatcagtgacttgtatgagcccattgatgatggttgtgagagccaggtgttctgttcctgctcctacgatgccaccacacactttgagacaacctgcaacgacatcaaagacatctacaaacgcatggctggcacggcctttgactttgagaacatgaagcgcaaacagaacgacgtctttggagaagctgagcagtgattgtggccgcccccagcccctgctgccccagcctgtgtctgttctcctcgagggctccagcatcctctgcttcccccaccacgttcccatcacccacctcattgatccactgaccaaatccttaaccctagcgatggcttgggagatggggggttggatagcatcctctttcttggcccttccttatcctaggaaaagagggttcctctccttgtgtgtgtctcttccccccacccctaattcttctgctctgtttgggaagacgtggaggaaaaggtgacttctgcccccaccgctcttacccccactgtagtggcctttggagatgcccccacctcccccccaccaactctcgcgtgttggagagaaggggccctcccagcacaaagttgcattcctcccccctaatttattctaatttattaactttgacccaccctttctgagcctgcagccttcccgtgtggcctgagggctgtcgagtgagctgccccagcccctcccagcccttgcccagcctgggggagtggggaaggcttgggcatggccccgttggaggttgatttgctgttttgtttcttgtctttgtgttctgtggtacttgctgagagaaaagaaaagtgagccaagcagaaggaggtgggaaaacggacccaaaccccagtgtgccctgccccatgcctttcctttagtggtgggaaacccttatcttgcaaagtgaatgtgtccccttccccaccctctagtgtatttcacagaaaacaaaacctcccaataaaacggttgaaacctgaa

SEQ ID NO: 331866 - DNA, 2590 bp, Homo sapiens
ttcctgggccgcagcaccggccgccggcccgccccgcccgccccgccccgcgcctctctagactctcggcgagcagcgtcgcccgcggagccgcgctggtgctgtggcccgggccctggcagccctcccgggaggcgagccggggaggcggtggcccctgccggttgcggcggggcgcgggaagaggcgggactctttgacgcggcggaggggtcgggcgacggccgacgcgccgccatctttggtccagtgcggtggcggcggcggcggtggcggcggcgactgctgcggtgaaggaggaggaggagccgagcgggcgctggcaccgaggcctgaccatggacgaggaatacgatgtgatcgtgctggggaccggtctcaccgaatgcatcctgtcgggcatcatgtctgtgaacgggaagaaggtgctgcacatggaccggaacccctactacgggggcgagagctcctccatcacacccctggaggagctgtataagcgttttcagttgctggaggggccccctgagtcgatgggccgaggccgagactggaatgttgacctgattcccaaattcctcatggctaacgggcagctggtaaagatgctactgtatacagaggtgactcgctacctggacttcaaggtggtggagggcagctttgtctacaaggggggcaagatctacaaagtgccgtccactgagactgaggccttggcttccaatctgatgggcatgtttgagaaacggcgcttccgcaagttcctggtgtttgtggcaaacttcgatgagaatgaccccaagacctttgagggcgttgacccccagactaccagcatgcgtgacgtctaccggaagtttgatctgggccaggatgtcatcgatttcactggccatgccctggcgctctaccgcactgatgagtgaggggaagctgggtggtggcagccccctcgcccggcccgcccccacccttcccacacctgcctgctgtccccctgccccgcatgtctcttgtactcagccacaggctcacctacctggaccagccctgccttgagaccgtcaaccgcatcaagttgtacagtgagtccctggcccggtatggcaagagcccatatttatacccgctctacggcttgggcgagctgccccagggttttgcaagattgagtgccatctatggggggacatatatgctgaacaaacctgtggatgacatcatcatggagaacggcaaggtggtgggcgtgaagtctgagggagaggtggcccgctgcaagcagctgatctgtgaccccagctacatcccggaccgtgtgcggaaggctggccaggttatccgcatcatctgtatccttagccaccccatcaagaacaccaacgacgccaactcctgccaaataatcatcccccagaaccaggtcaacaggaagtcagacatctacgtgtgcatgatctcctatgcacacaacgtggcggcccagggcaagtacatagctattgccagcactactgtggagaccacggaccctgaaaaggaggtggagccggctctggagctgttggagcccattgaccagaagtttgtggctatcagtgacttgtatgagcccattgatgatggttgtgagagccaggtgttctgttcctgctcctacgatgccaccacacactttgagacaacctgcaacgacatcaaagacatctacaaacgcatggctggcacggcctttgactttgagaacatgaagcgcaaacagaacgacgtctttggagaagctgagcagtgattgtggccgcccccagcccctgctgccccagcctgtgtctgttctcctcgagggctccagcatcctctgcttcccccaccacgttcccatcacccacctcattgatccactgaccaaatccttaaccctagcgatggcttgggagatggggggttggatagcatcctctttcttggcccttccttatcctaggaaaagagggttcctctccttgtgtgtgtctcttccccccacccctaattcttctgctctgtttgggaagacgtggaggaaaaggtgacttctgcccccaccgctcttacccccactgtagtggcctttggagatgcccccacctcccccccaccaactctcgcgtgttggagagaaggggccctcccagcacaaagttgcattcctcccccctaatttattctaatttattaactttgacccaccctttctgagcctgcagccttcccgtgtggcctgagggctgtcgagtgagctgccccagcccctcccagcccttgcccagcctgggggagtggggaaggcttgggcatggccccgttggaggttgatttgctgttttgtttcttgtctttgtgttctgtggtacttgctgagagaaaagaaaagtgagccaagcagaaggaggtgggaaaacggacccaaaccccagtgtgccctgccccatgcctttcctttagtggtgggaaacccttatcttgcaaagtgaatgtgtccccttccccaccctctagtgtatttcacagaaaacaaaacctcccaataaaacggttgaaacctgaa

SEQ ID NO: 331867 - DNA, 2198 bp, Homo sapiens
ttcctgggccgcagcaccggccgccggcccgccccgcccgccccgccccgcgcctctctagactctcggcgagcagcgtcgcccgcggagccgcgctggtgctgtggcccgggccctggcagccctcccgggaggcgagccggggaggcggtggcccctgccggttgcggcggggcgcgggaagaggcgggactctttgacgcggcggaggggtcgggcgacggccgacgcgccgccatctttggtccagtgcggtggcggcggcggcggtggcggcggcgactgctgcggtgaaggaggaggaggagccgagcgggcgctggcaccgaggcctgaccatggacgaggaatacgatgtgatcgtgctggggaccggtctcaccgaatgcatcctgtcgggcatcatgtctgtgaacgggaagaaggtgctgcacatggaccggaacccctactacgggggcgagagctcctccatcacacccctggaggagctgtataagcgttttcagttgctggaggggccccctgagtcgatgggccgaggccgagactggaatgttgacctgattcccaaattcctcatggctaacgggcagctggtaaagatgctactgtatacagaggtgactcgctacctggacttcaaggtggtggagggcagctttgtctacaaggggggcaagatctacaaagtgccgtccactgagactgaggccttggcttccaatctgatgggcatgtttgagaaacggcgcttccgcaagttcctggtgtttgtggcaaacttcgatgagaatgaccccaagacctttgagggcgttgacccccagactaccagcatgcgtgacgtctaccggaagtttgatctgggccaggatgtcatcgatttcactggccatgccctggcgctctaccgcactgatgactacctggaccagccctgccttgagaccgtcaaccgcatcaagttgtacagtgagtccctggcccggtatggcaagagcccatatttatacccgctctacggcttgggcgagctgccccagggttttgcaagattgagtgccatctatggggggacatatatgctgaacaaacctgtggatgacatcatcatggagaacggcaaggtggtgggcgtgaagtctgagggagaggtggcccgctgcaagcagctgatctgtgaccccagctacatcccggaccgtgtgcggaaggctggccaggttatccgcatcatctgtatccttagccaccccatcaagaacaccaacgacgccaactcctgccaaataatcatcccccagaaccaggtcaacaggaagtcagacatctacgtgtgcatgatctcctatgcacacaacgtggcggcccagggcaagtacatagctattgccagcactactgtggagaccacggaccctgaaaaggaggtggagccggctctggagctgttggagcccattgaccagaagtttgtggctatcagtgacttgtatgagcccattgatgatggttgtgagagccaggtgttctgttcctgctcctacgatgccaccacacactttgagacaacctgcaacgacatcaaagacatctacaaacgcatggctggcacggcctttgactttgagaacatgaagcgcaaacagaacgacgtctttggagaagctgagcagtgattgtggccgcccccagcccctgctgccccagcctgtgtctgttctcctcgagggctccagcatcctctgcttcccccaccacgttcccatcacccacctcattgatccactgaccaaatccttaaccctagcgatggcttgggagatggggggttggatagcatcctctttcttggcccttccttatcctaggaaaagagggttcctctccttgtgtgtgtctcttccccccacccctaattcttctgctctgtttgggaagacgtggaggaaaaggtgacttctgcccccaccgctcttacccccactgtagtggcctttggagatgcccccacctcccccccaccaactctcgcgtgttggagagaaggggccctcccagcacaaagttgcattccatgcctttcctttagtggtgggaaacccttatcttgcaaagtgaatgtgtccccttccccaccctctagtgtatttcacagaaaacaaaacctcccaataaaacggttgaaacctgaa

SEQ ID NO: 331868 - DNA, 2013 bp, Homo sapiens
ttcctgggccgcagcaccggccgccggcccgccccgcccgccccgccccgcgcctctctagactctcggcgagcagcgtcgcccgcggagccgcgctggtgctgtggcccgggccctggcagccctcccgggaggcgagccggggaggcggtggcccctgccggttgcggcggggcgcgggaagaggcgggactctttgacgcggcggaggggtcgggcgacggccgacgcgccgccatctttggtccagtgcggtggcggcggcggcggtggcggcggcgactgctgcggtgaaggaggaggaggagccgagcgggcgctggcaccgaggcctgaccatggacgaggaatacgatgtgatcgtgctggggaccggtctcaccgaatgcatcctgtcgggcatcatgtctgtgaacgggaagaaggtgctgcacatggaccggaacccctactacgggggcgagagctcctccatcacacccctggaggagctgtataagcgttttcagttgctggaggggccccctgagtcgatgggccgaggccgagactggaatgttgacctgattcccaaattcctcatggctaacgggcagctggtaaagatgctactgtatacagaggtgactcgctacctggacttcaaggtggtggagggcagctttgtctacaaggggggcaagatctacaaagtgccgtccactgagactgaggccttggcttccaatctgatgggcatgtttgagaaacggcgcttccgcaagttcctggtgtttgtggcaaacttcgatgagaatgaccccaagacctttgagggcgttgacccccagactaccagcatgcgtgacgtctaccggaagtttgatctgggccaggatgtcatcgatttcactggccatgccctggcgctctaccgcactgatgactacctggaccagccctgccttgagaccgtcaaccgcatcaagttgtacagtgagtccctggcccggtatggcaagagcccatatttatacccgctctacggcttgggcgagctgccccagggttttgcaagattgagtgccatctatggggggacatatatgctgaacaaacctgtggatgacatcatcatggagaacggcaaggtggtgggcgtgaagtctgagggagaggtggcccgctgcaagcagctgatctgtgaccccagctacatcccggaccgtgtgcggaaggctggccaggttatccgcatcatctgtatccttagccaccccatcaagaacaccaacgacgccaactcctgccaaataatcatcccccagaaccaggtcaacaggaagtcagacatctacgtgtgcatgatctcctatgcacacaacgtggcggcccagggcaagtacatagctattgccagcactactgtggagaccacggaccctgaaaaggaggtggagccggctctggagctgttggagcccattgaccagaagtttgtggctatcagtgacttgtatgagcccattgatgatggttgtgagagccaggtgttctgttcctgctcctacgatgccaccacacactttgagacaacctgcaacgacatcaaagacatctacaaacgcatggctggcacggcctttgactttgagaacatgaagcgcaaacagaacgacgtctttggagaagctgagcagtgattgtggccgcccccagcccctgctgccccagcctgtgtctgttctcctcgagggctccagcatcctctgcttcccccaccacgttcccatcacccacctcattgatccactgaccaaatccttaaccctagcgatggcttgggagatggggggttggatagcatcctctttcttggcccttccttatcctaggaaaagagggttcctctccttgtgtgtgtctcttccccccacccctaattcttctgctctgtttgggaagacgtggaggaaaagggtggaaggagggagaggatcaggaacaataagtaatgggtgctggagacttaaa

SEQ ID NO: 331869 - DNA, 2674 bp, Homo sapiens
ttcctgggccgcagcaccggccgccggcccgccccgcccgccccgccccgcgcctctctagactctcggcgagcagcgtcgcccgcggagccgcgctggtgctgtggcccgggccctggcagccctcccgggaggcgagccggggaggcggtggcccctgccggttgcggcggggcgcgggaagaggcgggactctttgacgcggcggaggggtcgggcgacggccgacgcgccgccatctttggtccagtgcggtggcggcggcggcggtggcggcggcgactgctgcggtgaaggaggaggaggagccgagcgggcgctggcaccgaggcctgaccatggacgaggaatacgatgtgatcgtgctggggaccggtctcaccgaatgcatcctgtcgggcatcatgtctgtgaacgggaagaaggtgctgcacatggaccggaacccctactacgggggcgagagctcctccatcacacccctggaggagctgtataagcgttttcagttgctggaggggccccctgagtcgatgggccgaggccgagactggaatgttgacctgattcccaaattcctcatggctaacgggcagctggtaaagatgctactgtatacagaggtgactcgctacctggacttcaaggtggtggagggcagctttgtctacaaggggggcaagatctacaaagtgccgtccactgagactgaggccttggcttccaatctgatgggcatgtttgagaaacggcgcttccgcaagttcctggtgtttgtggcaaacttcgatgagaatgaccccaagacctttgagggcgttgacccccagactaccagcatgcgtgacgtctaccggaagtttgatctgggccaggatgtcatcgatttcactggccatgccctggcgctctaccgcactgatgagtgaggggaagctgggtggtggcagccccctcgcccggcccgcccccacccttcccacacctgcctgctgtccccctgccccgcatgtctcttgtactcagccacaggctcacctatcaccctttccatttcccccttgcatttgatcctcatcttccccaggccattcagggtggtgggaagactggcctggtacctgggtgggggtaaatcaggggtgctgctattccccctacctggaccagccctgccttgagaccgtcaaccgcatcaagttgtacagtgagtccctggcccggtatggcaagagcccatatttatacccgctctacggcttgggcgagctgccccagggttttgcaagattgagtgccatctatggggggacatatatgctgaacaaacctgtggatgacatcatcatggagaacggcaaggtggtgggcgtgaagtctgagggagagctacatcccggaccgtgtgcggaaggctggccaggttatccgcatcatctgtatccttagccaccccatcaagaacaccaacgacgccaactcctgccaaataatcatcccccagaaccaggtcaacaggaagtcagacatctacgtgtgcatgatctcctatgcacacaacgtggcggcccagggcaagtacatagctattgccagcactactgtggagaccacggaccctgaaaaggaggtggagccggctctggagctgttggagcccattgaccagaagtttgtggctatcagtgacttgtatgagcccattgatgatggttgtgagagccaggtgttctgttcctgctcctacgatgccaccacacactttgagacaacctgcaacgacatcaaagacatctacaaacgcatggctggcacggcctttgactttgagaacatgaagcgcaaacagaacgacgtctttggagaagctgagcagtgattgtggccgcccccagcccctgctgccccagcctgtgtctgttctcctcgagggctccagcatcctctgcttcccccaccacgttcccatcacccacctcattgatccactgaccaaatccttaaccctagcgatggcttgggagatggggggttggatagcatcctctttcttggcccttccttatcctaggaaaagagggttcctctccttgtgtgtgtctcttccccccacccctaattcttctgctctgtttgggaagacgtggaggaaaaggtgacttctgcccccaccgctcttacccccactgtagtggcctttggagatgcccccacctcccccccaccaactctcgcgtgttggagagaaggggccctcccagcacaaagttgcattcctcccccctaatttattctaatttattaactttgacccaccctttctgagcctgcagccttcccgtgtggcctgagggctgtcgagtgagctgccccagcccctcccagcccttgcccagcctgggggagtggggaaggcttgggcatggccccgttggaggttgatttgctgttttgtttcttgtctttgtgttctgtggtacttgctgagagaaaagaaaagtgagccaagcagaaggaggtgggaaaacggacccaaaccccagtgtgccctgccccatgcctttcctttagtggtgggaaacccttatcttgcaaagtgaatgtgtccccttccccaccctctagtgtatttcacagaaaacaaaacctcccaataaaacggttgaaacctgaa

SEQ ID NO: 331870 - DNA, 2241 bp, Homo sapiens
cgagtctccacaaatgtgacttgctcagttcccggcagcaccaggactgggcccagggtcccagaaccttgagtcagggcttagctgggagctgacctatctccagagagtccattctggtccctcaggctgtcttggtgcggacatgaatccctcatgccccctcccgctggcccttggcagtgtattctgagcagaagctccagagaggaaagagcccgcggagatggggccagcgttcacggcagtgacaagagctgggatgaatcccggcgtctcctacctgctgcctgcctggggcagccttctttgcactttggtggaggaagggtgcagtggaattggtccccgtttctcctgggaggggccttcaccggagctgctctcaccacagattgagtgccatctatggggggacatatatgctgaacaaacctgtggatgacatcatcatggagaacggcaaggtggtgggcgtgaagtctgagggagaggtgagcccttcccgtgcatgcagtgcagtcccatggttgaggcggggcttggtcactttctctgtgctgtcgagtctcctgctgcacagccccaagggtcttggagctgggaactgggggtccagaagtcttcagagtcatgactgtgggtgagaggtctctttcagaggccacatgccatgtctgtggtgcagaaagtgttcttgatcacagtgcctctggggggcgggggggcgggcacccagcccgtgcgtcaaggcccacctatctgagcggcagggtagggccatgcattcaggaggggcagtagtgatggctccgaggaacgtcttgtctgccagagctgcctgcccttgctgtgagcgcagccccacgtctacctaagggagggatgtgacaggggcgaggacttctggtgccttctcaggtggcccgctgcaagcagctgatctgtgaccccagctacatcccggaccgtgtgcggaaggctggccaggttatccgcatcatctgtatccttagccaccccatcaagaacaccaacgacgccaactcctgccaaataatcatcccccagaaccaggtcaacaggaagtcagacatctacgtgtgcatgatctcctatgcacacaacgtggcggcccagggcaagtacatagctattgccagcactactgtggagaccacggaccctgaaaaggaggtggagccggctctggagctgttggagcccattgaccagaagtttgtggctatcagtgacttgtatgagcccattgatgatggttgtgagagccaggtgttctgttcctgctcctacgatgccaccacacactttgagacaacctgcaacgacatcaaagacatctacaaacgcatggctggcacggcctttgactttgagaacatgaagcgcaaacagaacgacgtctttggagaagctgagcagtgattgtggccgcccccagcccctgctgccccagcctgtgtctgttctcctcgagggctccagcatcctctgcttcccccaccacgttcccatcacccacctcattgatccactgaccaaatccttaaccctagcgatggcttgggagatggggggttggatagcatcctctttcttggcccttccttatcctaggaaaagagggttcctctccttgtgtgtgtctcttccccccacccctaattcttctgctctgtttgggaagacgtggaggaaaaggtgacttctgcccccaccgctcttacccccactgtagtggcctttggagatgcccccacctcccccccaccaactctcgcgtgttggagagaaggggccctcccagcacaaagttgcattcctcccccctaatttattctaatttattaactttgacccaccctttctgagcctgcagccttcccgtgtggcctgagggctgtcgagtgagctgccccagcccctcccagcccttgcccagcctgggggagtggggaaggcttgggcatggccccgttggaggttgatttgctgttttgtttcttgtctttgtgttctgtggtacttgctgagagaaaagaaaagtgagccaagcagaaggaggtgggaaaacggacccaaaccccagtgtgccctgccccatgcctttcctttagtggtgggaaacccttatcttgcaaagtgaatgtgtccccttccccaccctctagtgtatttcacagaaaacaaaacctcccaataaaacggttgaaacctgaa

SEQ ID NO: 331871 - DNA, 1121 bp, Homo sapiens
aagggagaagagagaaggaagggaggggagggagggccacactatgacaagacagccccttctattcgtcactggcttcttccaaagcagctcgtcccagccctgggctcctggctgcccgcccaggatacctgtctgactcaccctgggcgctgggctctggctgtttccaggtgttctgttcctgctcctacgatgccaccacacactttgagacaacctgcaacgacatcaaagacatctacaaacgcatggctggcacggcctttgactttgagaacatgaagcgcaaacagaacgacgtctttggagaagctgagcagtgattgtggccgcccccagcccctgctgccccagcctgtgtctgttctcctcgagggctccagcatcctctgcttcccccaccacgttcccatcacccacctcattgatccactgaccaaatccttaaccctagcgatggcttgggagatggggggttggatagcatcctctttcttggcccttccttatcctaggaaaagagggttcctctccttgtgtgtgtctcttccccccacccctaattcttctgctctgtttgggaagacgtggaggaaaaggtgacttctgcccccaccgctcttacccccactgtagtggcctttggagatgcccccacctcccccccaccaactctcgcgtgttggagagaaggggccctcccagcacaaagttgcattcctcccccctaatttattctaatttattaactttgacccaccctttctgagcctgcagccttcccgtgtggcctgagggctgtcgagtgagctgccccagcccctcccagcccttgcccagcctgggggagtggggaaggcttgggcatggccccgttggaggttgatttgctgttttgtttcttgtctttgtgttctgtggtacttgctgagagaaaagaaaagtgagccaagcagaaggaggtgggaaaacggacccaaaccccagtgtgccctgccccatgcctttcctttagtggtgggaaacccttatcttgcaaagtgaatgtgtccccttccccaccctctagtgtatttcacagaaaacaaaacctcccaataaaacggttgaaacctgaa

SEQ ID NO: 331872 - DNA, 2477 bp, Homo sapiens
ttcctgggccgcagcaccggccgccggcccgccccgcccgccccgccccgcgcctctctagactctcggcgagcagcgtcgcccgcggagccgcgctggtgctgtggcccgggccctggcagccctcccgggaggcgagccggggaggcggtggcccctgccggttgcggcggggcgcgggaagaggcgggactctttgacgcggcggaggggtcgggcgacggccgacgcgccgccatctttggtccagtgcggtggcggcggcggcggtggcggcggcgactgctgcggtgaaggaggaggaggagccgagcgggcgctggcaccgaggcctgaccatggacgaggaatacgatgtgatcgtgctggggaccggtctcaccgaatgcatcctgtcgggcatcatgtctgtgaacgggaagaaggtgctgcacatggaccggaacccctactacgggggcgagagctcctccatcacacccctggaggagctgtataagcgttttcagttgctggaggggccccctgagtcgatgggccgaggccgagactggaatgttgacctgattcccaaattcctcatggctaacgggcagctggtaaagatgctactgtatacagaggtgactcgctacctggacttcaaggtggtggagggcagctttgtctacaaggggggcaagatctacaaagtgccgtccactgagactgaggccttggcttccaatctgatgggcatgtttgagaaacggcgcttccgcaagttcctggtgtttgtggcaaacttcgatgagaatgaccccaagacctttgagggcgttgacccccagactaccagcatgcgtgacgtctaccggaagtttgatctgggccaggatgtcatcgatttcactggccatgccctggcgctctaccgcactgatgactacctggaccagccctgccttgagaccgtcaaccgcatcaagttgtacagtgagtccctggcccggtatggcaagagcccatatttatacccgctctacggcttgggcgagctgccccagggttttgcaagattgagtgccatctatggggggacatatatgctgaacaaacctgtggatgacatcatcatggagaacggcaaggtggtgggcgtgaagtctgagggagaggtggcccgctgcaagcagctgatctgtgaccccagctacatcccggaccgtgtgcggaaggctggccaggttatccgcatcatctgtatccttagccaccccatcaagaacaccaacgacgccaactcctgccaaataatcatcccccagaaccaggtcaacaggaagtcagacatctacgtgtgcatgatctcctatgcacacaacgtggcggcccagggcaagtacatagctattgccagcactactgtggagaccacggaccctgaaaaggaggtggagccggctctggagctgttggagcccattgaccagaagtttgtggctatcagtgacttgtatgagcccattgatgatggttgtgagagccaggtgttctgttcctgctcctacgatgccaccacacactttgagacaacctgcaacgacatcaaagacatctacaaacgcatggctggcacggcctttgactttgagaacatgaagcgcaaacagaacgacgtctttggagaagctgagcagtgattgtggccgcccccagcccctgctgccccagcctgtgtctgttctcctcgagggctccagcatcctctgcttcccccaccacgttcccatcacccacctcattgatccactgaccaaatccttaaccctagcgatggcttgggagatggggggttggatagcatcctctttcttggcccttccttatcctaggaaaagagggttcctctccttgtgtgtgtctcttccccccacccctaattcttctgctctgtttgggaagacgtggaggaaaaggtgacttctgcccccaccgctcttacccccactgtagtggcctttggagatgcccccacctcccccccaccaactctcgcgtgttggagagaaggggccctcccagcacaaagttgcattcctcccccctaatttattctaatttattaactttgacccaccctttctgagcctgcagccttcccgtgtggcctgagggctgtcgagtgagctgccccagcccctcccagcccttgcccagcctgggggagtggggaaggcttgggcatggccccgttggaggttgatttgctgttttgtttcttgtctttgtgttctgtggtacttgctgagagaaaagaaaagtgagccaagcagaaggaggtgggaaaacggacccaaaccccagtgtgccctgccccatgcctttcctttagtggtgggaaacccttatcttgcaaagtgaatgtgtccccttccccaccctctagtgtatttcacagaaaacaaaacctcccaataaaacggttgaaacctgaa

SEQ ID NO: 331873 - DNA, 2943 bp, Homo sapiens
ttcctgggccgcagcaccggccgccggcccgccccgcccgccccgccccgcgcctctctagactctcggcgagcagcgtcgcccgcggagccgcgctggtgctgtggcccgggccctggcagccctcccgggaggcgagccggggaggcggtggcccctgccggttgcggcggggcgcgggaagaggcgggactctttgacgcggcggaggggtcgggcgacggccgacgcgccgccatctttggtccagtgcggtggcggcggcggcggtggcggcggcgactgctgcggtgaaggaggaggaggagccgagcgggcgctggcaccgaggcctgaccatggacgaggaatacgatgtgatcgtgctggggaccggtctcaccgaatgcatcctgtcgggcatcatgtctgtgaacgggaagaaggtgctgcacatggaccggaacccctactacgggggcgagagctcctccatcacacccctggaggagctgtataagcgttttcagttgctggaggggccccctgagtcgatgggccgaggccgagactggaatgttgacctgattcccaaattcctcatggctaacgggcagctggtaaagatgctactgtatacagaggtgactcgctacctggacttcaaggtggtggagggcagctttgtctacaaggggggcaagatctacaaagtgccgtccactgagactgaggccttggcttccaatctgatgggcatgtttgagaaacggcgcttccgcaagttcctggtgtttgtggcaaacttcgatgagaatgaccccaagacctttgagggcgttgacccccagactaccagcatgcgtgacgtctaccggaagtttgatctgggccaggatgtcatcgatttcactggccatgccctggcgctctaccgcactgatgactacctggaccagccctgccttgagaccgtcaaccgcatcaagttgtacagtgagtccctggcccggtatggcaagagcccatatttatacccgctctacggcttgggcgagctgccccagggttttgcaagattgagtgccatctatggggggacatatatgctgaacaaacctgtggatgacatcatcatggagaacggcaaggtggtgggcgtgaagtctgagggagaggtggcccgctgcaagcagctgatctgtgaccccagctacatcccggaccgtgtgcggaaggctggccaggttatccgcatcatctgtatccttagccaccccatcaagaacaccaacgacgccaactcctgccaaataatcatcccccagaaccaggtcaacaggaagtcagacatctacgtgtgcatgatctcctatgcacacaacgtggcggcccagggcaagtacatagctattgccagcactactgtggagaccacggaccctgaaaaggaggtggagccggctctggagctgttggagcccattgaccagaagtttgtggctatcagtgacttgtatgagcccattgatgatggttgtgagagccaggtgttctgttcctgctcctacgatgccaccacacactttgagacaacctgcaacgacatcaaagacatctacaaacgcatggctggcacggcctttgactttgagaacatgaagcgcaaacagaacgacgtctttggagaagctgagcagtgattgtggccgcccccagcccctgctgccccagcctgtgtctgttctcctcgagggctccagcatcctctgcttcccccaccacgttcccatcacccacctcattgatccactgaccaaatccttaaccctagcgatggcttgggagatggggggttggatagcatcctctttcttggcccttccttatcctaggaaaagagggttcctctccttgtgtgtgtctcttccccccacccctaattcttctgctctgtttgggaagacgtggaggaaaaggtgacttctgcccccaccgctcttacccccactgtagtggcctttggagatgcccccacctcccccccaccaactctcgcgtgttggagagaaggggccctcccagcacaaagttgcattcctcccccctaatttattctaatttattaactttgacccaccctttctgagcctgcagccttcccgtgtggcctgagggctgtcgagtgagctgccccagcccctcccagcccttgcccagcctgggggagtggggaaggcttgggcatggccccgttggaggttgatttgctgttttgtttcttgtctttgtgttctgtggtacttgctgagagaaaagaaaagtgagccaagcagaaggaggtgggaaaacggacccaaaccccagtgtgccctgccccatgcctttcctttagtggtgggaaacccttatcttgcaaagtgaatgtgtccccttccccaccctctagtgtatttcacagaaaacaaaacctcccaataaaacggttgaaacctgaaaaaaaaaaaaaaaaaaaaaaaaaaaaaaaaaaaaaaaaaaaaaggggggggggggccaaaagagtatctcccccaagggggagcgccaaagtataagcagtacaccaaggtttttgtggacaaagggggcgcccaaaaaagggagaggcgaatattaaagagaaaaggacgcggaccgggagttatacaaagcggagaaggggagaaaacacggtggacagggggagggacccagggagagagggcccccataaaccgggggggggggggcacacatattgtggggaagagatcaatccaggtaagagaggtattaaagaaggcattgaggaggagaattatgagagactgtaacaggtgtgaatatgtggttgtgtaaccacgaggtggtaaattatagaggtctgagtagaaaaaggtgctggcacaacgggggagtattgttataagagaatttttatcccgg

SEQ ID NO: 331874 - DNA, 2560 bp, Homo sapiens
  misc_feature (2523)..(2523): n is a, c, g, or t
  misc_feature (2551)..(2553): n is a, c, g, or t
ttcctgggccgcagcaccggccgccggcccgccccgcccgccccgccccgcgcctctctagactctcggcgagcagcgtcgcccgcggagccgcgctggtgctgtggcccgggccctggcagccctcccgggaggcgagccggggaggcggtggcccctgccggttgcggcggggcgcgggaagaggcgggactctttgacgcggcggaggggtcgggcgacggccgacgcgccgccatctttggtccagtgcggtggcggcggcggcggtggcggcggcgactgctgcggtgaaggaggaggaggagccgagcgggcgctggcaccgaggcctgaccatggacgaggaatacgatgtgatcgtgctggggaccggtctcaccgaatgcatcctgtcgggcatcatgtctgtgaacgggaagaaggtgctgcacatggaccggaacccctactacgggggcgagagctcctccatcacacccctggaggagctgtataagcgttttcagttgctggaggggccccctgagtcgatgggccgaggccgagactggaatgttgacctgattcccaaattcctcatggctaacgggcagctggtaaagatgctactgtatacagaggtgactcgctacctggacttcaaggtggtggagggcagctttgtctacaaggggggcaagatctacaaagtgccgtccactgagactgaggccttggcttccaatctgatgggcatgtttgagaaacggcgcttccgcaagttcctggtgtttgtggcaaacttcgatgagaatgaccccaagacctttgagggcgttgacccccagactaccagcatgcgtgacgtctaccggaagtttgatctgggccaggatgtcatcgatttcactggccatgccctggcgctctaccgcactgatgactacctggaccagccctgccttgagaccgtcaaccgcatcaagttgtacagtgagtccctggcccggtatggcaagagcccatatttatacccgctctacggcttgggcgagctgccccagggttttgcaagattgagtgccatctatggggggacatatatgctgaacaaacctgtggatgacatcatcatggagaacggcaaggtggtgggcgtgaagtctgagggagaggtggcccgctgcaagcagctgatctgtgaccccagctacatcccggaccgtgtgcggaaggctggccaggttatccgcatcatctgtatccttagccaccccatcaagaacaccaacgacgccaactcctgccaaataatcatcccccagaaccaggtcaacaggaagtcagacatctacgtgtgcatgatctcctatgcacacaacgtggcggcccagggcaagtacatagctattgccagcactactgtggagaccacggaccctgaaaaggaggtggagccggctctggagctgttggagcccattgaccagaagtttgtggctatcagtgacttgtatgagcccattgatgatggttgtgagagccaggtgttctgttcctgctcctacgatgccaccacacactttgagacaacctgcaacgacatcaaagacatctacaaacgcatggctggcacggcctttgactttgagaacatgaagcgcaaacagaacgacgtctttggagaagctgagcagtgattgtggccgcccccagcccctgctgccccagcctgtgtctgttctcctcgagggctccagcatcctctgcttcccccaccacgttcccatcacccacctcattgatccactgaccaaatccttaaccctagcgatggcttgggagatggggggttggatagcatcctctttcttggcccttccttatcctaggaaaagagggttcctctccttgtgtgtgtctcttccccccacccctaattcttctgctctgtttgggaagacgtggaggaaaaggtgacttctgcccccaccgctcttacccccactgtagtggcctttggagatgcccccacctcccccccaccaactctcgcgtgttggagagaaggggccctcccagcacaaagttgcattcctcccccctaatttattctaatttattaactttgacccaccctttctgagcctgcagccttcccgtgtggcctgagggctgtcgagtgagctgccccagcccctcccagcccttgcccagcctgggggagtggggaaggcttgggcatggccccgttggaggttgatttgctgttttgtttcttgtctttgtgttctgtggtacttgctgagagaaaagaaaagtgagccaagcagaaggaggtgggaaaacggacccaaaccccagtgtgccctgccccatgcctttcctttagtggtgggaaacccttatcttgcaaagtgaatgtgtccccttccccaccctctagtgtatttcacagaaaacaaaacctcccaataaaacggttgaaacctgaaaaaaaaaaaaaaaaaaaaaaaaaaaaaaaaaaaaaaaaccgggggntttttttggggggggggaaaaaggggtnnnaaggggc

SEQ ID NO: 331875 - DNA, 2862 bp, Homo sapiens
ttcctgggccgcagcaccggccgccggcccgccccgcccgccccgccccgcgcctctctagactctcggcgagcagcgtcgcccgcggagccgcgctggtgctgtggcccgggccctggcagccctcccgggaggcgagccggggaggcggtggcccctgccggttgcggcggggcgcgggaagaggcgggactctttgacgcggcggaggggtcgggcgacggccgacgcgccgccatctttggtccagtgcggtggcggcggcggcggtggcggcggcgactgctgcggtgaaggaggaggaggagccgagcgggcgctggcaccgaggcctgaccatggacgaggaatacgatgtgatcgtgctggggaccggtctcaccgaatgcatcctgtcgggcatcatgtctgtgaacgggaagaaggtgctgcacatggaccggaacccctactacgggggcgagagctcctccatcacacccctggaggagctgtataagcgttttcagttgctggaggggccccctgagtcgatgggccgaggccgagactggaatgttgacctgattcccaaattcctcatggctaacgggcagctggtaaagatgctactgtatacagaggtgactcgctacctggacttcaaggtggtggagggcagctttgtctacaaggggggcaagatctacaaagtgccgtccactgagactgaggccttggcttccaatctgatgggcatgtttgagaaacggcgcttccgcaagttcctggtgtttgtggcaaacttcgatgagaatgaccccaagacctttgagggcgttgacccccagactaccagcatgcgtgacgtctaccggaagtttgatctgggccaggatgtcatcgatttcactggccatgccctggcgctctaccgcactgatgactacctggaccagccctgccttgagaccgtcaaccgcatcaagttgtacagtgagtccctggcccggtatggcaagagcccatatttatacccgctctacggcttgggcgagctgccccagggttttgcaagattgagtgccatctatggggggacatatatgctgaacaaacctgtggatgacatcatcatggagaacggcaaggtggtgggcgtgaagtctgagggagaggtggcccgctgcaagcagctgatctgtgaccccagctacatcccggaccgtgtgcggaaggctggccaggttatccgcatcatctgtatccttagccaccccatcaagaacaccaacgacgccaactcctgccaaataatcatcccccagaaccaggtcaacaggaagtcagacatctacgtgtgcatgatctcctatgcacacaacgtggcggcccagggcaagtacatagctattgccagcactactgtggagaccacggaccctgaaaaggaggtggagccggctctggagctgttggagcccattgaccagaagtttgtggctatcagtgacttgtatgagcccattgatgatggttgtgagagccaggtgttctgttcctgctcctacgatgccaccacacactttgagacaacctgcaacgacatcaaagacatctacaaacgcatggctggcacggcctttgactttgagaacatgaagcgcaaacagaacgacgtctttggagaagctgagcagtgattgtggccgcccccagcccctgctgccccagcctgtgtctgttctcctcgagggctccagcatcctctgcttcccccaccacgttcccatcacccacctcattgatccactgaccaaatccttaaccctagcgatggcttgggagatggggggttggatagcatcctctttcttggcccttccttatcctaggaaaagagggttcctctccttgtgtgtgtctcttccccccacccctaattcttctgctctgtttgggaagacgtggaggaaaaggtgacttctgcccccaccgctcttacccccactgtagtggcctttggagatgcccccacctcccccccaccaactctcgcgtgttggagagaaggggccctcccagcacaaagttgcattcctcccccctaatttattctaatttattaactttgacccaccctttctgagcctgcagccttcccgtgtggcctgagggctgtcgagtgagctgccccagcccctcccagcccttgcccagcctgggggagtggggaaggcttgggcatggccccgttggaggttgatttgctgttttgtttcttgtctttgtgttctgtggtacttgctgagagaaaagaaaagtgagccaagcagaaggaggtgggaaaacggacccaaaccccagtgtgccctgccccatgcctttcctttagtggtgggaaacccttatcttgcaaagtgaatgtgtccccttccccaccctctagtgtatttcacagaaaacaaaacctcccaataaaacggttgaaacctgaaaaaaaaaaaaaaaaaaaaaaaaaaaaaaaaaaaaaaaactggtgggggcgcgcgcccggggcccttgaaaaagctttttaaaaccaattcgcggtgggcgcgcgcgggggcccacggctagggcaacgggagaaaggggaaaagggggtccccgagagggaaaccggggccagggaaaagaggggcggggaatcttacacacaataaaaaaagcccgcggggggggaaacacgaggaaggggggctgtgagaaaacaaattcccacaagagggggagagccccgagaggggggcaacaaacaggggggcaccataaccacaacaggaggaggcacaacagcgagagcccagaaaaactaaaatttaagccccacgtcatgggggc

SEQ ID NO: 331876 - DNA, 2904 bp, Homo sapiens
ttcctgggccgcagcaccggccgccggcccgccccgcccgccccgccccgcgcctctctagactctcggcgagcagcgtcgcccgcggagccgcgctggtgctgtggcccgggccctggcagccctcccgggaggcgagccggggaggcggtggcccctgccggttgcggcggggcgcgggaagaggcgggactctttgacgcggcggaggggtcgggcgacggccgacgcgccgccatctttggtccagtgcggtggcggcggcggcggtggcggcggcgactgctgcggtgaaggaggaggaggagccgagcgggcgctggcaccgaggcctgaccatggacgaggaatacgatgtgatcgtgctggggaccggtctcaccgaatgcatcctgtcgggcatcatgtctgtgaacgggaagaaggtgctgcacatggaccggaacccctactacgggggcgagagctcctccatcacacccctggaggagctgtataagcgttttcagttgctggaggggccccctgagtcgatgggccgaggccgagactggaatgttgacctgattcccaaattcctcatggctaacgggcagctggtaaagatgctactgtatacagaggtgactcgctacctggacttcaaggtggtggagggcagctttgtctacaaggggggcaagatctacaaagtgccgtccactgagactgaggccttggcttccaatctgatgggcatgtttgagaaacggcgcttccgcaagttcctggtgtttgtggcaaacttcgatgagaatgaccccaagacctttgagggcgttgacccccagactaccagcatgcgtgacgtctaccggaagtttgatctgggccaggatgtcatcgatttcactggccatgccctggcgctctaccgcactgatgactacctggaccagccctgccttgagaccgtcaaccgcatcaagttgtacagtgagtccctggcccggtatggcaagagcccatatttatacccgctctacggcttgggcgagctgccccagggttttgcaagattgagtgccatctatggggggacatatatgctgaacaaacctgtggatgacatcatcatggagaacggcaaggtggtgggcgtgaagtctgagggagaggtgagcccttcccgtgcatgcagtgcagtcccatggttgaggcggggcttggtcactttctctgtgctgtcgagtctcctgctgcacagccccaagggtcttggagctgggaactgggggtccagaagtcttcagagtcatgactgtgggtgagaggtctctttcagaggccacatgccatgtctgtggtgcagaaagtgttcttgatcacagtgcctctggggggcgggggggcgggcacccagcccgtgcgtcaaggcccacctatctgagcggcagggtagggccatgcattcaggaggggcagtagtgatggctccgaggaacgtcttgtctgccagagctgcctgcccttgctgtgagcgcagccccacgtctacctaagggagggatgtgacaggggcgaggacttctggtgccttctcaggtggcccgctgcaagcagctgatctgtgaccccagctacatcccggaccgtgtgcggaaggctggccaggttatccgcatcatctgtatccttagccaccccatcaagaacaccaacgacgccaactcctgccaaataatcatcccccagaaccaggtcaacaggaagtcagacatctacgtgtgcatgatctcctatgcacacaacgtggcggcccagggcaagtacatagctattgccagcactactgtggagaccacggaccctgaaaaggaggtggagccggctctggagctgttggagcccattgaccagaagtttgtggctatcagtgacttgtatgagcccattgatgatggttgtgagagccaggtgttctgttcctgctcctacgatgccaccacacactttgagacaacctgcaacgacatcaaagacatctacaaacgcatggctggcacggcctttgactttgagaacatgaagcgcaaacagaacgacgtctttggagaagctgagcagtgattgtggccgcccccagcccctgctgccccagcctgtgtctgttctcctcgagggctccagcatcctctgcttcccccaccacgttcccatcacccacctcattgatccactgaccaaatccttaaccctagcgatggcttgggagatggggggttggatagcatcctctttcttggcccttccttatcctaggaaaagagggttcctctccttgtgtgtgtctcttccccccacccctaattcttctgctctgtttgggaagacgtggaggaaaaggtgacttctgcccccaccgctcttacccccactgtagtggcctttggagatgcccccacctcccccccaccaactctcgcgtgttggagagaaggggccctcccagcacaaagttgcattcctcccccctaatttattctaatttattaactttgacccaccctttctgagcctgcagccttcccgtgtggcctgagggctgtcgagtgagctgccccagcccctcccagcccttgcccagcctgggggagtggggaaggcttgggcatggccccgttggaggttgatttgctgttttgtttcttgtctttgtgttctgtggtacttgctgagagaaaagaaaagtgagccaagcagaaggaggtgggaaaacggacccaaaccccagtgtgccctgccccatgcctttcctttagtggtgggaaacccttatcttgcaaagtgaatgtgtccccttccccaccctctagtgtatttcacagaaaacaaaacctcccaataaaacggttgaaacctgaa

SEQ ID NO: 331877 - DNA, 2466 bp, Homo sapiens
ttcctgggccgcagcaccggccgccggcccgccccgcccgccccgccccgcgcctctctagactctcggcgagcagcgtcgcccgcggagccgcgctggtgctgtggcccgggccctggcagccctcccgggaggcgagccggggaggcggtggcccctgccggttgcggcggggcgcgggaagaggcgggactctttgacgcggcggaggggtcgggcgacggccgacgcgccgccatctttggtccagtgcggtggcggcggcggcggtggcggcggcgactgctgcggtgaaggaggaggaggagccgagcgggcgctggcaccgaggcctgaccatggacgaggaatacgatgtgatcgtgctggggaccggtctcaccgaatgcatcctgtcgggcatcatgtctgtgaacgggaagaaggtgctgcacatggaccggaacccctactacgggggcgagagctcctccatcacacccctggaggagctgtataagcgttttcagttgctggaggggccccctgagtcgatgggccgaggccgagactggaatgttgacctgattcccaaattcctcatggctaacgggcagctggtaaagatgctactgtatacagaggtgactcgctacctggacttcaaggtggtggagggcagctttgtctacaaggggggcaagatctacaaagtgccgtccactgagactgaggccttggcttccaatctgatgggcatgtttgagaaacggcgcttccgcaagttcctggtgtttgtggcaaacttcgatgagaatgaccccaagacctttgagggcgttgacccccagactaccagcatgcgtgacgtctaccggaagtttgatctgggccaggatgtcatcgatttcactggccatgccctggcgctctaccgcactgatgactacctggaccagccctgccttgagaccgtcaaccgcatcaagttgtacagtgagtccctggcccggtatggcaagagcccatatttatacccgctctacggcttgggcgagctgccccagggttttgcaagattgagtgccatctatggggggacatatatgctgaacaaacctgtggatgacatcatcatggagaacggcaaggtggtgggcgtgaagtctgagggagaggtggcccgctgcaagcagctgatctgtgaccccagctacatcccggaccgtgtgcggaaggctggccaggttatccgcatcatctgtatccttagccaccccatcaagaacaccaacgacgccaactcctgccaaataatcatcccccagaaccaggtcaacaggaagtcagacatctacgtgtgcatgatctcctatgcacacaacgtggcggcccagggcaagtacatagctattgccagcactactgtggagaccacggaccctgaaaaggaggtggagccggctctggagctgttggagcccattgaccagaagtttgtggctatcagtgacttgtatgagcccattgatgatggttgtgagagccaggtgttctgttcctgctcctacgatgccaccacacactttgagacaacctgcaacgacatcaaagacatctacaaacgcatggctggcacggcctttgactttgagaacatgaagcgcaaacagaacgacgtctttggagaagctgagcagtgattgtggccgcccccagcccctgctgccccagcctgtgtctgttctcctcgagggctccagcatcctctgcttcccccaccacgttcccatcacccacctcattgatccactgaccaaatccttaaccctagcgatggcttgggagatggggggttggatagcatcctctttcttggcccttccttatcctaggaaaagagggttcctctccttgtgtgtgtctcttccccccacccctaattcttctgctctgtttgggaagacgtggaggaaaaggtgacttctgcccccaccgctcttacccccactgtagtggcctttggagatgcccccacctcccccccaccaactctcgcgtgttggagagaaggggccctcccagcacaaagttgcattcctcccccctaatttattctaatttattaactttgacccaccctttctgagcctgcagccttcccgtgtggcctgagggctgtcgagtgagctgccccagcccctcccagcccttgcccagcctgggggagtggggaaggcttgggcatggccccgttgaagcagcctagtacctgtctcagagtccgcggtactgctgaaccacacaaaggggccacgaccggaggtggcaacggaccaacccaagtgcctgccatgcctccctagtgggggaacctcactggagagatgggccctaccccccaagattccaaccacacacacagacggggcaccctagcccaacccggcgccgccccacacaggacccacgcgcccccccacgcgc

SEQ ID NO: 331878 - DNA, 2709 bp, Homo sapiens
ttcctgggccgcagcaccggccgccggcccgccccgcccgccccgccccgcgcctctctagactctcggcgagcagcgtcgcccgcggagccgcgctggtgctgtggcccgggccctggcagccctcccgggaggcgagccggggaggcggtggcccctgccggttgcggcggggcgcgggaagaggcgggactctttgacgcggcggaggggtcgggcgacggccgacgcgccgccatctttggtccagtgcggtggcggcggcggcggtggcggcggcgactgctgcggtgaaggaggaggaggagccgagcgggcgctggcaccgaggcctgaccatggacgaggaatacgatgtgatcgtgctggggaccggtctcaccgaatgcatcctgtcgggcatcatgtctgtgaacgggaagaaggtgctgcacatggaccggaacccctactacgggggcgagagctcctccatcacacccctggaggagctgtataagcgttttcagttgctggaggggccccctgagtcgatgggccgaggccgagactggaatgttgacctgattcccaaattcctcatggctaacgggcagctggtaaagatgctactgtatacagaggtgactcgctacctggacttcaaggtggtggagggcagctttgtctacaaggggggcaagatctacaaagtgccgtccactgagactgaggccttggcttccaatctgatgggcatgtttgagaaacggcgcttccgcaagttcctggtgtttgtggcaaacttcgatgagaatgaccccaagacctttgagggcgttgacccccagactaccagcatgcgtgacgtctaccggaagtttgatctgggccaggatgtcatcgatttcactggccatgccctggcgctctaccgcactgatgagtgaggggaagctgggtggtggcagccccctcgcccggcccgcccccacccttcccacacctgcctgctgtccccctgccccgcatgtctcttgtactcagccacaggctcacctatcaccctttccatttcccccttgcatttgatcctcatcttccccaggccattcagggtggtgggaagactggcctggtacctgggtgggggtaaatcaggggtgctgctattccccctacctggaccagccctgccttgagaccgtcaaccgcatcaagttgtacagtgagtccctggcccggtatggcaagagcccatatttatacccgctctacggcttgggcgagctgccccagggttttgcaagattgagtgccatctatggggggacatatatgctgaacaaacctgtggatgacatcatcatggagaacggcaaggtggtgggcgtgaagtctgagggagaggtggcccgctgcaagcagctgatctgtgaccccagctacatcccggaccgtgtgcggaaggctggccaggttatccgcatcatctgtatccttagccaccccatcaagaacaccaacgacgccaactcctgccaaataatcatcccccagaaccaggtcaacaggaagtcagacatctacgtgtgcatgatctcctatgcacacaacgtggcggcccagggcaagtacatagctattgccagcactactgtggagaccacggaccctgaaaaggaggtggagccggctctggagctgttggagcccattgaccagaagtttgtggctatcagtgacttgtatgagcccattgatgatggttgtgagagccaggtgttctgttcctgctcctacgatgccaccacacactttgagacaacctgcaacgacatcaaagacatctacaaacgcatggctggcacggcctttgactttgagaacatgaagcgcaaacagaacgacgtctttggagaagctgagcagtgattgtggccgcccccagcccctgctgccccagcctgtgtctgttctcctcgagggctccagcatcctctgcttcccccaccacgttcccatcacccacctcattgatccactgaccaaatccttaaccctagcgatggcttgggagatggggggttggatagcatcctctttcttggcccttccttatcctaggaaaagagggttcctctccttgtgtgtgtctcttccccccacccctaattcttctgctctgtttgggaagacgtggaggaaaaggtgacttctgcccccaccgctcttacccccactgtagtggcctttggagatgcccccacctcccccccaccaactctcgcgtgttggagagaaggggccctcccagcacaaagttgcattcctcccccctaatttattctaatttattaactttgacccaccctttctgagcctgcagccttcccgtgtggcctgagggctgtcgagtgagctgccccagcccctcccagcccttgcccagcctgggggagtggggaaggcttgggcatggccccgttggaggttgatttgctgttttgtttcttgtctttgtgttctgtggtacttgctgagagaaaagaaaagtgagccaagcagaaggaggtgggaaaacggacccaaaccccagtgtgccctgccccatgcctttcctttagtggtgggaaacccttatcttgcaaagtgaatgtgtccccttccccaccctctagtgtatttcacagaaaacaaaacctcccaataaaacggttgaaacctgaa

SEQ ID NO: 331879 - DNA, 2140 bp, Homo sapiens
ttcctgggccgcagcaccggccgccggcccgccccgcccgccccgccccgcgcctctctagactctcggcgagcagcgtcgcccgcggagccgcgctggtgctgtggcccgggccctggcagccctcccgggaggcgagccggggaggcggtggcccctgccggttgcggcggggcgcgggaagaggcgggactctttgacgcggcggaggggtcgggcgacggccgacgcgccgccatctttggtccagtgcggtggcggcggcggcggtggcggcggcgactgctgcggtgaaggaggaggaggagccgagcgggcgctggcaccgaggcctgaccatggacgaggaatacgatgtgatcgtgctggggaccggtctcaccgaatgcatcctgtcgggcatcatgtctgtgaacgggaagaaggtgctgcacatggaccggaacccctactacgggggcgagagctcctccatcacacccctggaggagctgtataagcgttttcagttgctggaggggccccctgagtcgatgggccgaggccgagactggaatgttgacctgattcccaaattcctcatggctaacgggcagctggtaaagatgctactgtatacagaggtgactcgctacctggacttcaaggtggtggagggcagctttgtctacaaggggggcaagatctacaaagtgccgtccactgagactgaggccttggcttccaatctgatgggcatgtttgagaaacggcgcttccgcaagttcctggtgtttgtggcaaacttcgatgagaatgaccccaagacctttgagggcgttgacccccagactaccagcatgcgtgacgtctaccggaagtttgatctgggccaggatgtcatcgatttcactggccatgccctggcgctctaccgcactgatgactacctggaccagccctgccttgagaccgtcaaccgcatcaagttgtacagtgagtccctggcccggtatggcaagagcccatatttatacccgctctacggcttgggcgagctgccccagggttttgcaagattgagtgccatctatggggggacatatatgctgaacaaacctgtggatgacatcatcatggagaacggcaaggtggtgggcgtgaagtctgagggagaggtggcccgctgcaagcagctgatctgtgaccccagctacatcccggaccgtgtgcggaaggctggccaggttatccgcatcatctgtatccttagccaccccatcaagaacaccaacgacgccaactcctgccaaataatcatcccccagaaccaggtcaacaggaagtcagacatctacgtgtgcatgatctcctatgcacacaacgtggcggcccagggcaagtacatagctattgccagcactactgtggagaccacggaccctgaaaaggaggtggagccggctctggagctgttggagcccattgaccagaagtttgtggctatcagtgacttgtatgagcccattgatgatggttgtgagagccaggtgttctgttcctgctcctacgatgccaccacacactttgagacaacctgcaacgacatcaaagacatctacaaacgcatggctggcacggcctttgactttgagaacatgaagcgcaaacagaacgacgtctttggagaagctgagcagtgattgtggccgcccccagcccctgctgccccagcctgtgtctgttctcctcgagggctccagcatcctctgcttcccccaccacgttcccatcacccacctcattgatccactgaccaaatccttaaccctagcgatggcttgggagatggggggttggatagcatcctctttcttggcccttccttatcctaggaaaagagggttcctctccttgtgtgtgtctcttccccccacccctaattcttctgctctgtttgggaagacgtggaggaaaaggtgacttctgcccccaccgctcttacccccactgtagtggcctttggagatgcccagcttcccacaatccgcgtgtggaagaggggccttcgcaagtgatcctccccatatctatgataattgccatgcacgagcgcgcttcggggcggggtgtgaggaggctgacaccttgaccactacaa

SEQ ID NO: 331880 - DNA, 2797 bp, Homo sapiens
ttcctgggccgcagcaccggccgccggcccgccccgcccgccccgccccgcgcctctctagactctcggcgagcagcgtcgcccgcggagccgcgctggtgctgtggcccgggccctggcagccctcccgggaggcgagccggggaggcggtggcccctgccggttgcggcggggcgcgggaagaggcgggactctttgacgcggcggaggggtcgggcgacggccgacgcgccgccatctttggtccagtgcggtggcggcggcggcggtggcggcggcgactgctgcggtgaaggaggaggaggagccgagcgggcgctggcaccgaggcctgaccatggacgaggaatacgatgtgatcgtgctggggaccggtctcaccgaatgcatcctgtcgggcatcatgtctgtgaacgggaagaaggtgctgcacatggaccggaacccctactacgggggcgagagctcctccatcacacccctggaggagctgtataagcgttttcagttgctggaggggccccctgagtcgatgggccgaggccgagactggaatgttgacctgattcccaaattcctcatggctaacgggcagctggtaaagatgctactgtatacagaggtgactcgctacctggacttcaaggtggtggagggcagctttgtctacaaggggggcaagatctacaaagtgccgtccactgagactgaggccttggcttccaggcctccactgaatccccgagacatcgccaagtgtctgagccaggaaggcccttagagcccatccaggccaatcccctcttcatccagatctgatgggcatgtttgagaaacggcgcttccgcaagttcctggtgtttgtggcaaacttcgatgagaatgaccccaagacctttgagggcgttgacccccagactaccagcatgcgtgacgtctaccggaagtttgatctgggccaggatgtcatcgatttcactggccatgccctggcgctctaccgcactgatgagtgaggggaagctgggtggtggcagccccctcgcccggcccgcccccacccttcccacacctgcctgctgtccccctgccccgcatgtctcttgtactcagccacaggctcacctatcaccctttccatttcccccttgcatttgatcctcatcttccccaggccattcagggtggtgggaagactggcctggtacctgggtgggggtaaatcaggggtgctgctattccccctacctggaccagccctgccttgagaccgtcaaccgcatcaagttgtacagtgagtccctggcccggtatggcaagagcccatatttatacccgctctacggcttgggcgagctgccccagggttttgcaagattgagtgccatctatggggggacatatatgctgaacaaacctgtggatgacatcatcatggagaacggcaaggtggtgggcgtgaagtctgagggagaggtggcccgctgcaagcagctgatctgtgaccccagctacatcccggaccgtgtgcggaaggctggccaggttatccgcatcatctgtatccttagccaccccatcaagaacaccaacgacgccaactcctgccaaataatcatcccccagaaccaggtcaacaggaagtcagacatctacgtgtgcatgatctcctatgcacacaacgtggcggcccagggcaagtacatagctattgccagcactactgtggagaccacggaccctgaaaaggaggtggagccggctctggagctgttggagcccattgaccagaagtttgtggctatcagtgacttgtatgagcccattgatgatggttgtgagagccaggtgttctgttcctgctcctacgatgccaccacacactttgagacaacctgcaacgacatcaaagacatctacaaacgcatggctggcacggcctttgactttgagaacatgaagcgcaaacagaacgacgtctttggagaagctgagcagtgattgtggccgcccccagcccctgctgccccagcctgtgtctgttctcctcgagggctccagcatcctctgcttcccccaccacgttcccatcacccacctcattgatccactgaccaaatccttaaccctagcgatggcttgggagatggggggttggatagcatcctctttcttggcccttccttatcctaggaaaagagggttcctctccttgtgtgtgtctcttccccccacccctaattcttctgctctgtttgggaagacgtggaggaaaaggtgacttctgcccccaccgctcttacccccactgtagtggcctttggagatgcccccacctcccccccaccaactctcgcgtgttggagagaaggggccctcccagcacaaagttgcattcctcccccctaatttattctaatttattaactttgacccaccctttctgagcctgcagccttcccgtgtggcctgagggctgtcgagtgagctgccccagcccctcccagcccttgcccagcctgggggagtggggaaggcttgggcatggccccgttggaggttgatttgctgttttgtttcttgtctttgtgttctgtggtacttgctgagagaaaagaaaagtgagccaagcagaaggaggtgggaaaacggacccaaaccccagtgtgccctgccccatgcctttcctttagtggtgggaaacccttatcttgcaaagtgaatgtgtccccttccccaccctctagtgtatttcacagaaaacaaaacctcccaataaaacggttgaaacctgaa

SEQ ID NO: 331881 - DNA, 1814 bp, Homo sapiens
cgagtctccacaaatgtgacttgctcagttcccggcagcaccaggactgggcccagggtcccagaaccttgagtcagggcttagctgggagctgacctatctccagagagtccattctggtccctcaggctgtcttggtgcggacatgaatccctcatgccccctcccgctggcccttggcagtgtattctgagcagaagctccagagaggaaagagcccgcggagatggggccagcgttcacggcagtgacaagagctgggatgaatcccggcgtctcctacctgctgcctgcctggggcagccttctttgcactttggtggaggaagggtgcagtggaattggtccccgtttctcctgggaggggccttcaccggagctgctctcaccacagattgagtgccatctatggggggacatatatgctgaacaaacctgtggatgacatcatcatggagaacggcaaggtggtgggcgtgaagtctgagggagaggtggcccgctgcaagcagctgatctgtgaccccagctacatcccggaccgtgtgcggaaggctggccaggttatccgcatcatctgtatccttagccaccccatcaagaacaccaacgacgccaactcctgccaaataatcatcccccagaaccaggtcaacaggaagtcagacatctacgtgtgcatgatctcctatgcacacaacgtggcggcccagggcaagtacatagctattgccagcactactgtggagaccacggaccctgaaaaggaggtggagccggctctggagctgttggagcccattgaccagaagtttgtggctatcagtgacttgtatgagcccattgatgatggttgtgagagccaggtgttctgttcctgctcctacgatgccaccacacactttgagacaacctgcaacgacatcaaagacatctacaaacgcatggctggcacggcctttgactttgagaacatgaagcgcaaacagaacgacgtctttggagaagctgagcagtgattgtggccgcccccagcccctgctgccccagcctgtgtctgttctcctcgagggctccagcatcctctgcttcccccaccacgttcccatcacccacctcattgatccactgaccaaatccttaaccctagcgatggcttgggagatggggggttggatagcatcctctttcttggcccttccttatcctaggaaaagagggttcctctccttgtgtgtgtctcttccccccacccctaattcttctgctctgtttgggaagacgtggaggaaaaggtgacttctgcccccaccgctcttacccccactgtagtggcctttggagatgcccccacctcccccccaccaactctcgcgtgttggagagaaggggccctcccagcacaaagttgcattcctcccccctaatttattctaatttattaactttgacccaccctttctgagcctgcagccttcccgtgtggcctgagggctgtcgagtgagctgccccagcccctcccagcccttgcccagcctgggggagtggggaaggcttgggcatggccccgttggaggttgatttgctgttttgtttcttgtctttgtgttctgtggtacttgctgagagaaaagaaaagtgagccaagcagaaggaggtgggaaaacggacccaaaccccagtgtgccctgccccatgcctttcctttagtggtgggaaacccttatcttgcaaagtgaatgtgtccccttccccaccctctagtgtatttcacagaaaacaaaacctcccaataaaacggttgaaacctgaa

SEQ ID NO: 331882 - DNA, 1768 bp, Homo sapiens
  misc_feature (1712)..(1712): n is a, c, g, or t
ttcctgggccgcagcaccggccgccggcccgccccgcccgccccgccccgcgcctctctagactctcggcgagcagcgtcgcccgcggagccgcgctggtgctgtggcccgggccctggcagccctcccgggaggcgagccggggaggcggtggcccctgccggttgcggcggggcgcgggaagaggcgggactctttgacgcggcggaggggtcgggcgacggccgacgcgccgccatctttggtccagtgcggtggcggcggcggcggtggcggcggcgactgctgcggtgaaggaggaggaggagccgagcgggcgctggcaccgaggcctgaccatggacgaggaatacgatgtgatcgtgctggggaccggtctcaccgaatgcatcctgtcgggcatcatgtctgtgaacgggaagaaggtgctgcacatggaccggaacccctactacgggggcgagagctcctccatcacacccctggaggagctgtataagcgttttcagttgctggaggggccccctgagtcgatgggccgaggccgagactggaatgttgacctgattcccaaattcctcatggctaacgggcagctggtaaagatgctactgtatacagaggtgactcgctacctggacttcaaggtggtggagggcagctttgtctacaaggggggcaagatctacaaagtgccgtccactgagactgaggccttggcttccaatctgatgggcatgtttgagaaacggcgcttccgcaagttcctggtgtttgtggcaaacttcgatgagaatgaccccaagacctttgagggcgttgacccccagactaccagcatgcgtgacgtctaccggaagtttgatctgggccaggatgtcatcgatttcactggccatgccctggcgctctaccgcactgatgactacctggaccagccctgccttgagaccgtcaaccgcatcaagttgtacagtgagtccctggcccggtatggcaagagcccatatttatacccgctctacggcttgggcgagctgccccagggttttgcaagattgagtgccatctatggggggacatatatgctgaacaaacctgtggatgacatcatcatggagaacggcaaggtggtgggcgtgaagtctgagggagaggtggcccgctgcaagcagctgatctgtgaccccagctacatcccggaccgtgtgcggaaggctggccaggttatccgcatcatctgtatccttagccaccccatcaagaacaccaacgacgccaactcctgccaaataatcatcccccagaaccaggtcaacaggaagtcagacatctacgtgtgcatgatctcctatgcacacaacgtggcggcccagggcaagtacatagctattgccagcactactgtggagaccacggaccctgaaaaggaggtggagccggctctggagctgttggagcccattgaccagaagtttgtggctatcagtgacttgtatgagcccattgatgatggttgtgagagccaggtgttctgttcctgctcctacgatgccaccacacactttgagacaacctgcaacgacatcaaagacatctacaaacgcatggctggcacggcctttgactttgagaacatgaagcgcaaacagaacgacgtctttggagaagctgagcagtgattgtggccgcccccagcccgcacatccgtnctggcccgacacatccgtactggcccgacacatcgtactggcccgacacatccgta

SEQ ID NO: 331883 - DNA, 1427 bp, Homo sapiens
  misc_feature (1371)..(1371): n is a, c, g, or t
  misc_feature (1396)..(1396): n is a, c, g, or t
  misc_feature (1417)..(1417): n is a, c, g, or t
ttcctgggccgcagcaccggccgccggcccgccccgcccgccccgccccgcgcctctctagactctcggcgagcagcgtcgcccgcggagccgcgctggtgctgtggcccgggccctggcagccctcccgggaggcgagccggggaggcggtggcccctgccggttgcggcggggcgcgggaagaggcgggactctttgacgcggcggaggggtcgggcgacggccgacgcgccgccatctttggtccagtgcggtggcggcggcggcggtggcggcggcgactgctgcggtgaaggaggaggaggagccgagcgggcgctggcaccgaggcctgaccatggacgaggaatacgatgtgatcgtgctggggaccggtctcaccgaatgcatcctgtcgggcatcatgtctgtgaacgggaagaaggtgctgcacatggaccggaacccctactacgggggcgagagctcctccatcacacccctggaggagctgtataagcgttttcagttgctggaggggccccctgagtcgatgggccgaggccgagactggaatgttgacctgattcccaaattcctcatggctaacgggcagctggtaaagatgctactgtatacagaggtgactcgctacctggacttcaaggtggtggagggcagctttgtctacaaggggggcaagatctacaaagtgccgtccactgagactgaggccttggcttccaatctgatgggcatgtttgagaaacggcgcttccgcaagttcctggtgtttgtggcaaacttcgatgagaatgaccccaagacctttgagggcgttgacccccagactaccagcatgcgtgacgtctaccggaagtttgatctgggccaggatgtcatcgatttcactggccatgccctggcgctctaccgcactgatgactacctggaccagccctgccttgagaccgtcaaccgcatcaagttgtacagtgagtccctggcccggtatggcaagagcccatatttatacccgctctacggcttgggcgagctgccccagggttttgcaagattgagtgccatctatggggggacatatatgctgaacaaacctgtggatgacatcatcatggagaacggcaaggtggtgggcgtgaagtctgagggagaggtggcccgctgcaagcagctgatctgtgaccccagctacatcccggaccgtgtgcggaaggctggccaggttatccgcatcatctgtatccttagccaccccatcaagaacaccaacgacgccaactcctgccaaataatcatcccccagaaccaggtcaacaggaagtcaggacatctaacgtgtggcatgatctcctatggcacaacaacgntgggcggggcccaaggggcaaggtncaattagcctaattggccaangcaacttaac

SEQ ID NO: 331884 - DNA, 1385 bp, Homo sapiens
ttcctgggccgcagcaccggccgccggcccgccccgcccgccccgccccgcgcctctctagactctcggcgagcagcgtcgcccgcggagccgcgctggtgctgtggcccgggccctggcagccctcccgggaggcgagccggggaggcggtggcccctgccggttgcggcggggcgcgggaagaggcgggactctttgacgcggcggaggggtcgggcgacggccgacgcgccgccatctttggtccagtgcggtggcggcggcggcggtggcggcggcgactgctgcggtgaaggaggaggaggagccgagcgggcgctggcaccgaggcctgaccatggacgaggaatacgatgtgatcgtgctggggaccggtctcaccgaatgcatcctgtcgggcatcatgtctgtgaacgggaagaaggtgctgcacatggaccggaacccctactacgggggcgagagctcctccatcacacccctggaggagctgtataagcgttttcagttgctggaggggccccctgagtcgatgggccgaggccgagactggaatgttgacctgattcccaaattcctcatggctaacgggcagctggtaaagatgctactgtatacagaggtgactcgctacctggacttcaaggtggtggagggcagctttgtctacaaggggggcaagatctacaaagtgccgtccactgagactgaggccttggcttccaatctgatgggcatgtttgagaaacggcgcttccgcaagttcctggtgtttgtggcaaacttcgatgagaatgaccccaagacctttgagggcgttgacccctaattcttctgctctgtttgggaagacgtggaggaaaaggtgacttctgcccccaccgctcttacccccactgtagtggcctttggagatgcccccacctcccccccaccaactctcgcgtgttggagagaaggggccctcccagcacaaagttgcattcctcccccctaatttattctaatttattaactttgacccaccctttctgagcctgcagccttcccgtgtggcctgagggctgtcgagtgagctgccccagcccctcccagcccttgcccagcctgggggagtggggaaggcttgggcatggccccgttggaggttgatttgctgttttgtttcttgtctttgtgttctgtggtacttgctgagagaaaagaaaagtgagccaagcagaaggaggtgggaaaacggacccaaaccccagtgtgccctgccccatgcctttcctttagtggtgggaaacccttatcttgcaaagtgaatgtgtccccttccccaccctctagtgtatttcacagaaaacaaaacctcccaataaaacggttgaaacctgaa

SEQ ID NO: 331885 - DNA, 973 bp, Homo sapiens
  misc_feature (936)..(936): n is a, c, g, or t
  misc_feature (964)..(966): n is a, c, g, or t
ttcctgggccgcagcaccggccgccggcccgccccgcccgccccgccccgcgcctctctagactctcggcgagcagcgtcgcccgcggagccgcgctggtgctgtggcccgggccctggcagccctcccgggaggcgagccggggaggcggtggcccctgccggttgcggcggggcgcgggaagaggcgggactctttgacgcggcggaggggtcgggcgacggccgacgcgccgccatctttggtccagtgcggtggcggcggcggcggtggcggcggcgactgctgcggtgaaggaggaggaggagccgagcgggcgctggcaccgaggcctgaccatggacgaggaatacgatgtgatcgtgctggggaccggtctcaccgaatgcatcctgtcgggcatcatgtctgtgaacgggaagaaggtgctgcacatggaccggaacccctactacgggggcgagagctcctccatcacacccctggaggagcctcccccctaatttattctaatttattaactttgacccaccctttctgagcctgcagccttcccgtgtggcctgagggctgtcgagtgagctgccccagcccctcccagcccttgcccagcctgggggagtggggaaggcttgggcatggccccgttggaggttgatttgctgttttgtttcttgtctttgtgttctgtggtacttgctgagagaaaagaaaagtgagccaagcagaaggaggtgggaaaacggacccaaaccccagtgtgccctgccccatgcctttcctttagtggtgggaaacccttatcttgcaaagtgaatgtgtccccttccccaccctctagtgtatttcacagaaaacaaaacctcccaataaaacggttgaaacctgaaaaaaaaaaaaaaaaaaaaaaaaaaaaaaaaaaaaaaaaccgggggntttttttggggggggggaaaaaggggtnnnaaggggc

SEQ ID NO: 331886 - DNA, 793 bp, Homo sapiens
ttcctgggccgcagcaccggccgccggcccgccccgcccgccccgccccgcgcctctctagactctcggcgagcagcgtcgcccgcggagccgcgctggtgctgtggcccgggccctggcagccctcccgggaggcgagccggggaggcggtggcccctgccggttgcggcggggcgcgggaagaggcgggactctttgacgcggcggaggggtcgggcgacggccgacgcgccgccatctttggtccagtgcggtggcggcggcggcggtggcggcggcgactgctgcggtgaaggaggaggaggagccgagcgggcgctggcaccgaggcctgaccatggacgaggaatacgatgtgatcgtgctggggaccggtctcaccgaatgcatcctgtcgggcatcatgtctgtgaacgggaagaaggtgctgcacatggaccggaacccctactacgggggcgagagctcctccatcacacccctggaggagctgtataagcgttttcagttgctggaggggccccctgagtcgatgggccgaggccgagactggaatgttgacctgattcccaaattcctcatggctaacgggcagctggtaaagatgctactgtatacagaggtgactcgctacctggacttcaaggtggtggagggcagctttgtctacaaggggggcaagatctacaaagtgccgtccactgagactgaggccttggcttccaccaatctgatgggcattttgagaacgcgcttccgcagtagacgttccgagatcctgtagagtcacct

SEQ ID NO: 331887 - DNA, 102 bp, Homo sapiens
ctctaccttgttcaggtaagcttcatccacatccttcttgatgaggacaaattcattctccatctctgtacgcttattgatctcatcctcatacttgttctt

SEQ ID NO: 331888 - DNA, 452 bp, Homo sapiens
agtctcgctctgtcacctaggctggagtgcagtgacacgatctcagctcactgcaatctctgcctcccgggttcaagcagttctcctgcctcagcctcctgagtagctgggactacaggcatgcaccaccacacccagctaatttttttgcatttttagtggagacggagtttcgccatgttggtcaggctggtctcaaactcctaaccgcaaatgatctactcaccttggcctccgaaagtactgagattataggcgtaagccaccccgcccggcctggttctttcaatatatgaatacagcaagtcatttattttagctttatagaggtgtggtctctctgagtcataatcattaaaattcacattcccctaccatagcttcttccagagtatatgaaaactgaagataggtttgcagctcctaatgtgtatttgggtcctgctcaattt

SEQ ID NO: 331889 - DNA, 223 bp, Homo sapiens
tgcctgtaccttcccaccgaccctggttgtgacaaccaatggagtctccagatattgccacatatcccccgggggacaaaatcacccccaggtgagcatcgctgctctaaactgacgcctattgccatggcagctgtgtacatcaatgtcacaggtttgggagctcttgaccatgcagctgaacctttgctgctactctgaagcactaacaggaggtcaagct

SEQ ID NO: 331890 - DNA, 612 bp, Homo sapiens
ggatggggctgccaatggggctgtgggctgggtcttctgaaggagacctcagaggagagacacgagtaggaagggcgaggagacggggcaatctggatcccacatcagtgtccacctcagggcagggctcgatcctgttatctgtaaccagctcaacaaagcaaatactcagaaatgagcatgggagctgagagcaggagacctgtgaggaggtggctgtgggcattcacagagggcagcaggatgccaggcatggcagagcacccagcatgcaaagacgcggctgggctggggactaggtagtgcccaggccggccccgtccctctgagcaggaactctggcagcagctccgcaaacgtggagcagggggacattctccccgccagcccccaggatctccatctcagagggccacaaaggggagcagctatgcccagtctgaggggcagctgaacatctaaaccagccagcaggacattcagctgacagagggtctcgagaccgggctgggaagtctgaccacatcctgggggaccaagaggcgctgaggattctggagcacaggagtggggtggctggtatggccctgtagtcagagccgggtaggactg

SEQ ID NO: 331891 - DNA, 299 bp, Homo sapiens
gtgttctgatgggagctggagctgagagccctgggggccttccaaggaagcctgggctctgagaagtaatgtgaaagtcactaggccaatcaatccttttgtttaacagagcccctaactgaagcccagagagaaataactcaccaaacagcagacagagtctcaaaggaccaggactccagcagagctagggcctgtgactcctagtttgaactccgtattagttaagcgaatctggccctgaaagtaatcctgaactctgaactgcaaccatctacttgagagtccatgtgctctcc

SEQ ID NO: 331892 - DNA, 1691 bp, Homo sapiens
tgcttgacaaagaacttcccaatcctcctccgagccctccagtccctagcccagttcgcccgggcccgcccctagcaacaagatcgcggggaggggccgaggcgaaacacgagccccgcgcccaccaccccagctggcgacgtggctccgcggccccggcttcccccggcagctcagcgaccaatgggcgcgcgagcggggccgcccgcagcttcccagcccgaggcccaggcgcgcccctctgctccggctcggggcgggcactggcggagggactggccagtcccctcctccgcgccggccccaaccctgtcgctgccgccgcgctccgagcccccattcccgagctgccgctgttgtcgctcgctcagcgtctccctcccggccgccctctcctcgggacgatggcgcgcggtgcggccgccgcctggggttagccctggggctgctgctggcgctggtgctggcgccgcgggttctgcgggccaagcccacggtgcgcaaagagcgcgtggtgcggcccgactcggagctgggcgagcggccccctgaggacaaccagagcttccagtacgaccacgaggccttcctgggcaaggaggactccaagaccttcgaccagctcaccccggacgagagcaaggagaggctagggaagattgttgatcgaatcgacaatgatggggatggctttgtcactactgaggagctgaaaacctggatcaaacgggtgcagaaaagatacatctttgataatgtcgccaaagtctggaaggattatgatagggacaaggatgataaaatttcctgggaagaatacaaacaagccacctatggttactacctaggaaaccccgcagagtttcatgattcttcagatcatcacacctttaaaaagatgctgccacgtgatgagagaagattcaaagctgcagacctcaatggtgacctgacagctactcgggaggagttcactgcctttctgcatcctgaagagtttgaacatatgaaggaaattgtggttttggaaaccctggaggacatcgacaagaacggggatgggtttgtggatcaggatgagtatattgcggatatgttttcccatgaggagaatggccctgagccagactgggttttatcagaacgggagcagtttaacgaattccgggatctgaacaaggacgggaagttagacaaagatgagattcgccactggatcctccctcaagattatgatcacgcacaggctgaggccaggcatctggtatatgaatcagacaaaaacaaggatgagaagctaactaaagaggaaatattggagaactggaacatgtttgttggaagccaagctaccaattacggggaagatctcacaaaaaatcatgatgagctttgatagacactcaccagaatatggcagactgtcataggcattctgttattgtcttggattgttgctacaattgtctaatttacagcagttgtgatcccacaaaaagcaagtttatacctcagattggggtataaaaattgtttttcgctcagtatttactggaaaatggacatcactagtctttcagtaagatttctctcaaaacacgtgaaaaccttggtaaattgcaattctttctggggatatattggtacaacatgacttaaaacttttttttttctattaaaacttaaagggg

SEQ ID NO: 331893 - DNA, 462 bp, Homo sapiens
cggacgcgtgggtcgacccacgcgtccggcaatcaagaaagataatgtgaaaaagaaaggaatttagaggtagggaaaagatgaatgtcagacatttgaagaactatagtaaaatgataaacactaaatatacttgagaaaactttcttaatatgccaatgaggtaggcctgatctttgaaatagtgaataggaatacaatgcatttcctcagtgatcactgattagaatgagttggtgggatccttgggaagccaaacggagcggagttctggatcatgtcccatccagtccagtgaatccacgacccgcagacctgcccccccgcaacagcttataccatggaatgaggacaaggtgatactctgagctgtggactgaactggcagacacaacctgtacagattgaaatttcaccttgtaaggaggaagtgaatgaaataaaggatccccctaaggattt

SEQ ID NO: 331894 - DNA, 1124 bp, Homo sapiens
cggacgcgtgggtcgacccacgcgtccggggaaaggggaaattctgattaagcgaaagtggtatcatcctaggtaagcttatttcagaacaagtctaatatttcagattctttcttttcgactttatactctgagttattacttactgtaagtggtgtatatgaaacctccatgcattttccagtatggatctgctaatatgcacagtaaatccatgtctttgtttgtttttctattaaaaagcaatcaagaaagataatgtgaaaaagaaaggaatttagaggtagggaaaagatgaatgtcagacatttgaagaactatagtaaaatgataaacactaaatatacttgagaaaactttcttaatatgccaatgaggtaggcctgatctttgaaatagtgaataggaatacaatgcatttcctcagtgatcactgattagaatgagttggtgggatccttgggaagccaaacggagcggagttctggatcatgtcccatccagtccagtgaatccacgacccgcagacctgcccccccgcaacagcttataccatggaatgaggacaaggtgatactctgagctgtggactgaactggcagacacaacctgtacagattgaaatttcaccttgtaaggaggaagtgaatgaaataaaggatccccctaaggatttgaacaacaaaacaaaacaaaacaaaaaacaaacaaaaaaacaaaaaaaacaaaagacaaaaaacaaacaaaacaacaaacaaacaaacaacgaaccacgaaaaacaacaaacaacgaaacaaaaagaacaacaaaaaaaacacaacgacaaaaaacacacggggggccgccgacttaactccattaactgactacgcaggaggaaacccaaccgcgtaggtaccatccacagacgcagtcatacacgaaagggacgcaccataagggaaagaagagagaaaaacaaacaagaaaagcggtcggcccatattaaccaaaagatgagccagcagccaaagatcacgagtcatcccataagcaggcagacgcacaactgctgggtgtctgacatcaaagacacacaaaccagaaaatagcgcgcgagaacaaactcacggctataaaggac

SEQ ID NO: 331895 - DNA, 2465 bp, Homo sapiens
ttttttttttttgagacagggtcctgctctgtcgcctaggctggagtgcaatggtgcatggtcatggcttgagcctggttaatttttgtatttttactagaaacagggttttgtcatgttgcccaggctgatctcaaacacctggattcaagcaatccgcccatcttgacctcccaaagtgttgggattacagatgtgagccaccgcgcttggccacgattccgtgatggtcaaagaaatcaaaacgtctgtcagctagtgttcagttcaggctgaggtgaaaaaatttttttacttgtaaaatatacataacataaaacttggccgccgcgctccgagcccccattcccgagctgccgctgttgtcgctcgctcagcgtctccctcccggccgccctctcctcgggacgatggcgcgcggtgcggccgccgcctggggttagccctggggctgctgctggcgctggtgctggcgccgcgggttctgcgggccaagcccacggtgcgcaaagagcgcgtggtgcggcccgactcggagctgggcgagcggccccctgaggacaaccagagcttccagtacgaccacgaggccttcctgggcaaggaggactccaagaccttcgaccagctcaccccggacgagagcaaggagaggctagggaagattgttgatcgaatcgacaatgatggggatggctttgtcactactgaggagctgaaaacctggatcaaacgggtgcagaaaagatacatctttgataatgtcgccaaagtctggaaggattatgatagggacaaggatgataaaatttcctgggaagaatacaaacaagccacctatggttactacctaggaaaccccgcagagtttcatgattcttcagatcatcacacctttaaaaagatgctgccacgtgatgagagaagattcaaagctgcagacctcaatggtgacctgacagctactcgggaggagttcactgcctttctgcatcctgaagagtttgaacatatgaaggaaattgtggttttggaaaccctggaggacatcgacaagaacggggatgggtttgtggatcaggatgagtatattgcggatatgttttcccatgaggagaatggccctgagccagactgggttttatcagaacgggagcagtttaacgaattccgggatctgaacaaggacgggaagttagacaaagatgagattcgccactggatcctccctcaagattatgatcacgcacaggctgaggccaggcatctggtatatgaatcagacaaaaacaaggatgagaagctaactaaagaggaaatattggagaactggaacatgtttgttggaagccaagctaccaattacggggaagatctcacaaaaaatcatgatgagctttgatagacactcaccagaatatggcagactgtcataggcattctgttattgtcttggattgttgctacaattgtctaatttacagcagttgtgatcccacaaaaagcaagtttatacctcagattggggtataaaaattgtttttcgctcagtatttactggaaaatggacatcactagtctttcagtaagatttctctcaaaacacgtgaaaaccttggtaaattgcaattctttctggggatatattggtacaacatgacttaaaacttttttttttctattaaaacttaaaggggaacaaaacttgaaaaagccctgttcttcagaaggtgagtgggttgagggaggcagtaatatgaagtgactgctgtgtattttaactaccagattttttatatttgccactgttaaatagttggaaaggggaaattctgattaagcgaaagtggtatcatcctaggtaagcttatttcagaacaagtctaatatttcagattctttcttttcgactttatactctgagttattacttactgtaagtggtgtatatgaaacctccatgcattttccagtatggatctgctaatatgcacagtaaatccatgtctttgtttgtttttctattaaaaagcaatcaagaaagataatgtgaaaaagaaaggaatttagaggtagggaaaagatgaatgtcagacatttgaagaactatagtaaaatgataaacactaaatatacttgagaaaactttcttaatatgccaatgaggtaggcctgatctttgaaatagtgaataggaatacaatgcatttcctcagtgatcactgattagaatgagttggtgggatccttgggaagccaaacggagcggagttctggatcatgtcccatccagtccagtgaatccacgacccgcagacctgcccccccgcaacagcttataccatggaatgaggacaaggtgatactctgagctgtggactgaactggcagacacaacctgtacagattgaaatttcaccttgtaaggaggaagtgaatgaaataaaggatccccctaaggattt

SEQ ID NO: 331896 - DNA, 2742 bp, Homo sapiens
ttttttttttttgagacagggtcctgctctgtcgcctaggctggagtgcaatggtgcatggtcatggcttgagcctggttaatttttgtatttttactagaaacagggttttgtcatgttgcccaggctgatctcaaacacctggattcaagcaatccgcccatcttgacctcccaaagtgttgggattacagatgtgagccaccgcgcttggccacgattccgtgatggtcaaagaaatcaaaacgtctgtcagctagtgttcagttcaggctgaggtgaaaaaatttttttacttgtaaaatatacataacataaaacttggccgccgcgctccgagcccccattcccgagctgccgctgttgtcgctcgctcagcgtctccctcccggccgccctctcctcgggacgatggcgcgcggtgcggccgccgcctggggttagccctggggctgctgctggcgctggtgctggcgccgcgggttctgcgggccaagcccacggtgcgcaaagagcgcgtggtgcggcccgactcggagctgggcgagcggccccctgaggacaaccagagcttccagtacgaccacgaggccttcctgggcaaggaggactccaagaccttcgaccagctcaccccggacgagagcaaggagaggctagggaagattgttgatcgaatcgacaatgatggggatggctttgtcactactgaggagctgaaaacctggatcaaacgggtgcagaaaagatacatctttgataatgtcgccaaagtctggaaggattatgatagggacaaggatgataaaatttcctgggaagaatacaaacaagccacctatggttactacctaggaaaccccgcagagtttcatgattcttcagatcatcacacctttaaaaagatgctgccacgtgatgagagaagattcaaagctgcagacctcaatggtgacctgacagctactcgggaggagttcactgcctttctgcatcctgaagagtttgaacatatgaaggaaattgtggttttggaaaccctggaggacatcgacaagaacggggatgggtttgtggatcaggatgagtatattgacaaggaaacttcaggctcagtcactgaactaagtcaaaagccgggatttatcttttggcttctaaactcagttctttctactccaccacatggccttcatcatgaataaattactgcatcattatccccaagaaactgcctaccagctgtttgagttaggtctctggattggttgtcgcctttcctaaagctcaggaggtcaagtttgttttatgggggtgggggaggtttaccttcccactttcctttgtaaccaacaataaccttcccttctagcggatatgttttcccatgaggagaatggccctgagccagactgggttttatcagaacgggagcagtttaacgaattccgggatctgaacaaggacgggaagttagacaaagatgagattcgccactggatcctccctcaagattatgatcacgcacaggctgaggccaggcatctggtatatgaatcagacaaaaacaaggatgagaagctaactaaagaggaaatattggagaactggaacatgtttgttggaagccaagctaccaattacggggaagatctcacaaaaaatcatgatgagctttgatagacactcaccagaatatggcagactgtcataggcattctgttattgtcttggattgttgctacaattgtctaatttacagcagttgtgatcccacaaaaagcaagtttatacctcagattggggtataaaaattgtttttcgctcagtatttactggaaaatggacatcactagtctttcagtaagatttctctcaaaacacgtgaaaaccttggtaaattgcaattctttctggggatatattggtacaacatgacttaaaacttttttttttctattaaaacttaaaggggaacaaaacttgaaaaagccctgttcttcagaaggtgagtgggttgagggaggcagtaatatgaagtgactgctgtgtattttaactaccagattttttatatttgccactgttaaatagttggaaaggggaaattctgattaagcgaaagtggtatcatcctaggtaagcttatttcagaacaagtctaatatttcagattctttcttttcgactttatactctgagttattacttactgtaagtggtgtatatgaaacctccatgcattttccagtatggatctgctaatatgcacagtaaatccatgtctttgtttgtttttctattaaaaagcaatcaagaaagataatgtgaaaaagaaaggaatttagaggtagggaaaagatgaatgtcagacatttgaagaactatagtaaaatgataaacactaaatatacttgagaaaactttcttaatatgccaatgaggtaggcctgatctttgaaatagtgaataggaatacaatgcatttcctcagtgatcactgattagaatgagttggtgggatccttgggaagccaaacggagcggagttctggatcatgtcccatccagtccagtgaatccacgacccgcagacctgcccccccgcaacagcttataccatggaatgaggacaaggtgatactctgagctgtggactgaactggcagacacaacctgtacagattgaaatttcaccttgtaaggaggaagtgaatgaaataaaggatccccctaaggattt

SEQ ID NO: 331897 - DNA, 2620 bp, Homo sapiens
ttttttttttttgagacagggtcctgctctgtcgcctaggctggagtgcaatggtgcatggtcatggcttgagcctggttaatttttgtatttttactagaaacagggttttgtcatgttgcccaggctgatctcaaacacctggattcaagcaatccgcccatcttgacctcccaaagtgttgggattacagatgtgagccaccgcgcttggccacgattccgtgatggtcaaagaaatcaaaacgtctgtcagctagtgttcagttcaggctgaggtgaaaaaatttttttacttgtaaaatatacataacataaaacttggccgccgcgctccgagcccccattcccgagctgccgctgttgtcgctcgctcagcgtctccctcccggccgccctctcctcgggacgatggcgcgcggtgcggccgccgcctggggttagccctggggctgctgctggcgctggtgctggcgccgcgggttctgcgggccaagcccacggtgcgcaaagagcgcgtggtgcggcccgactcggagctgggcgagcggccccctgaggacaaccagagcttccagtacgaccacgaggccttcctgggcaaggaggactccaagaccttcgaccagctcaccccggacgagagcaaggagaggctagggaagattgttgatcgaatcgacaatgatggggatggctttgtcactactgaggagctgaaaacctggatcaaacgggtgcagaaaagatacatctttgataatgtcgccaaagtctggaaggattatgatagggacaaggatgataaaatttcctgggaagaatacaaacaagccacctatggttactacctaggaaaccccgcagagtttcatgattcttcagatcatcacacctttaaaaagatgctgccacgtgatgagagaagattcaaagctgcagacctcaatggtgacctgacagctactcgggaggagttcactgcctttctgcatcctgaagagtttgaacatatgaaggaaattgtggttttggaaaccctggaggacatcgacaagaacggggatgggtttgtggatcaggatgagtatattgacaaggaaacttcaggctcagtcactgaactaagtcaaaagccgggatttatcttttggcttctaaactcagttctttctactccaccacatggccttcatcatgaataaattactgcatcattatccccaagaaactgcctaccagctgtttgacggatatgttttcccatgaggagaatggccctgagccagactgggttttatcagaacgggagcagtttaacgaattccgggatctgaacaaggacgggaagttagacaaagatgagattcgccactggatcctccctcaagattatgatcacgcacaggctgaggccaggcatctggtatatgaatcagacaaaaacaaggatgagaagctaactaaagaggaaatattggagaactggaacatgtttgttggaagccaagctaccaattacggggaagatctcacaaaaaatcatgatgagctttgatagacactcaccagaatatggcagactgtcataggcattctgttattgtcttggattgttgctacaattgtctaatttacagcagttgtgatcccacaaaaagcaagtttatacctcagattggggtataaaaattgtttttcgctcagtatttactggaaaatggacatcactagtctttcagtaagatttctctcaaaacacgtgaaaaccttggtaaattgcaattctttctggggatatattggtacaacatgacttaaaacttttttttttctattaaaacttaaaggggaacaaaacttgaaaaagccctgttcttcagaaggtgagtgggttgagggaggcagtaatatgaagtgactgctgtgtattttaactaccagattttttatatttgccactgttaaatagttggaaaggggaaattctgattaagcgaaagtggtatcatcctaggtaagcttatttcagaacaagtctaatatttcagattctttcttttcgactttatactctgagttattacttactgtaagtggtgtatatgaaacctccatgcattttccagtatggatctgctaatatgcacagtaaatccatgtctttgtttgtttttctattaaaaagcaatcaagaaagataatgtgaaaaagaaaggaatttagaggtagggaaaagatgaatgtcagacatttgaagaactatagtaaaatgataaacactaaatatacttgagaaaactttcttaatatgccaatgaggtaggcctgatctttgaaatagtgaataggaatacaatgcatttcctcagtgatcactgattagaatgagttggtgggatccttgggaagccaaacggagcggagttctggatcatgtcccatccagtccagtgaatccacgacccgcagacctgcccccccgcaacagcttataccatggaatgaggacaaggtgatactctgagctgtggactgaactggcagacacaacctgtacagattgaaatttcaccttgtaaggaggaagtgaatgaaataaaggatccccctaaggattt

SEQ ID NO: 331898 - DNA, 2757 bp, Homo sapiens
ttttttttttttgagacagggtcctgctctgtcgcctaggctggagtgcaatggtgcatggtcatggcttgagcctggttaatttttgtatttttactagaaacagggttttgtcatgttgcccaggctgatctcaaacacctggattcaagcaatccgcccatcttgacctcccaaagtgttgggattacagatgtgagccaccgcgcttggccacgattccgtgatggtcaaagaaatcaaaacgtctgtcagctagtgttcagttcaggctgaggtgaaaaaatttttttacttgtaaaatatacataacataaaacttggccgccgcgctccgagcccccattcccgagctgccgctgttgtcgctcgctcagcgtctccctcccggccgccctctcctcgggacgatggcgcgcggtgcggccgccgcctggggttagccctggggctgctgctggcgctggtgctggcgccgcgggttctgcgggccaagcccacggtgcgcaaagagcgcgtggtgcggcccgactcggagctgggcgagcggccccctgaggacaaccagagcttccagtacgaccacgaggccttcctgggcaaggaggactccaagaccttcgaccagctcaccccggacgagagcaaggagaggctagggaagattgttgatcgaatcgacaatgatggggatggctttgtcactactgaggagctgaaaacctggatcaaacgggtgcagaaaagatacatctttgataatgtcgccaaagtctggaaggattatgatagggacaaggatgataaaatttcctgggaagaatacaaacaagccacctatggttactacctaggaaaccccgcagagtttcatgattcttcagatcatcacacctttaaaaagatgctgccacgtgatgagagaagattcaaagctgcagacctcaatggtgacctgacagctactcgggaggagttcactgcctttctgcatcctgaagagtttgaacatatgaaggaaattgtggttttggaaaccctggaggacatcgacaagaacggggatgggtttgtggatcaggatgagtatattgcggatatgttttcccatgaggagaatggccctgagccagactgggttttatcagaacgggagcagtttaacgaattccgggatctgaacaaggacgggaagttagacaaagatgagattcgccactggatcctccctcaagattatgatcacgcacaggctgaggccaggcatctggtatatgaatcagacaaaaacaaggatgagaagctaactaaagaggaaatattggagaactggaacatgtttgttggaagccaagctaccaattacggggaagatctcacaaaaaatcatgatgagctttgatagacactcaccagaatatggcagactgtcataggcattctgttattgtcttggattgttgctacaattgtctaatttacagcagttgtgatcccacaaaaagcaagtttatacctcagattggggtataaaaattgtttttcgctcagtatttactggaaaatggacatcactagtctttcagtaagatttctctcaaaacacgtgaaaaccttggtaaattgcaattctttctggggatatattggtacaacatgacttaaaacttttttttttctattaaaacttaaaggggaacaaaacttgaaaaagccctgttcttcagaaggtgagtgggttgagggaggcagtaatatgaagtgactgctgtgtattttaactaccagattttttatatttgccactgttaaatagttggaaaggggaaattctgattaagcgaaagtggtatcatcctaggtaagcttatttcagaacaagtctaatatttcagattctttcttttcgactttatactctgagttattacttactgtaagtggtgtatatgaaacctccatgcattttccagtatggatctgctaatatgcacagtaaatccatgtctttgtttgtttttctattaaaaagcaatcaagaaagataatgtgaaaaagaaaggaatttagaggtagggaaaagatgaatgtcagacatttgaagaactatagtaaaatgataaacactaaatatacttgagaaaactttcttaatatgccaatgaggtaggcctgatctttgaaatagtgaataggaatacaatgcatttcctcagtgatcactgattagaatgagttggtgggatccttgggaagccaaacggagcggagttctggatcatgtcccatccagtccagtgaatccacgacccgcagacctgcccccccgcaacagcttataccatggaatgaggacaaggtgatactctgagctgtggactgaactggcagacacaacctgtacagattgaaatttcaccttgtaaggaggaagtgaatgaaataaaggatccccctaaggatttaaaaaggaaaacattatgacgaacagaacaaaacacacttgtggttggccggacagcgggccaccgaagaaagtttactaaacccaatgctgttgggggcgcgggcgcccaagaagggagggcgaacacgtgccacagcgggtccaaagaaaacccgggcaagacaaaggggggttggtcccccccaaataaaacacccgggggcagcaggcgtttgaaacaaccccagagggcctcagagcacaccgtcgctacaaagagccacgaaccagaataccgcgggggaggcggc

SEQ ID NO: 331899 - DNA, 2783 bp, Homo sapiens
ttttttttttttgagacagggtcctgctctgtcgcctaggctggagtgcaatggtgcatggtcatggcttgagcctggttaatttttgtatttttactagaaacagggttttgtcatgttgcccaggctgatctcaaacacctggattcaagcaatccgcccatcttgacctcccaaagtgttgggattacagatgtgagccaccgcgcttggccacgattccgtgatggtcaaagaaatcaaaacgtctgtcagctagtgttcagttcaggctgaggtgaaaaaatttttttacttgtaaaatatacataacataaaacttggccgccgcgctccgagcccccattcccgagctgccgctgttgtcgctcgctcagcgtctccctcccggccgccctctcctcgggacgatggcgcgcggtgcggccgccgcctggggttagccctggggctgctgctggcgctggtgctggcgccgcgggttctgcgggccaagcccacggtgcgcaaagagcgcgtggtgcggcccgactcggagctgggcgagcggccccctgaggacaaccagagcttccagtacgaccacgaggccttcctgggcaaggaggactccaagaccttcgaccagctcaccccggacgagagcaaggagaggctagggaagattgttgatcgaatcgacaatgatggggatggctttgtcactactgaggagctgaaaacctggatcaaacgggtgcagaaaagatacatctttgataatgtcgccaaagtctggaaggattatgatagggacaaggatgataaaatttcctgggaagaatacaaacaagccacctatggttactacctaggaaaccccgcagagtttcatgattcttcagatcatcacacctttaaaaagatgctgccacgtgatgagagaagattcaaagctgcagacctcaatggtgacctgacagctactcgggaggagttcactgcctttctgcatcctgaagagtttgaacatatgaaggaaattgtggttttggaaaccctggaggacatcgacaagaacggggatgggtttgtggatcaggatgagtatattgcggatatgttttcccatgaggagaatggccctgagccagactgggttttatcagaacgggagcagtttaacgaattccgggatctgaacaaggacgggaagttagacaaagatgagattcgccactggatcctccctcaagattatgatcacgcacaggctgaggccaggcatctggtatatgaatcagacaaaaacaaggatgagaagctaactaaagaggaaatattggagaactggaacatgtttgttggaagccaagctaccaattacggggaagatctcacaaaaaatcatgatgagctttgatagacactcaccagaatatggcagactgtcataggcattctgttattgtcttggattgttgctacaattgtctaatttacagcagttgtgatcccacaaaaagcaagtttatacctcagattggggtataaaaattgtttttcgctcagtatttactggaaaatggacatcactagtctttcagtaagatttctctcaaaacacgtgaaaaccttggtaaattgcaattctttctggggatatattggtacaacatgacttaaaacttttttttttctattaaaacttaaaggggaacaaaacttgaaaaagccctgttcttcagaaggtgagtgggttgagggaggcagtaatatgaagtgactgctgtgtattttaactaccagattttttatatttgccactgttaaatagttggaaaggggaaattctgattaagcgaaagtggtatcatcctaggtaagcttatttcagaacaagtctaatatttcagattctttcttttcgactttatactctgagttattacttactgtaagtggtgtatatgaaacctccatgcattttccagtatggatctgctaatatgcacagtaaatccatgtctttgtttgtttttctattaaaaagcaatcaagaaagataatgtgaaaaagaaaggaatttagaggtagggaaaagatgaatgtcagacatttgaagaactatagtaaaatgataaacactaaatatacttgagaaaactttcttaatatgccaatgaggtaggcctgatctttgaaatagtgaataggaatacaatgcatttcctcagtgatcactgattagaatgagttggtgggatccttgggaagccaaacggagcggagttctggatcatgtcccatccagtccagtgaatccacgacccgcagacctgcccccccgcaacagcttataccatggaatgaggacaaggtgatactctgagctgtggactgaactggcagacacaacctgtacagattgaaatttcaccttgtaaggaggaagtgaatgaaataaaggatccccctaaggattttaaaaaaaaaaaaaaaatgtatacaccagatcatatatattcctatgcatgaaataaactatagactacaacgaaatgactatacctacatgatctaatgaaataacaaaaagcgggcgccttatactacttcgtcgagcctatcaaccactctttataaggcgccatatagattaacgaggcgcgcgttacatcgaatgaaacggtgatactaccaccttctgtgtctgacccacaattccgtaatttgttgtccctgtgtgggttgttaataacaaatttacttacttgtcataatcatcgagcactactctcacc

SEQ ID NO: 331900 - DNA, 2552 bp, Homo sapiens
ttttttttttttgagacagggtcctgctctgtcgcctaggctggagtgcaatggtgcatggtcatggcttgagcctggttaatttttgtatttttactagaaacagggttttgtcatgttgcccaggctgatctcaaacacctggattcaagcaatccgcccatcttgacctcccaaagtgttgggattacagatgtgagccaccgcgcttggccacgattccgtgatggtcaaagaaatcaaaacgtctgtcagctagtgttcagttcaggctgaggtgaaaaaatttttttacttgtaaaatatacataacataaaacttggccgccgcgctccgagcccccattcccgagctgccgctgttgtcgctcgctcagcgtctccctcccggccgccctctcctcgggacgatggcgcgcggtgcggccgccgcctggggttagccctggggctgctgctggcgctggtgctggcgccgcgggttctgcgggccaagcccacggtgcgcaaagagcgcgtggtgcggcccgactcggagctgggcgagcggccccctgaggacaaccagagcttccagtacgaccacgaggccttcctgggcaaggaggactccaagaccttcgaccagctcaccccggacgagagcaaggagaggctagggaagattgttgatcgaatcgacaatgatggggatggctttgtcactactgaggagctgaaaacctggatcaaacgggtgcagaaaagatacatctttgataatgtcgccaaagtctggaaggattatgatagggacaaggatgataaaatttcctgggaagaatacaaacaagccacctatggttactacctaggaaaccccgcagagtttcatgattcttcagatcatcacacctttaaaaagatgctgccacgtgatgagagaagattcaaagctgcagacctcaatggtgacctgacagctactcgggaggagttcactgcctttctgcatcctgaagagtttgaacatatgaaggaaattgtggttttggaaaccctggaggacatcgacaagaacggggatgggtttgtggatcaggatgagtatattgcggatatgttttcccatgaggagaatggccctgagccagactgggttttatcagaacgggagcagtttaacgaattccgggatctgaacaaggacgggaagttagacaaagatgagattcgccactggatcctccctcaagattatgatcacgcacaggctgaggccaggcatctggtatatgaatcagacaaaaacaaggatgagaagctaactaaagaggaaatattggagaactggaacatgtttgttggaagccaagctaccaattacggggaagatctcacaaaaaatcatgatgagctttgatagacactcaccagaatatggcagactgtcataggcattctgttattgtcttggattgttgctacaattgtctaatttacagcagttgtgatcccacaaaaagcaagtttatacctcagattggggtataaaaattgtttttcgctcagtatttactggaaaatggacatcactagtctttcagtaagatttctctcaaaacacgtgaaaaccttggtaaattgcaattctttctggggatatattggtacaacatgacttaaaacttttttttttctattaaaacttaaaggggaacaaaacttgaaaaagccctgttcttcagaaggtgagtgggttgagggaggcagtaatatgaagtgactgctgtgtattttaactaccagattttttatatttgccactgttaaatagttggaaaggggaaattctgattaagcgaaagtggtatcatcctaggtaagcttatttcagaacaagtctaatatttcagattctttcttttcgactttatactctgagttattacttactgtaagtggtgtatatgaaacctccatgcattttccagtatggatctgctaatatgcacagtaaatccatgtctttgtttgtttttctattaaaaagcaatcaagaaagataatgtgaaaaagaaaggaatttagaggtagggaaaagatgaatgtcagacatttgaagaactatagtaaaatgataaacactaaatatacttgagaaaactttcttaatatgccaatgaggtaggcctgatctttgaaatagtgaataggaatacaatgcatttcctcagtgatcactgattagaatgagttggtgggatccttgggaagccaaacggagcggagttctggatcatgtcccatccagtccagtgaatccacgacccgcagacctgcccccccgcaacagcttataccatggaatgaggacaaggtgatactctgagctgtggactgaactggcagacacaacctgtacagattgaaatttcaccttgtaaggaggaagtgaatgaaataaaggatccccctaaggatttaaaaaaaaaacattttcccatcctacccatttttaggcgtacggtccagtgactttaagcactttcactctgtacggggattcctct

SEQ ID NO: 331901 - DNA, 2058 bp, Homo sapiens
ggttagatctagaggtcccctctctctgtgggtgtgatgctctctcgtggggtgacgctctctctgtggggtgacgctctctctgtggggtgacgctctctctgtgggggacgctctctctgtggggggagctgggcgagcggccccctgaggacaaccagagcttccagtacgaccacgaggccttcctgggcaaggaggactccaagaccttcgaccagctcaccccggacgagagcaaggagaggctagggaagattgttgatcgaatcgacaatgatggggatggctttgtcactactgaggagctgaaaacctggatcaaacgggtgcagaaaagatacatctttgataatgtcgccaaagtctggaaggattatgatagggacaaggatgataaaatttcctgggaagaatacaaacaagccacctatggttactacctaggaaaccccgcagagtttcatgattcttcagatcatcacacctttaaaaagatgctgccacgtgatgagagaagattcaaagctgcagacctcaatggtgacctgacagctactcgggaggagttcactgcctttctgcatcctgaagagtttgaacatatgaaggaaattgtggttttggaaaccctggaggacatcgacaagaacggggatgggtttgtggatcaggatgagtatattgcggatatgttttcccatgaggagaatggccctgagccagactgggttttatcagaacgggagcagtttaacgaattccgggatctgaacaaggacgggaagttagacaaagatgagattcgccactggatcctccctcaagattatgatcacgcacaggctgaggccaggcatctggtatatgaatcagacaaaaacaaggatgagaagctaactaaagaggaaatattggagaactggaacatgtttgttggaagccaagctaccaattacggggaagatctcacaaaaaatcatgatgagctttgatagacactcaccagaatatggcagactgtcataggcattctgttattgtcttggattgttgctacaattgtctaatttacagcagttgtgatcccacaaaaagcaagtttatacctcagattggggtataaaaattgtttttcgctcagtatttactggaaaatggacatcactagtctttcagtaagatttctctcaaaacacgtgaaaaccttggtaaattgcaattctttctggggatatattggtacaacatgacttaaaacttttttttttctattaaaacttaaaggggaacaaaacttgaaaaagccctgttcttcagaaggtgagtgggttgagggaggcagtaatatgaagtgactgctgtgtattttaactaccagattttttatatttgccactgttaaatagttggaaaggggaaattctgattaagcgaaagtggtatcatcctaggtaagcttatttcagaacaagtctaatatttcagattctttcttttcgactttatactctgagttattacttactgtaagtggtgtatatgaaacctccatgcattttccagtatggatctgctaatatgcacagtaaatccatgtctttgtttgtttttctattaaaaagcaatcaagaaagataatgtgaaaaagaaaggaatttagaggtagggaaaagatgaatgtcagacatttgaagaactatagtaaaatgataaacactaaatatacttgagaaaactttcttaatatgccaatgaggtaggcctgatctttgaaatagtgaataggaatacaatgcatttcctcagtgatcactgattagaatgagttggtgggatccttgggaagccaaacggagcggagttctggatcatgtcccatccagtccagtgaatccacgacccgcagacctgcccccccgcaacagcttataccatggaatgaggacaaggtgatactctgagctgtggactgaactggcagacacaacctgtacagattgaaatttcaccttgtaaggaggaagtgaatgaaataaaggatccccctaaggattt

SEQ ID NO: 331902 - DNA, 1945 bp, Homo sapiens
gagatgatgacagaaaggctggaaggaagggggtgggtttgaagaattccgggatctgaacaaggacgggaagttagacaaagatgagactccaagaccttcgaccagctcaccccggacgagagcaaggagaggctagggaagattgttgatcgaatcgacaatgatggggatggctttgtcactactgaggagctgaaaacctggatcaaacgggtgcagaaaagatacatctttgataatgtcgccaaagtctggaaggattatgatagggacaaggatgataaaatttcctgggaagaatacaaacaagccacctatggttactacctaggaaaccccgcagagtttcatgattcttcagatcatcacacctttaaaaagatgctgccacgtgatgagagaagattcaaagctgcagacctcaatggtgacctgacagctactcgggaggagttcactgcctttctgcatcctgaagagtttgaacatatgaaggaaattgtggttttggaaaccctggaggacatcgacaagaacggggatgggtttgtggatcaggatgagtatattgcggatatgttttcccatgaggagaatggccctgagccagactgggttttatcagaacgggagcagtttaacgaattccgggatctgaacaaggacgggaagttagacaaagatgagattcgccactggatcctccctcaagattatgatcacgcacaggctgaggccaggcatctggtatatgaatcagacaaaaacaaggatgagaagctaactaaagaggaaatattggagaactggaacatgtttgttggaagccaagctaccaattacggggaagatctcacaaaaaatcatgatgagctttgatagacactcaccagaatatggcagactgtcataggcattctgttattgtcttggattgttgctacaattgtctaatttacagcagttgtgatcccacaaaaagcaagtttatacctcagattggggtataaaaattgtttttcgctcagtatttactggaaaatggacatcactagtctttcagtaagatttctctcaaaacacgtgaaaaccttggtaaattgcaattctttctggggatatattggtacaacatgacttaaaacttttttttttctattaaaacttaaaggggaacaaaacttgaaaaagccctgttcttcagaaggtgagtgggttgagggaggcagtaatatgaagtgactgctgtgtattttaactaccagattttttatatttgccactgttaaatagttggaaaggggaaattctgattaagcgaaagtggtatcatcctaggtaagcttatttcagaacaagtctaatatttcagattctttcttttcgactttatactctgagttattacttactgtaagtggtgtatatgaaacctccatgcattttccagtatggatctgctaatatgcacagtaaatccatgtctttgtttgtttttctattaaaaagcaatcaagaaagataatgtgaaaaagaaaggaatttagaggtagggaaaagatgaatgtcagacatttgaagaactatagtaaaatgataaacactaaatatacttgagaaaactttcttaatatgccaatgaggtaggcctgatctttgaaatagtgaataggaatacaatgcatttcctcagtgatcactgattagaatgagttggtgggatccttgggaagccaaacggagcggagttctggatcatgtcccatccagtccagtgaatccacgacccgcagacctgcccccccgcaacagcttataccatggaatgaggacaaggtgatactctgagctgtggactgaactggcagacacaacctgtacagattgaaatttcaccttgtaaggaggaagtgaatgaaataaaggatccccctaaggattt

SEQ ID NO: 331903 - DNA, 1870 bp, Homo sapiens
ccaatctagaggacccactaacctaatcgctcctcaccccgtgactgagagcaggagaggctagggaagattgttgatcgaatcgacaatgatggggatggctttgtcactactgaggagctgaaaacctggatcaaacgggtgcagaaaagatacatctttgataatgtcgccaaagtctggaaggattatgatagggacaaggatgataaaatttcctgggaagaatacaaacaagccacctatggttactacctaggaaaccccgcagagtttcatgattcttcagatcatcacacctttaaaaagatgctgccacgtgatgagagaagattcaaagctgcagacctcaatggtgacctgacagctactcgggaggagttcactgcctttctgcatcctgaagagtttgaacatatgaaggaaattgtggttttggaaaccctggaggacatcgacaagaacggggatgggtttgtggatcaggatgagtatattgcggatatgttttcccatgaggagaatggccctgagccagactgggttttatcagaacgggagcagtttaacgaattccgggatctgaacaaggacgggaagttagacaaagatgagattcgccactggatcctccctcaagattatgatcacgcacaggctgaggccaggcatctggtatatgaatcagacaaaaacaaggatgagaagctaactaaagaggaaatattggagaactggaacatgtttgttggaagccaagctaccaattacggggaagatctcacaaaaaatcatgatgagctttgatagacactcaccagaatatggcagactgtcataggcattctgttattgtcttggattgttgctacaattgtctaatttacagcagttgtgatcccacaaaaagcaagtttatacctcagattggggtataaaaattgtttttcgctcagtatttactggaaaatggacatcactagtctttcagtaagatttctctcaaaacacgtgaaaaccttggtaaattgcaattctttctggggatatattggtacaacatgacttaaaacttttttttttctattaaaacttaaaggggaacaaaacttgaaaaagccctgttcttcagaaggtgagtgggttgagggaggcagtaatatgaagtgactgctgtgtattttaactaccagattttttatatttgccactgttaaatagttggaaaggggaaattctgattaagcgaaagtggtatcatcctaggtaagcttatttcagaacaagtctaatatttcagattctttcttttcgactttatactctgagttattacttactgtaagtggtgtatatgaaacctccatgcattttccagtatggatctgctaatatgcacagtaaatccatgtctttgtttgtttttctattaaaaagcaatcaagaaagataatgtgaaaaagaaaggaatttagaggtagggaaaagatgaatgtcagacatttgaagaactatagtaaaatgataaacactaaatatacttgagaaaactttcttaatatgccaatgaggtaggcctgatctttgaaatagtgaataggaatacaatgcatttcctcagtgatcactgattagaatgagttggtgggatccttgggaagccaaacggagcggagttctggatcatgtcccatccagtccagtgaatccacgacccgcagacctgcccccccgcaacagcttataccatggaatgaggacaaggtgatactctgagctgtggactgaactggcagacacaacctgtacagattgaaatttcaccttgtaaggaggaagtgaatgaaataaaggatccccctaaggattt

SEQ ID NO: 331904 - DNA, 1649 bp, Homo sapiens
ggactctagatgatcccgctgcgcctactactacctaggaaaccccgcagagtttcatgattcttcagatcatcacacctttaaaaagatgctgccacgtgatgagagaagattcaaagctgcagacctcaatggtgacctgacagctactcgggaggagttcactgcctttctgcatcctgaagagtttgaacatatgaaggaaattgtggttttggaaaccctggaggacatcgacaagaacggggatgggtttgtggatcaggatgagtatattgcggatatgttttcccatgaggagaatggccctgagccagactgggttttatcagaacgggagcagtttaacgaattccgggatctgaacaaggacgggaagttagacaaagatgagattcgccactggatcctccctcaagattatgatcacgcacaggctgaggccaggcatctggtatatgaatcagacaaaaacaaggatgagaagctaactaaagaggaaatattggagaactggaacatgtttgttggaagccaagctaccaattacggggaagatctcacaaaaaatcatgatgagctttgatagacactcaccagaatatggcagactgtcataggcattctgttattgtcttggattgttgctacaattgtctaatttacagcagttgtgatcccacaaaaagcaagtttatacctcagattggggtataaaaattgtttttcgctcagtatttactggaaaatggacatcactagtctttcagtaagatttctctcaaaacacgtgaaaaccttggtaaattgcaattctttctggggatatattggtacaacatgacttaaaacttttttttttctattaaaacttaaaggggaacaaaacttgaaaaagccctgttcttcagaaggtgagtgggttgagggaggcagtaatatgaagtgactgctgtgtattttaactaccagattttttatatttgccactgttaaatagttggaaaggggaaattctgattaagcgaaagtggtatcatcctaggtaagcttatttcagaacaagtctaatatttcagattctttcttttcgactttatactctgagttattacttactgtaagtggtgtatatgaaacctccatgcattttccagtatggatctgctaatatgcacagtaaatccatgtctttgtttgtttttctattaaaaagcaatcaagaaagataatgtgaaaaagaaaggaatttagaggtagggaaaagatgaatgtcagacatttgaagaactatagtaaaatgataaacactaaatatacttgagaaaactttcttaatatgccaatgaggtaggcctgatctttgaaatagtgaataggaatacaatgcatttcctcagtgatcactgattagaatgagttggtgggatccttgggaagccaaacggagcggagttctggatcatgtcccatccagtccagtgaatccacgacccgcagacctgcccccccgcaacagcttataccatggaatgaggacaaggtgatactctgagctgtggactgaactggcagacacaacctgtacagattgaaatttcaccttgtaaggaggaagtgaatgaaataaaggatccccctaaggattt

SEQ ID NO: 331905 - DNA, 1653 bp, Homo sapiens
tgttttaccttttgcttcctaggaaaccctggaggacatcgacaagaacggggatgggtttgtggatcaggatgagtatattgacaaggaaacttcaggctcagtcactgaactaagtcaaaagccgggatttatcttttggcttctaaactcagttctttctactccaccacatggccttcatcatgaataaattactgcatcattatccccaagaaactgcctaccagctgtttgagttaggtctctggattggttgtcgcctttcctaaagctcaggagcggatatgttttcccatgaggagaatggccctgagccagactgggttttatcagaacgggagcagtttaacgaattccgggatctgaacaaggacgggaagttagacaaagatgagattcgccactggatcctccctcaagattatgatcacgcacaggctgaggccaggcatctggtatatgaatcagacaaaaacaaggatgagaagctaactaaagaggaaatattggagaactggaacatgtttgttggaagccaagctaccaattacggggaagatctcacaaaaaatcatgatgagctttgatagacactcaccagaatatggcagactgtcataggcattctgttattgtcttggattgttgctacaattgtctaatttacagcagttgtgatcccacaaaaagcaagtttatacctcagattggggtataaaaattgtttttcgctcagtatttactggaaaatggacatcactagtctttcagtaagatttctctcaaaacacgtgaaaaccttggtaaattgcaattctttctggggatatattggtacaacatgacttaaaacttttttttttctattaaaacttaaaggggaacaaaacttgaaaaagccctgttcttcagaaggtgagtgggttgagggaggcagtaatatgaagtgactgctgtgtattttaactaccagattttttatatttgccactgttaaatagttggaaaggggaaattctgattaagcgaaagtggtatcatcctaggtaagcttatttcagaacaagtctaatatttcagattctttcttttcgactttatactctgagttattacttactgtaagtggtgtatatgaaacctccatgcattttccagtatggatctgctaatatgcacagtaaatccatgtctttgtttgtttttctattaaaaagcaatcaagaaagataatgtgaaaaagaaaggaatttagaggtagggaaaagatgaatgtcagacatttgaagaactatagtaaaatgataaacactaaatatacttgagaaaactttcttaatatgccaatgaggtaggcctgatctttgaaatagtgaataggaatacaatgcatttcctcagtgatcactgattagaatgagttggtgggatccttgggaagccaaacggagcggagttctggatcatgtcccatccagtccagtgaatccacgacccgcagacctgcccccccgcaacagcttataccatggaatgaggacaaggtgatactctgagctgtggactgaactggcagacacaacctgtacagattgaaatttcaccttgtaaggaggaagtgaatgaaataaaggatccccctaaggattt

SEQ ID NO: 331906 - DNA, 1937 bp, Homo sapiens
ttttttttttttgagacagggtcctgctctgtcgcctaggctggagtgcaatggtgcatggtcatggcttgagcctggttaatttttgtatttttactagaaacagggttttgtcatgttgcccaggctgatctcaaacacctggattcaagcaatccgcccatcttgacctcccaaagtgttgggattacagatgtgagccaccgcgcttggccacgattccgtgatggtcaaagaaatcaaaacgtctgtcagctagtgttcagttcaggctgaggtgaaaaaatttttttacttgtaaaatatacataacataaaacttggccgccgcgctccgagcccccattcccgagctgccgctgttgtcgctcgctcagcgtctccctcccggccgccctctcctcgggacgatggcgcgcggtgcggccgccgcctggggttagccctggggctgctgctggcgctggtgctggcgccgcgggttctgcgggccaagcccacggtgcgcaaagagcgcgtggtgcggcccgactcggagctgggcgagcggccccctgaggacaaccagagcttccagtacgaccacgaggccttcctgggcaaggaggactccaagaccttcgaccagctcaccccggacgagagcaaggagaggctagggaagattgttgatcgaatcgacaatgatggggatggctttgtcactactgaggagctgaaaacctggatcaaacgggtgcagaaaagatacatctttgataatgtcgccaaagtctggaaggattatgatagggacaaggatgataaaatttcctgggaagaatacaaacaagccacctatggttactacctaggaaaccccgcagagtttcatgattcttcagatcatcacacctttaaaaagatgctgccacgtgatgagagaagattcaaagctgcagacctcaatggtgacctgacagctactcgggaggagttcactgcctttctgcatcctgaagagtttgaacatatgaaggaaattgtggttttggaaaccctggaggacatcgacaagaacggggatgggtttgtggatcaggatgagtatattgcggatatgttttcccatgaggagaatggccctgagccagactgggttttatcagaacgggagcagtttaacgaattccgggatctgaacaaggacgggaagttagacaaagatgagattcgccactggatcctccctcaagattatgatcacgcacaggctgaggccaggcatctggtatatgaatcagacaaaaacaaggatgagaagctaactaaagaggaaatattggagaactggaacatgtttgttggaagccaagctaccaattacggggaagatctcacaaaaaatcatgatgagctttgatagacactcaccagaatatggcagactgtcataggcattctgttattgtcttggattgttgctacaattgtctaatttacagcagttgtgatcccacaaaaagcaagtttatacctcagattggggtataaaaattgtttttcgctcagtatttactggaaaatggacatcactagtctttcagtaagatttctctcaaaacacgtgaaaaccttggtaaattgcaattctttctggggatatattggtacaacatgacttaaaacttttttttttctattaaaacttaaaggggaacaaaacttgaaaaagccctgttcttcagaaggtgagtgggttgagggaggcagtaatatgaagtgactgctgtgtattttaactaccagattttttatatttgccactgttaaatagtttaactccaagccgtaggacccactttcctttcttagctgatgtcattggccatgtacgccgtgtgctgtacgtgctatgagttgtagcgttggcattacgtctctgtatacacgaccgc

SEQ ID NO: 331907 - DNA, 1229 bp, Homo sapiens
caatcactgctcatgactgagaacaagcttttagtatatgaatcatatcaaaaacaaagatgagaagctaactaaagaggaaatattggagaactggaacatgtttgttggaagccaagctaccaattacggggaagatctcacaaaaaatcatgatgagctttgatagacactcaccagaatatggcagactgtcataggcattctgttattgtcttggattgttgctacaattgtctaatttacagcagttgtgatcccacaaaaagcaagtttatacctcagattggggtataaaaattgtttttcgctcagtatttactggaaaatggacatcactagtctttcagtaagatttctctcaaaacacgtgaaaaccttggtaaattgcaattctttctggggatatattggtacaacatgacttaaaacttttttttttctattaaaacttaaaggggaacaaaacttgaaaaagccctgttcttcagaaggtgagtgggttgagggaggcagtaatatgaagtgactgctgtgtattttaactaccagattttttatatttgccactgttaaatagttggaaaggggaaattctgattaagcgaaagtggtatcatcctaggtaagcttatttcagaacaagtctaatatttcagattctttcttttcgactttatactctgagttattacttactgtaagtggtgtatatgaaacctccatgcattttccagtatggatctgctaatatgcacagtaaatccatgtctttgtttgtttttctattaaaaagcaatcaagaaagataatgtgaaaaagaaaggaatttagaggtagggaaaagatgaatgtcagacatttgaagaactatagtaaaatgataaacactaaatatacttgagaaaactttcttaatatgccaatgaggtaggcctgatctttgaaatagtgaataggaatacaatgcatttcctcagtgatcactgattagaatgagttggtgggatccttgggaagccaaacggagcggagttctggatcatgtcccatccagtccagtgaatccacgacccgcagacctgcccccccgcaacagcttataccatggaatgaggacaaggtgatactctgagctgtggactgaactggcagacacaacctgtacagattgaaatttcaccttgtaaggaggaagtgaatgaaataaaggatccccctaaggattt

SEQ ID NO: 331908 - DNA, 1747 bp, Homo sapiens
ttttttttttttgagacagggtcctgctctgtcgcctaggctggagtgcaatggtgcatggtcatggcttgagcctggttaatttttgtatttttactagaaacagggttttgtcatgttgcccaggctgatctcaaacacctggattcaagcaatccgcccatcttgacctcccaaagtgttgggattacagatgtgagccaccgcgcttggccacgattccgtgatggtcaaagaaatcaaaacgtctgtcagctagtgttcagttcaggctgaggtgaaaaaatttttttacttgtaaaatatacataacataaaacttggccgccgcgctccgagcccccattcccgagctgccgctgttgtcgctcgctcagcgtctccctcccggccgccctctcctcgggacgatggcgcgcggtgcggccgccgcctggggttagccctggggctgctgctggcgctggtgctggcgccgcgggttctgcgggccaagcccacggtgcgcaaagagcgcgtggtgcggcccgactcggagctgggcgagcggccccctgaggacaaccagagcttccagtacgaccacgaggccttcctgggcaaggaggactccaagaccttcgaccagctcaccccggacgagagcaaggagaggctagggaagattgttgatcgaatcgacaatgatggggatggctttgtcactactgaggagctgaaaacctggatcaaacgggtgcagaaaagatacatctttgataatgtcgccaaagtctggaaggattatgatagggacaaggatgataaaatttcctgggaagaatacaaacaagccacctatggttactacctaggaaaccccgcagagtttcatgattcttcagatcatcacacctttaaaaagatgctgccacgtgatgagagaagattcaaagctgcagacctcaatggtgacctgacagctactcgggaggagttcactgcctttctgcatcctgaagagtttgaacatatgaaggaaattgtggttttggaaaccctggaggacatcgacaagaacggggatgggtttgtggatcaggatgagtatattgcggatatgttttcccatgaggagaatggccctgagccagactgggttttatcagaacgggagcagtttaacgaattccgggatctgaacaaggacgggaagttagacaaagatgagattcgccactggatcctccctcaagattatgatcacgcacaggctgaggccaggcatctggtatatgaatcagacaaaaacaaggatgagaagctaactaaagaggaaatattggagaactggaacatgtttgttggaagccaagctaccaattacggggaagatctcacaaaaaatcatgatgagctttgatagacactcaccagaatatggcagactgtcataggcattctgttattgtcttggattgttgctacaattgtgctgccgccactactacatataaggaaacagcctcagagaggttaagaaatgtgcctagggtcacagttaaaaagtgacaagaggccaggcacagtggctcaagcctgtaatcccagcactttgggaggccaaggcaggtggattgcttgaggtcagaagtttgagaccagcatggccaacatggtgaagacctgtctctactaaaactaaaaaaatttagctgggtgtggtggcacatgcctatagtcctagctactcaagaggctgacgtgg

SEQ ID NO: 331909 - DNA, 1419 bp, Homo sapiens
ttttttttttttgagacagggtcctgctctgtcgcctaggctggagtgcaatggtgcatggtcatggcttgagcctggttaatttttgtatttttactagaaacagggttttgtcatgttgcccaggctgatctcaaacacctggattcaagcaatccgcccatcttgacctcccaaagtgttgggattacagatgtgagccaccgcgcttggccacgattccgtgatggtcaaagaaatcaaaacgtctgtcagctagtgttcagttcaggctgaggtgaaaaaatttttttacttgtaaaatatacataacataaaacttggccgccgcgctccgagcccccattcccgagctgccgctgttgtcgctcgctcagcgtctccctcccggccgccctctcctcgggacgatggcgcgcggtgcggccgccgcctggggttagccctggggctgctgctggcgctggtgctggcgccgcgggttctgcgggccaagcccacggtgcgcaaagagcgcgtggtgcggcccgactcggagctgggcgagcggccccctgaggacaaccagagcttccagtacgaccacgaggccttcctgggcaaggaggactccaagaccttcgaccagctcaccccggacgagagcaaggagaggctagggaagattgttgatcgaatcgacaatgatggggatggctttgtcactactgaggagctgaaaacctggatcaaacgggtgcagaaaagatacatctttgataatgtcgccaaagtctggaaggattatgatagggacaaggatgataaaatttcctgggaagaatacaaacaagccacctatggttactacctaggaaaccccgcagagtttcatgattcttcagatcatcacacctttaaaaagatgctgccacgtgatgagagaagattcaaagctgcagacctcaatggtgacctgacagctactcgggaggagttcactgcctttctgcatcctgaagagtttgaacatatgaaggaaattgtggttttggaaaccctggaggacatcgacaagaacggggatgggtttgtggatcaggatgagtatattgccaggtatacatcatcttattctcttcttgatttgtcagtactttttagggaccattagttctctgcctactatgtgccagactctaccctaagcatttagaattccagttaacaataggtaaatcttctattcatttaaaatttcattctaacagctagtaatgtatttggaggaataaatgccgtgaagaaaagcagaccgagtgttatctataggtagttatgggagatgtatgttatcttatattggttgatcaggcagacacaaactgataaaggggcgattgcttatttctctgaaagaagcaggaaatgagaaccact

SEQ ID NO: 331910 - DNA, 1451 bp, Homo sapiens
ttttttttttttgagacagggtcctgctctgtcgcctaggctggagtgcaatggtgcatggtcatggcttgagcctggttaatttttgtatttttactagaaacagggttttgtcatgttgcccaggctgatctcaaacacctggattcaagcaatccgcccatcttgacctcccaaagtgttgggattacagatgtgagccaccgcgcttggccacgattccgtgatggtcaaagaaatcaaaacgtctgtcagctagtgttcagttcaggctgaggtgaaaaaatttttttacttgtaaaatatacataacataaaacttggccgccgcgctccgagcccccattcccgagctgccgctgttgtcgctcgctcagcgtctccctcccggccgccctctcctcgggacgatggcgcgcggtgcggccgccgcctggggttagccctggggctgctgctggcgctggtgctggcgccgcgggttctgcgggccaagcccacggtgcgcaaagagcgcgtggtgcggcccgactcggagctgggcgagcggccccctgaggacaaccagagcttccagtacgaccacgaggccttcctgggcaaggaggactccaagaccttcgaccagctcaccccggacgagagcaaggagaggctagggaagattgttgatcgaatcgacaatgatggggatggctttgtcactactgaggagctgaaaacctggatcaaacgggtgcagaaaagatacatctttgataatgtcgccaaagtctggaaggattatgatagggacaaggatgataaaatttcctgggaagaatacaaacaagccacctatggttactacctaggaaaccccgcagagtttcatgattcttcagatcatcacacctttaaaaagatgctgccacgtgatgagagaagattcaaagctgcagacctcaatggtgacctgacagctactcgggaggagttcactgcctttctgcatcctgaagagtttgaacatatgaaggaaattgtggttttgtactgtaagtggtgtatatgaaacctccatgcattttccagtatggatctgctaatatgcacagtaaatccatgtctttgtttgtttttctattaaaaagggaggactgtgggtattaggtgtccaagaagaaagctcaaatctgctgacggcaggtaccttgcttgggatttactggaggactgtgggtattaggtgtccaagaagaaagctcaaatctgccaacggcaggtaccttacttgggatttactctccgacgggtcgatgccacccgggaacagaaagaaagcaggtcatttgcaatctaccggagcctggaggactgtgggtattaggtgtccaagaagaaagctcaaatctgccaacggcaggtaccttacttgggatttactctccgacgggtccgatgccgcccgg

SEQ ID NO: 331911 - DNA, 1677 bp, Homo sapiens
ttttttttttttgagacagggtcctgctctgtcgcctaggctggagtgcaatggtgcatggtcatggcttgagcctggttaatttttgtatttttactagaaacagggttttgtcatgttgcccaggctgatctcaaacacctggattcaagcaatccgcccatcttgacctcccaaagtgttgggattacagatgtgagccaccgcgcttggccacgattccgtgatggtcaaagaaatcaaaacgtctgtcagctagtgttcagttcaggctgaggtgaaaaaatttttttacttgtaaaatatacataacataaaacttggccgccgcgctccgagcccccattcccgagctgccgctgttgtcgctcgctcagcgtctccctcccggccgccctctcctcgggacgatggcgcgcggtgcggccgccgcctggggttagccctggggctgctgctggcgctggtgctggcgccgcgggttctgcgggccaagcccacggtgcgcaaagagcgcgtggtgcggcccgactcggagctgggcgagcggccccctgaggacaaccagagcttccagtacgaccacgaggccttcctgggcaaggaggactccaagaccttcgaccagctcaccccggacgagagcaaggagaggctagggaagattgttgatcgaatcgacaatgatggggatggctttgtcactactgaggagctgaaaacctggatcaaacgggtgcagaaaagatacatctttgataatgtcgccaaagtctggaaggattatgatagggacaaggatgataaaatttcctgggaagaatacaaacaagccacctatggttactacctaggaaaccccgcagagtttcatgattcttcagatcatcacacctttaaaaagatgctgccacgtgatgagagaagattcaaagctgcagacctcaatggtgacctgacagctactcgggaggagttcactgcctttctgcatcctgaagagtttgaacatatgaaggaaattgtggttttgtactgtaagtggtgtatatgaaacctccatgcattttccagtatggatctgctaatatgcacagtaaatccatgtctttgtttgtttttctattaaaaagttcggatttactctccgacaggggtccgaacgcagcccgggaacagaaagaaagcaggtcatttgcaatctaccggagcctggaggactgtgggtattaggtctccaagaagaaagctccaatctgccgacggcaggtaccttacttgggagttactatccgacaggggtccgaacgcagcccgggaacagaaagaaagcaggtcatttgcaatctaccggagcctggaggactgtgggtattaggtgtccaagaagaaagctcaaatctgctgacggcaggtaccttgcttgggatttactggaggactgtgggtattaggtgtccaagaagaaagctcaaatctgccaacggcaggtaccttacttgggatttactctccgacgggtcgatgccacccgggaacagaaagaaagcaggtcatttgcaatctaccggagcctggaggactgtgggtattaggtgtccaagaagaaagctcaaatctgccaacggcaggtaccttacttgggatttactctccgacgggtccgatgccgcccgg

SEQ ID NO: 331912 - DNA, 626 bp, Homo sapiens
atacaatggtggtagcagggccaggaaggaaggaatactacagatttattgtttaatggataaagagtttctgtttgcgggtaggcgtcctggctcacacctgcaatccctatacttggggagcctgaggggagaggatcgcttgagcccaggagctgaggcctagacgacagaataagaccctgtctcttaacaatcaagaaagataatgtgaaaaagaaaggaatttagaggtagggaaaagatgaatgtcagacatttgaagaactatagtaaaatgataaacactaaatatacttgagaaaactttcttaatatgccaatgaggtaggcctgatctttgaaatagtgaataggaatacaatgcatttcctcagtgatcactgattagaatgagttggtgggatccttgggaagccaaacggagcggagttctggatcatgtcccatccagtccagtgaatccacgacccgcagacctgcccccccgcaacagcttataccatggaatgaggacaaggtgatactctgagctgtggactgaactggcagacacaacctgtacagattgaaatttcaccttgtaaggaggaagtgaatgaaataaaggatccccctaaggattt

SEQ ID NO: 331913 - DNA, 489 bp, Homo sapiens
ttttcacattatctttcttgattgctttttaatagaaaaacaaacaaagacatggacaatcaagaaagataatgtgaaaaagaaaggaatttagaggtagggaaaagatgaatgtcagacatttgaagaactatagtaaaatgataaacactaaatatacttgagaaaactttcttaatatgccaatgaggtaggcctgatctttgaaatagtgaataggaatacaatgcatttcctcagtgatcactgattagaatgagttggtgggatccttgggaagccaaacggagcggagttctggatcatgtcccatccagtccagtgaatccacgacccgcagacctgcccccccgcaacagcttataccatggaatgaggacaaggtgatactctgagctgtggactgaactggcagacacaacctgtacagattgaaatttcaccttgtaaggaggaagtgaatgaaataaaggatccccctaaggattt

SEQ ID NO: 331914 - DNA, 1319 bp, Homo sapiens
ttttttttttttgagacagggtcctgctctgtcgcctaggctggagtgcaatggtgcatggtcatggcttgagcctggttaatttttgtatttttactagaaacagggttttgtcatgttgcccaggctgatctcaaacacctggattcaagcaatccgcccatcttgacctcccaaagtgttgggattacagatgtgagccaccgcgcttggccacgattccgtgatggtcaaagaaatcaaaacgtctgtcagctagtgttcagttcaggctgaggtgaaaaaatttttttacttgtaaaatatacataacataaaacttggccgccgcgctccgagcccccattcccgagctgccgctgttgtcgctcgctcagcgtctccctcccggccgccctctcctcgggacgatggcgcgcggtgcggccgccgcctggggttagccctggggctgctgctggcgctggtgctggcgccgcgggttctgcgggccaagcccacggtgcgcaaagagcgcgtggtgcggcccgactcggagctgggcgagcggccccctgaggacaaccagagcttccagtacgaccacgaggccttcctgggcaaggaggactccaagaccttcgaccagctcaccccggacgagagcaaggagaggctagggaagattgttgatcgaatcgacaatgatggggatggctttgtcactactgaggagctgaaaacctactgtaagtggtgtatatgaaacctccatgcattttccagtatggatctgctaatatgcacagtaaatccatgtctttgtttgtttttctattaaaaagttcggatttactctccgacaggggtccgaacgcagcccgggaacagaaagaaagcaggtcatttgcaatctaccggagcctggaggactgtgggtattaggtctccaagaagaaagctccaatctgccgacggcaggtaccttacttgggagttactatccgacaggggtccgaacgcagcccgggaacagaaagaaagcaggtcatttgcaatctaccggagcctaagggcagaaggcaggtgagggaattctcaggggctgtggggttttatagactgtgcatcccaaactttgcagtgttagccaagcctttgtatgaggtcacaaagggggcggggaccgggaacctttggaatggggatcccaagaacagaaagtctttcaggagttaaaggaaaaacttctggcagccccagccctggggctacccgatctggcaaaggcttttccattgtatgcgttagagagagaaaagatggcagctcgacccgct

SEQ ID NO: 331915 - DNA, 1417 bp, Homo sapiens
ttttttttttttgagacagggtcctgctctgtcgcctaggctggagtgcaatggtgcatggtcatggcttgagcctggttaatttttgtatttttactagaaacagggttttgtcatgttgcccaggctgatctcaaacacctggattcaagcaatccgcccatcttgacctcccaaagtgttgggattacagatgtgagccaccgcgcttggccacgattccgtgatggtcaaagaaatcaaaacgtctgtcagctagtgttcagttcaggctgaggtgaaaaaatttttttacttgtaaaatatacataacataaaacttggccgccgcgctccgagcccccattcccgagctgccgctgttgtcgctcgctcagcgtctccctcccggccgccctctcctcgggacgatggcgcgcggtgcggccgccgcctggggttagccctggggctgctgctggcgctggtgctggcgccgcgggttctgcgggccaagcccacggtgcgcaaagagcgcgtggtgcggcccgactcggagctgggcgagcggccccctgaggacaaccagagcttccagtacgaccacgaggccttcctgggcaaggaggactccaagaccttcgaccagctcaccccggacgagagcaaggagaggctagggaagattgttgatcgaatcgacaatgatggggatggctttgtcactactgaggagctgaaaaccgaaaccccgcagagtttcatgattcttcagatcatcacacctttaaaaagatgctgccacgtgatgagagaagattcaaagctgcagacctcaatggtgacctgacagctactcgggaggagttcactgcctttctgcatcctgaagagtttgaacatatgaaggaaattgtggttttgtactgtaagtggtgtatatgaaacctccatgcattttccagtatggatctgctaatatgcacagtaaatccatgtctttgtttgtttttctattaaaaagggaggactgtgggtattaggtctccaagaagaaagctccaatctgccgacggcaggtaccttacttgggagttactatccgacaggggtccgaacgcagcccgggaacagaaagaaagcaggtcatttgcaatctaccggagcctaagggcagaaggcaggtgagggaattctcaggggctgtggggttttatagactgtgcatcccaaactttgcagtgttagccaagcctttgtatgaggtcacaaagggggcggggaccgggaacctttggaatggggatcccaagaacagaaagtctttcaggagttaaaggaaaaacttctggcagccccagccctggggctacccgatctggcaaaggcttttccattgtatgcgttagagagagaaaagatggcagctcgacccgct

SEQ ID NO: 331916 - DNA, 1172 bp, Homo sapiens
  misc_feature (1028)..(1028): n is a, c, g, or t
  misc_feature (1041)..(1041): n is a, c, g, or t
  misc_feature (1049)..(1049): n is a, c, g, or t
  misc_feature (1090)..(1090): n is a, c, g, or t
  misc_feature (1112)..(1112): n is a, c, g, or t
  misc_feature (1132)..(1132): n is a, c, g, or t
tgcttgacaaagaacttcccaatcctcctccgagccctccagtccctagcccagttcgcccgggcccgcccctagcaacaagatcgcggggaggggccgaggcgaaacacgagccccgcgcccaccaccccagctggcgacgtggctccgcggccccggcttcccccggcagctcagcgaccaatgggcgcgcgagcggggccgcccgcagcttcccagcccgaggcccaggcgcgcccctctgctccggctcggggcgggcactggcggagggactggccagtcccctcctccgcgccggccccaaccctgtcgctgccgccgcgctccgagcccccattcccgagctgccgctgttgtcgctcgctcagcgtctccctcccggccgccctctcctcgggacgatggcgcgcggtgcggccgccgcctggggttagccctggggctgctgctggcgctggtgctggcgccgcgggttctgcgggccaagcccacggtgcgcaaagagcgcgtggtgcggcccgactcggagctgggcgagcggccccctgaggacaaccagagcttccagtacgaccacgaggccttcctgggcaaggaggactccaagaccttcgaccagctcaccccggacgagagcaaggagaggctagggaagattgttgatcgaatcgacaatgatggggatggctttgtcactactgaggagctgaaaacctggatcaaacgggtgcagaaaagatacatctttgataatgtcgccaaagtctggaaggattatgatagggacaaggatgataaaatttcctgggaagaatacaaacaagccacctatggttactacctaggaaaccccgcagagtttcatgattcttcagatcatcacacctttaaaaagatgctgccacgtgatgagagaagattcaaagctgcagacctcaatggtgacctgacagctactcgggaggagttcactgcctttctgcatcctgaagagtttgaacatatgaaggaaattgtggttttgnaaacccttggganggacatcnacaagaaacgggggaatgggttttgttggattaagggaatngagtttaattggccgggataangttttcccaatggaaggaanaattgggcccttgaagcccaaaactgggggttttaatcaa

SEQ ID NO: 331917 - DNA, 2459 bp, Homo sapiens
tgcttgacaaagaacttcccaatcctcctccgagccctccagtccctagcccagttcgcccgggcccgcccctagcaacaagatcgcggggaggggccgaggcgaaacacgagccccgcgcccaccaccccagctggcgacgtggctccgcggccccggcttcccccggcagctcagcgaccaatgggcgcgcgagcggggccgcccgcagcttcccagcccgaggcccaggcgcgcccctctgctccggctcggggcgggcactggcggagggactggccagtcccctcctccgcgccggccccaaccctgtcgctgccgccgcgctccgagcccccattcccgagctgccgctgttgtcgctcgctcagcgtctccctcccggccgccctctcctcgggacgatggcgcgcggtgcggccgccgcctggggttagccctggggctgctgctggcgctggtgctggcgccgcgggttctgcgggccaagcccacggtgcgcaaagagcgcgtggtgcggcccgactcggagctgggcgagcggccccctgaggacaaccagagcttccagtacgaccacgaggccttcctgggcaaggaggactccaagaccttcgaccagctcaccccggacgagagcaaggagaggctagggaagattgttgatcgaatcgacaatgatggggatggctttgtcactactgaggagctgaaaacctggatcaaacgggtgcagaaaagatacatctttgataatgtcgccaaagtctggaaggattatgatagggacaaggatgataaaatttcctgggaagaatacaaacaagccacctatggttactacctaggaaaccccgcagagtttcatgattcttcagatcatcacacctttaaaaagatgctgccacgtgatgagagaagattcaaagctgcagacctcaatggtgacctgacagctactcgggaggagttcactgcctttctgcatcctgaagagtttgaacatatgaaggaaattgtggttttggaaaccctggaggacatcgacaagaacggggatgggtttgtggatcaggatgagtatattgcggatatgttttcccatgaggagaatggccctgagccagactgggttttatcagaacgggagcagtttaacgaattccgggatctgaacaaggacgggaagttagacaaagatgagattcgccactggatcctccctcaagattatgatcacgcacaggctgaggccaggcatctggtatatgaatcagacaaaaacaaggatgagaagctaactaaagaggaaatattggagaactggaacatgtttgttggaagccaagctaccaattacggggaagatctcacaaaaaatcatgatgagctttgatagacactcaccagaatatggcagactgtcataggcattctgttattgtcttggattgttgctacaattgtctaatttacagcagttgtgatcccacaaaaagcaagtttatacctcagattggggtataaaaattgtttttcgctcagtatttactggaaaatggacatcactagtctttcagtaagatttctctcaaaacacgtgaaaaccttggtaaattgcaattctttctggggatatattggtacaacatgacttaaaacttttttttttctattaaaacttaaaggggaacaaaacttgaaaaagccctgttcttcagaaggtgagtgggttgagggaggcagtaatatgaagtgactgctgtgtattttaactaccagattttttatatttgccactgttaaatagttggaaaggggaaattctgattaagcgaaagtggtatcatcctaggtaagcttatttcagaacaagtctaatatttcagattctttcttttcgactttatactctgagttattacttactgtaagtggtgtatatgaaacctccatgcattttccagtatggatctgctaatatgcacagtaaatccatgtctttgtttgtttttctattaaaaagcaatcaagaaagataatgtgaaaaagaaaggaatttagaggtagggaaaagatgaatgtcagacatttgaagaactatagtaaaatgataaacactaaatatacttgagaaaactttcttaatatgccaatgaggtaggcctgatctttgaaatagtgaataggaatacaatgcatttcctcagtgatcactgattagaatgagttggtgggatccttgggaagccaaacggagcggagttctggatcatgtcccatccagtccagtgaatccacgacccgcagacctgcccccccgcaacagcttataccatggaatgaggacaaggtgatactctgagctgtggactgaactggcagacacaacctgtacagattgaaatttcaccttgtaaggaggaagtgaatgaaataaaggatccccctaaggattt

SEQ ID NO: 331918 - DNA, 2692 bp, Homo sapiens
ttttttttttttgagacagggtcctgctctgtcgcctaggctggagtgcaatggtgcatggtcatggcttgagcctggttaatttttgtatttttactagaaacagggttttgtcatgttgcccaggctgatctcaaacacctggattcaagcaatccgcccatcttgacctcccaaagtgttgggattacagatgtgagccaccgcgcttggccacgattccgtgatggtcaaagaaatcaaaacgtctgtcagctagtgttcagttcaggctgaggtgaaaaaatttttttacttgtaaaatatacataacataaaacttggccgccgcgctccgagcccccattcccgagctgccgctgttgtcgctcgctcagcgtctccctcccggccgccctctcctcgggacgatggcgcgcggtgcggccgccgcctggggttagccctggggctgctgctggcgctggtgctggcgccgcgggttctgcgggccaagcccacggtgcgcaaagagcgcgtggtgcggcccgactcggagctgggcgagcggccccctgaggacaaccagagcttccagtacgaccacgaggccttcctgggcaaggaggactccaagaccttcgaccagctcaccccggacgagagcaaggagaggctagggaagattgttgatcgaatcgacaatgatggggatggctttgtcactactgaggagctgaaaacctggatcaaacgggtgcagaaaagatacatctttgataatgtcgccaaagtctggaaggattatgatagggacaaggatgataaaatttcctgggaagaatacaaacaagccacctatggttactacctaggaaaccccgcagagtttcatgattcttcagatcatcacacctttaaaaagatgctgccacgtgatgagagaagattcaaagctgcagacctcaatggtgacctgacagctactcgggaggagttcactgcctttctgcatcctgaagagtttgaacatatgaaggaaattgtggttttggaaaccctggaggacatcgacaagaacggggatgggtttgtggatcaggatgagtatattgcggatatgttttcccatgaggagaatggccctgagccagactgggttttatcagaacgggagcagtttaacgaattccgggatctgaacaaggacgggaagttagacaaagatgagattcgccactggatcctccctcaagattatgatcacgcacaggctgaggccaggcatctggtatatgaatcagacaaaaacaaggatgagaagctaactaaagaggaaatattggagaactggaacatgtttgttggaagccaagctaccaattacggggaagatctcacaaaaaatcatgatgagctttgatagacactcaccagaatatggcagactgtcataggcattctgttattgtcttggattgttgctacaattgtctaatttacagcagttgtgatcccacaaaaagcaagtttatacctcagattggggtataaaaattgtttttcgctcagtatttactggaaaatggacatcactagtctttcagtaagatttctctcaaaacacgtgaaaaccttggtaaattgcaattctttctggggatatattggtacaacatgacttaaaacttttttttttctattaaaacttaaaggggaacaaaacttgaaaaagccctgttcttcagaaggtgagtgggttgagggaggcagtaatatgaagtgactgctgtgtattttaactaccagattttttatatttgccactgttaaatagttggaaaggggaaattctgattaagcgaaagtggtatcatcctaggtaagcttatttcagaacaagtctaatatttcagattctttcttttcgactttatactctgagttattacttactgtaagtggtgtatatgaaacctccatgcattttccagtatggatctgctaatatgcacagtaaatccatgtctttgtttgtttttctattaaaaagcaatcaagaaagataatgtgaaaaagaaaggaatttagaggtagggaaaagatgaatgtcagacatttgaagaactatagtaaaatgataaacactaaatatacttgagaaaactttcttaatatgccaatgaggtaggcctgatctttgaaatagtgaataggaatacaatgcatttcctcagtgatcactgattagaatgagttggtgggatccttgggaagccaaacggagcggagttctggatcatgtcccatccagtccagtgaatccacgacccgcagacctgcccccccgcaacagcttataccatggaatgaggacaaggtgatactctgagctgtggactgaactggcagacacaacctgtacagattgaaatttcaccttgtaaggaggaagtgaatgaaataaaggatccccctaaggatttaggattttctactgtgtcctgtggtgtttgacttcacagatgctatttgtgacattattcatatagcataaaacagtggggttggatcccatgaataacattataaaggttctggggttttttttcatccaattactagaatgttcagaatagactcatatttactaatttaataaatgtatatacttaatgcctttacttttctaggtcattttaactataaaatc

SEQ ID NO: 331919 - DNA, 2913 bp, Homo sapiens
ttttttttttttgagacagggtcctgctctgtcgcctaggctggagtgcaatggtgcatggtcatggcttgagcctggttaatttttgtatttttactagaaacagggttttgtcatgttgcccaggctgatctcaaacacctggattcaagcaatccgcccatcttgacctcccaaagtgttgggattacagatgtgagccaccgcgcttggccacgattccgtgatggtcaaagaaatcaaaacgtctgtcagctagtgttcagttcaggctgaggtgaaaaaatttttttacttgtaaaatatacataacataaaacttggccgccgcgctccgagcccccattcccgagctgccgctgttgtcgctcgctcagcgtctccctcccggccgccctctcctcgggacgatggcgcgcggtgcggccgccgcctggggttagccctggggctgctgctggcgctggtgctggcgccgcgggttctgcgggccaagcccacggtgcgcaaagagcgcgtggtgcggcccgactcggagctgggcgagcggccccctgaggacaaccagagcttccagtacgaccacgaggccttcctgggcaaggaggactccaagaccttcgaccagctcaccccggacgagagcaaggagaggctagggaagattgttgatcgaatcgacaatgatggggatggctttgtcactactgaggagctgaaaacctggatcaaacgggtgcagaaaagatacatctttgataatgtcgccaaagtctggaaggattatgatagggacaaggatgataaaatttcctgggaagaatacaaacaagccacctatggttactacctaggaaaccccgcagagtttcatgattcttcagatcatcacacctttaaaaagatgctgccacgtgatgagagaagattcaaagctgcagacctcaatggtgacctgacagctactcgggaggagttcactgcctttctgcatcctgaagagtttgaacatatgaaggaaattgtggttttggaaaccctggaggacatcgacaagaacggggatgggtttgtggatcaggatgagtatattgcggatatgttttcccatgaggagaatggccctgagccagactgggttttatcagaacgggagcagtttaacgaattccgggatctgaacaaggacgggaagttagacaaagatgagattcgccactggatcctccctcaagattatgatcacgcacaggctgaggccaggcatctggtatatgaatcagacaaaaacaaggatgagaagctaactaaagaggaaatattggagaactggaacatgtttgttggaagccaagctaccaattacggggaagatctcacaaaaaatcatgatgagctttgatagacactcaccagaatatggcagactgtcataggcattctgttattgtcttggattgttgctacaattgtctaatttacagcagttgtgatcccacaaaaagcaagtttatacctcagattggggtataaaaattgtttttcgctcagtatttactggaaaatggacatcactagtctttcagtaagatttctctcaaaacacgtgaaaaccttggtaaattgcaattctttctggggatatattggtacaacatgacttaaaacttttttttttctattaaaacttaaaggggaacaaaacttgaaaaagccctgttcttcagaaggtgagtgggttgagggaggcagtaatatgaagtgactgctgtgtattttaactaccagattttttatatttgccactgttaaatagttggaaaggggaaattctgattaagcgaaagtggtatcatcctaggtaagcttatttcagaacaagtctaatatttcagattctttcttttcgactttatactctgagttattacttactgtaagtggtgtatatgaaacctccatgcattttccagtatggatctgctaatatgcacagtaaatccatgtctttgtttgtttttctattaaaaagcaatcaagaaagataatgtgaaaaagaaaggaatttagaggtagggaaaagatgaatgtcagacatttgaagaactatagtaaaatgataaacactaaatatacttgagaaaactttcttaatatgccaatgaggtaggcctgatctttgaaatagtgaataggaatacaatgcatttcctcagtgatcactgattagaatgagttggtgggatccttgggaagccaaacggagcggagttctggatcatgtcccatccagtccagtgaatccacgacccgcagacctgcccccccgcaacagcttataccatggaatgaggacaaggtgatactctgagctgtggactgaactggcagacacaacctgtacagattgaaatttcaccttgtaaggaggaagtgaatgaaataaaggatccccctaaggatttgaacaacaaaacaaaacaaaacaaaaaacaaacaaaaaaacaaaaaaaacaaaagacaaaaaacaaacaaaacaacaaacaaacaaacaacgaaccacgaaaaacaacaaacaacgaaacaaaaagaacaacaaaaaaaacacaacgacaaaaaacacacggggggccgccgacttaactccattaactgactacgcaggaggaaacccaaccgcgtaggtaccatccacagacgcagtcatacacgaaagggacgcaccataagggaaagaagagagaaaaacaaacaagaaaagcggtcggcccatattaaccaaaagatgagccagcagccaaagatcacgagtcatcccataagcaggcagacgcacaactgctgggtgtctgacatcaaagacacacaaaccagaaaatagcgcgcgagaacaaactcacggctataaaggac

SEQ ID NO: 331920 - DNA, 2820 bp, Homo sapiens
ttttttttttttgagacagggtcctgctctgtcgcctaggctggagtgcaatggtgcatggtcatggcttgagcctggttaatttttgtatttttactagaaacagggttttgtcatgttgcccaggctgatctcaaacacctggattcaagcaatccgcccatcttgacctcccaaagtgttgggattacagatgtgagccaccgcgcttggccacgattccgtgatggtcaaagaaatcaaaacgtctgtcagctagtgttcagttcaggctgaggtgaaaaaatttttttacttgtaaaatatacataacataaaacttggccgccgcgctccgagcccccattcccgagctgccgctgttgtcgctcgctcagcgtctccctcccggccgccctctcctcgggacgatggcgcgcggtgcggccgccgcctggggttagccctggggctgctgctggcgctggtgctggcgccgcgggttctgcgggccaagcccacggtgcgcaaagagcgcgtggtgcggcccgactcggagctgggcgagcggccccctgaggacaaccagagcttccagtacgaccacgaggccttcctgggcaaggaggactccaagaccttcgaccagctcaccccggacgagagcaaggagaggctagggaagattgttgatcgaatcgacaatgatggggatggctttgtcactactgaggagctgaaaacctggatcaaacgggtgcagaaaagatacatctttgataatgtcgccaaagtctggaaggattatgatagggacaaggatgataaaatttcctgggaagaatacaaacaagccacctatggttactacctaggaaaccccgcagagtttcatgattcttcagatcatcacacctttaaaaagatgctgccacgtgatgagagaagattcaaagctgcagacctcaatggtgacctgacagctactcgggaggagttcactgcctttctgcatcctgaagagtttgaacatatgaaggaaattgtggttttggaaaccctggaggacatcgacaagaacggggatgggtttgtggatcaggatgagtatattgcggatatgttttcccatgaggagaatggccctgagccagactgggttttatcagaacgggagcagtttaacgaattccgggatctgaacaaggacgggaagttagacaaagatgagattcgccactggatcctccctcaagattatgatcacgcacaggctgaggccaggcatctggtatatgaatcagacaaaaacaaggatgagaagctaactaaagaggaaatattggagaactggaacatgtttgttggaagccaagctaccaattacggggaagatctcacaaaaaatcatgatgagctttgatagacactcaccagaatatggcagactgtcataggcattctgttattgtcttggattgttgctacaattgtctaatttacagcagttgtgatcccacaaaaagcaagtttatacctcagattggggtataaaaattgtttttcgctcagtatttactggaaaatggacatcactagtctttcagtaagatttctctcaaaacacgtgaaaaccttggtaaattgcaattctttctggggatatattggtacaacatgacttaaaacttttttttttctattaaaacttaaaggggaacaaaacttgaaaaagccctgttcttcagaaggtgagtgggttgagggaggcagtaatatgaagtgactgctgtgtattttaactaccagattttttatatttgccactgttaaatagttggaaaggggaaattctgattaagcgaaagtggtatcatcctaggtaagcttatttcagaacaagtctaatatttcagattctttcttttcgactttatactctgagttattacttactgtaagtggtgtatatgaaacctccatgcattttccagtatggatctgctaatatgcacagtaaatccatgtctttgtttgtttttctattaaaaagcaatcaagaaagataatgtgaaaaagaaaggaatttagaggtagggaaaagatgaatgtcagacatttgaagaactatagtaaaatgataaacactaaatatacttgagaaaactttcttaatatgccaatgaggtaggcctgatctttgaaatagtgaataggaatacaatgcatttcctcagtgatcactgattagaatgagttggtgggatccttgggaagccaaacggagcggagttctggatcatgtcccatccagtccagtgaatccacgacccgcagacctgcccccccgcaacagcttataccatggaatgaggacaaggtgatactctgagctgtggactgaactggcagacacaacctgtacagattgaaatttcaccttgtaaggaggaagtgaatgaaataaaggatccccctaaggattttaagcgtacagttcagtgacattaagcacattcacattgctgtgtaaccatcgccaccatccatctccagaacttgaaataaatggttttgagtagattttggtttttaattgatttagcattgtatgtccttgtagccctggtacaggcccaagctggaaaataagagccccaacttccatctgaatacttggatttttcatgcttgtgagaggctcccatagttccctgaattcatctagaaatagcaactatcgtgtcaagcaaatatttttcattcaaccagcctactccctgggcttcaaatcctttcatatgaggaacaaagccaaacaccagcagttggtgattgctg

SEQ ID NO: 331921 - DNA, 2027 bp, Homo sapiens
tatccttgtggctgttgcataggctctgttacttgggccattgatactacacatcacatgtaaatatctctacaaacgcagggggcaggggaagtccgaactgggcgagcggccccctgaggacaaccagagcttccagtacgaccacgaggccttcctgggcaaggaggactccaagaccttcgaccagctcaccccggacgagagcaaggagaggctagggaagattgttgatcgaatcgacaatgatggggatggctttgtcactactgaggagctgaaaacctggatcaaacgggtgcagaaaagatacatctttgataatgtcgccaaagtctggaaggattatgatagggacaaggatgataaaatttcctgggaagaatacaaacaagccacctatggttactacctaggaaaccccgcagagtttcatgattcttcagatcatcacacctttaaaaagatgctgccacgtgatgagagaagattcaaagctgcagacctcaatggtgacctgacagctactcgggaggagttcactgcctttctgcatcctgaagagtttgaacatatgaaggaaattgtggttttggaaaccctggaggacatcgacaagaacggggatgggtttgtggatcaggatgagtatattgcggatatgttttcccatgaggagaatggccctgagccagactgggttttatcagaacgggagcagtttaacgaattccgggatctgaacaaggacgggaagttagacaaagatgagattcgccactggatcctccctcaagattatgatcacgcacaggctgaggccaggcatctggtatatgaatcagacaaaaacaaggatgagaagctaactaaagaggaaatattggagaactggaacatgtttgttggaagccaagctaccaattacggggaagatctcacaaaaaatcatgatgagctttgatagacactcaccagaatatggcagactgtcataggcattctgttattgtcttggattgttgctacaattgtctaatttacagcagttgtgatcccacaaaaagcaagtttatacctcagattggggtataaaaattgtttttcgctcagtatttactggaaaatggacatcactagtctttcagtaagatttctctcaaaacacgtgaaaaccttggtaaattgcaattctttctggggatatattggtacaacatgacttaaaacttttttttttctattaaaacttaaaggggaacaaaacttgaaaaagccctgttcttcagaaggtgagtgggttgagggaggcagtaatatgaagtgactgctgtgtattttaactaccagattttttatatttgccactgttaaatagttggaaaggggaaattctgattaagcgaaagtggtatcatcctaggtaagcttatttcagaacaagtctaatatttcagattctttcttttcgactttatactctgagttattacttactgtaagtggtgtatatgaaacctccatgcattttccagtatggatctgctaatatgcacagtaaatccatgtctttgtttgtttttctattaaaaagcaatcaagaaagataatgtgaaaaagaaaggaatttagaggtagggaaaagatgaatgtcagacatttgaagaactatagtaaaatgataaacactaaatatacttgagaaaactttcttaatatgccaatgaggtaggcctgatctttgaaatagtgaataggaatacaatgcatttcctcagtgatcactgattagaatgagttggtgggatccttgggaagccaaacggagcggagttctggatcatgtcccatccagtccagtgaatccacgacccgcagacctgcccccccgcaacagcttataccatggaatgaggacaaggtgatactctgagctgtggactgaactggcagacacaacctgtacagattgaaatttcaccttgtaaggaggaagtgaatgaaataaaggatccccctaaggattt

SEQ ID NO: 331922 - DNA, 2335 bp, Homo sapiens
ttttttttttttgagacagggtcctgctctgtcgcctaggctggagtgcaatggtgcatggtcatggcttgagcctggttaatttttgtatttttactagaaacagggttttgtcatgttgcccaggctgatctcaaacacctggattcaagcaatccgcccatcttgacctcccaaagtgttgggattacagatgtgagccaccgcgcttggccacgattccgtgatggtcaaagaaatcaaaacgtctgtcagctagtgttcagttcaggctgaggtgaaaaaatttttttacttgtaaaatatacataacataaaacttggccgccgcgctccgagcccccattcccgagctgccgctgttgtcgctcgctcagcgtctccctcccggccgccctctcctcgggacgatggcgcgcggtgcggccgccgcctggggttagccctggggctgctgctggcgctggtgctggcgccgcgggttctgcgggccaagcccacggtgcgcaaagagcgcgtggtgcggcccgactcggagctgggcgagcggccccctgaggacaaccagagcttccagtacgaccacgaggccttcctgggcaaggaggactccaagaccttcgaccagctcaccccggacgagagcaaggagaggctagggaagattgttgatcgaatcgacaatgatggggatggctttgtcactactgaggagctgaaaaccgaaaccccgcagagtttcatgattcttcagatcatcacacctttaaaaagatgctgccacgtgatgagagaagattcaaagctgcagacctcaatggtgacctgacagctactcgggaggagttcactgcctttctgcatcctgaagagtttgaacatatgaaggaaattgtggttttggaaaccctggaggacatcgacaagaacggggatgggtttgtggatcaggatgagtatattgcggatatgttttcccatgaggagaatggccctgagccagactgggttttatcagaacgggagcagtttaacgaattccgggatctgaacaaggacgggaagttagacaaagatgagattcgccactggatcctccctcaagattatgatcacgcacaggctgaggccaggcatctggtatatgaatcagacaaaaacaaggatgagaagctaactaaagaggaaatattggagaactggaacatgtttgttggaagccaagctaccaattacggggaagatctcacaaaaaatcatgatgagctttgatagacactcaccagaatatggcagactgtcataggcattctgttattgtcttggattgttgctacaattgtctaatttacagcagttgtgatcccacaaaaagcaagtttatacctcagattggggtataaaaattgtttttcgctcagtatttactggaaaatggacatcactagtctttcagtaagatttctctcaaaacacgtgaaaaccttggtaaattgcaattctttctggggatatattggtacaacatgacttaaaacttttttttttctattaaaacttaaaggggaacaaaacttgaaaaagccctgttcttcagaaggtgagtgggttgagggaggcagtaatatgaagtgactgctgtgtattttaactaccagattttttatatttgccactgttaaatagttggaaaggggaaattctgattaagcgaaagtggtatcatcctaggtaagcttatttcagaacaagtctaatatttcagattctttcttttcgactttatactctgagttattacttactgtaagtggtgtatatgaaacctccatgcattttccagtatggatctgctaatatgcacagtaaatccatgtctttgtttgtttttctattaaaaagcaatcaagaaagataatgtgaaaaagaaaggaatttagaggtagggaaaagatgaatgtcagacatttgaagaactatagtaaaatgataaacactaaatatacttgagaaaactttcttaatatgccaatgaggtaggcctgatctttgaaatagtgaataggaatacaatgcatttcctcagtgatcactgattagaatgagttggtgggatccttgggaagccaaacggagcggagttctggatcatgtcccatccagtccagtgaatccacgacccgcagacctgcccccccgcaacagcttataccatggaatgaggacaaggtgatactctgagctgtggactgaactggcagacacaacctgtacagattgaaatttcaccttgtaaggaggaagtgaatgaaataaaggatccccctaaggattt

SEQ ID NO: 331923 - DNA, 2425 bp, Homo sapiens
ttttttttttttgagacagggtcctgctctgtcgcctaggctggagtgcaatggtgcatggtcatggcttgagcctggttaatttttgtatttttactagaaacagggttttgtcatgttgcccaggctgatctcaaacacctggattcaagcaatccgcccatcttgacctcccaaagtgttgggattacagatgtgagccaccgcgcttggccacgattccgtgatggtcaaagaaatcaaaacgtctgtcagctagtgttcagttcaggctgaggtgaaaaaatttttttacttgtaaaatatacataacataaaacttggccgccgcgctccgagcccccattcccgagctgccgctgttgtcgctcgctcagcgtctccctcccggccgccctctcctcgggacgatggcgcgcggtgcggccgccgcctggggttagccctggggctgctgctggcgctggtgctggcgccgcgggttctgcgggccaagcccacggtgcgcaaagagcgcgtggtgcggcccgactcggagctgggcgagcggccccctgaggacaaccagagcttccagtacgaccacgaggccttcctgggcaaggaggactccaagaccttcgaccagctcaccccggacgagagcaaggagaggctagggaagattgttgatcgaatcgacaatgatggggatggctttgtcactactgaggagctgaaaacctggatcaaacgggtgcagaaaagatacatctttgataatgtcgccaaagtctggaaggattatgatagggacaaggatgataaaatttcctgggaagaatacaaacaagccacctatggttactacctagctttaaaaagatgctgccacgtgatgagagaagattcaaagctgcagacctcaatggtgacctgacagctactcgggaggagttcactgcctttctgcatcctgaagagtttgaacatatgaaggaaattgtggttttggaaaccctggaggacatcgacaagaacggggatgggtttgtggatcaggatgagtatattgcggatatgttttcccatgaggagaatggccctgagccagactgggttttatcagaacgggagcagtttaacgaattccgggatctgaacaaggacgggaagttagacaaagatgagattcgccactggatcctccctcaagattatgatcacgcacaggctgaggccaggcatctggtatatgaatcagacaaaaacaaggatgagaagctaactaaagaggaaatattggagaactggaacatgtttgttggaagccaagctaccaattacggggaagatctcacaaaaaatcatgatgagctttgatagacactcaccagaatatggcagactgtcataggcattctgttattgtcttggattgttgctacaattgtctaatttacagcagttgtgatcccacaaaaagcaagtttatacctcagattggggtataaaaattgtttttcgctcagtatttactggaaaatggacatcactagtctttcagtaagatttctctcaaaacacgtgaaaaccttggtaaattgcaattctttctggggatatattggtacaacatgacttaaaacttttttttttctattaaaacttaaaggggaacaaaacttgaaaaagccctgttcttcagaaggtgagtgggttgagggaggcagtaatatgaagtgactgctgtgtattttaactaccagattttttatatttgccactgttaaatagttggaaaggggaaattctgattaagcgaaagtggtatcatcctaggtaagcttatttcagaacaagtctaatatttcagattctttcttttcgactttatactctgagttattacttactgtaagtggtgtatatgaaacctccatgcattttccagtatggatctgctaatatgcacagtaaatccatgtctttgtttgtttttctattaaaaagcaatcaagaaagataatgtgaaaaagaaaggaatttagaggtagggaaaagatgaatgtcagacatttgaagaactatagtaaaatgataaacactaaatatacttgagaaaactttcttaatatgccaatgaggtaggcctgatctttgaaatagtgaataggaatacaatgcatttcctcagtgatcactgattagaatgagttggtgggatccttgggaagccaaacggagcggagttctggatcatgtcccatccagtccagtgaatccacgacccgcagacctgcccccccgcaacagcttataccatggaatgaggacaaggtgatactctgagctgtggactgaactggcagacacaacctgtacagattgaaatttcaccttgtaaggaggaagtgaatgaaataaaggatccccctaaggattt

SEQ ID NO: 331924 - DNA, 1867 bp, Homo sapiens
ttttttttttttgagacagggtcctgctctgtcgcctaggctggagtgcaatggtgcatggtcatggcttgagcctggttaatttttgtatttttactagaaacagggttttgtcatgttgcccaggctgatctcaaacacctggattcaagcaatccgcccatcttgacctcccaaagtgttgggattacagatgtgagccaccgcgcttggccacgattccgtgatggtcaaagaaatcaaaacgtctgtcagctagtgttcagttcaggctgaggtgaaaaaatttttttacttgtaaaatatacataacataaaacttggccgccgcgctccgagcccccattcccgagctgccgctgttgtcgctcgctcagcgtctccctcccggccgccctctcctcgggacgatggcgcgcggtgcggccgccgcctggggttagccctggggctgctgctggcgctggtgctggcgccgcgggttctgcgggccaagcccacggtgcgcaaagagcgcgtggtgcggcccgactcggagctgggcgagcggccccctgaggacaaccagagcttccagtacgaccacgaggccttcctgggcaaggaggactccaagaccttcgaccagctcaccccggacgagagcaaggagaggctagggaagattgttgatcgaatcgacaatgatggggatggctttgtcactactgaggagctgaaaacctggatcaaacgggtgcagaaaagatacatctttgataatgtcgccaaagtctggaaggattatgatagggacaaggatgataaaatttcctgggaagaatacaaacaagccacctatggttactacctaggaaaccccgcagagtttcatgattcttcagatcatcacacctttaaaaagatgctgccacgtgatgagagaagattcaaagctgcagacctcaatggtgacctgacagctactcgggaggagttcactgcctttctgcatcctgaagagtttgaacatatgaaggaaattgtggttttggaaaccctggaggacatcgacaagaacggggatgggtttgtggatcaggatgagtatattgcggatatgttttcccatgaggagaatggccctgagccagactgggttttatcagaacgggagcagtttaacgaattccgggatctgaacaaggacgggaagttagacaaagatgagattcgccactggatcctccctcaagattatgatcacgcacaggctgaggccaggcatctggtatatgaatcagacaaaaacaaggatgagaagctaactaaagaggaaatattggagaactggaacatgtttgttggaagccaagctaccaattacggggaagatctcacaaaaaatcatgatgagctttgatagacactcaccagaatatggcagactgtcataggcattctgttattgtcttggattgttgctacaattgtctaatttacagcagttgtgatcccacaaaaagcaagtttatacctcagattggggtataaaaattgtttttcgctcagtatttactggaaaatggacatcactagtctttcagtaagatttctctcaaaacacgtgaaaaccttgtgatcactgattagaatgagttggtgggatccttgggaagccaaacggagcggagttctggatcatgtcccatccagtccagtgaatccacgacccgcagacctgcccccccgcaacagcttataccatggaatgaggacaaggtgatactctgagctgtggactgaactggcagacacaacctgtacagattgaaatttcaccttgtaaggaggaagtgaatgaaataaaggatccccctaaggattt

SEQ ID NO: 331925 - DNA, 1436 bp, Homo sapiens
ttttttttttttgagacagggtcctgctctgtcgcctaggctggagtgcaatggtgcatggtcatggcttgagcctggttaatttttgtatttttactagaaacagggttttgtcatgttgcccaggctgatctcaaacacctggattcaagcaatccgcccatcttgacctcccaaagtgttgggattacagatgtgagccaccgcgcttggccacgattccgtgatggtcaaagaaatcaaaacgtctgtcagctagtgttcagttcaggctgaggtgaaaaaatttttttacttgtaaaatatacataacataaaacttggccgccgcgctccgagcccccattcccgagctgccgctgttgtcgctcgctcagcgtctccctcccggccgccctctcctcgggacgatggcgcgcggtgcggccgccgcctggggttagccctggggctgctgctggcgctggtgctggcgccgcgggttctgcgggccaagcccacggtgcgcaaagagcgcgtggtgcggcccgactcggagctgggcgagcggccccctgaggacaaccagagcttccagtacgaccacgaggccttcctgggcaaggaggactccaagaccttcgaccagctcaccccggacgagagcaaggagaggctagggaagattgttgatcgaatcgacaatgatggggatggctttgtcactactgaggagctgaaaaccgaaaccccgcagagtttcatgattcttcagatcatcacacctttaaaaagatgctgccacgtgatgagagaagattcaaagctgcagacctcaatggtgacctgacagctactcgggaggagttcactgcctttctgcatcctgaagagtttgaacatatgaaggaaattgtggttttgtactgtaagtggtgtatatgaaacctccatgcattttccagtatggatctgctaatatgcacagtaaatccatgtctttgtttgtttttctattaaaaagcaatcaagaaagataatgtgaaaaagaaaggaatttagaggtagggaaaagatgaatgtcagacatttgaagaactatagtaaaatgataaacactaaatatacttgagaaaactttcttaatatgccaatgaggtaggcctgatctttgaaatagtgaataggaatacaatgcatttcctcagtgatcactgattagaatgagttggtgggatccttgggaagccaaacggagcggagttctggatcatgtcccatccagtccagtgaatccacgacccgcagacctgcccccccgcaacagcttataccatggaatgaggacaaggtgatactctgagctgtggactgaactggcagacacaacctgtacagattgaaatttcaccttgtaaggaggaagtgaatgaaataaaggatccccctaaggattt

SEQ ID NO: 331926 - DNA, 1178 bp, Homo sapiens
  misc_feature (1034)..(1034): n is a, c, g, or t
  misc_feature (1047)..(1047): n is a, c, g, or t
  misc_feature (1055)..(1055): n is a, c, g, or t
  misc_feature (1096)..(1096): n is a, c, g, or t
  misc_feature (1118)..(1118): n is a, c, g, or t
  misc_feature (1138)..(1138): n is a, c, g, or t
ttttttttttttgagacagggtcctgctctgtcgcctaggctggagtgcaatggtgcatggtcatggcttgagcctggttaatttttgtatttttactagaaacagggttttgtcatgttgcccaggctgatctcaaacacctggattcaagcaatccgcccatcttgacctcccaaagtgttgggattacagatgtgagccaccgcgcttggccacgattccgtgatggtcaaagaaatcaaaacgtctgtcagctagtgttcagttcaggctgaggtgaaaaaatttttttacttgtaaaatatacataacataaaacttggccgccgcgctccgagcccccattcccgagctgccgctgttgtcgctcgctcagcgtctccctcccggccgccctctcctcgggacgatggcgcgcggtgcggccgccgcctggggttagccctggggctgctgctggcgctggtgctggcgccgcgggttctgcgggccaagcccacggtgcgcaaagagcgcgtggtgcggcccgactcggagctgggcgagcggccccctgaggacaaccagagcttccagtacgaccacgaggccttcctgggcaaggaggactccaagaccttcgaccagctcaccccggacgagagcaaggagaggctagggaagattgttgatcgaatcgacaatgatggggatggctttgtcactactgaggagctgaaaacctggatcaaacgggtgcagaaaagatacatctttgataatgtcgccaaagtctggaaggattatgatagggacaaggatgataaaatttcctgggaagaatacaaacaagccacctatggttactacctaggaaaccccgcagagtttcatgattcttcagatcatcacacctttaaaaagatgctgccacgtgatgagagaagattcaaagctgcagacctcaatggtgacctgacagctactcgggaggagttcactgcctttctgcatcctgaagagtttgaacatatgaaggaaattgtggttttgnaaacccttggganggacatcnacaagaaacgggggaatgggttttgttggattaagggaatngagtttaattggccgggataangttttcccaatggaaggaanaattgggcccttgaagcccaaaactgggggttttaatcaa

SEQ ID NO: 331927 - DNA, 1547 bp, Homo sapiens
ttttttttttttgagacagggtcctgctctgtcgcctaggctggagtgcaatggtgcatggtcatggcttgagcctggttaatttttgtatttttactagaaacagggttttgtcatgttgcccaggctgatctcaaacacctggattcaagcaatccgcccatcttgacctcccaaagtgttgggattacagatgtgagccaccgcgcttggccacgattccgtgatggtcaaagaaatcaaaacgtctgtcagctagtgttcagttcaggctgaggtgaaaaaatttttttacttgtaaaatatacataacataaaacttggccgccgcgctccgagcccccattcccgagctgccgctgttgtcgctcgctcagcgtctccctcccggccgccctctcctcgggacgatggcgcgcggtgcggccgccgcctggggttagccctggggctgctgctggcgctggtgctggcgccgcgggttctgcgggccaagcccacggtgcgcaaagagcgcgtggtgcggcccgactcggagctgggcgagcggccccctgaggacaaccagagcttccagtacgaccacgaggccttcctgggcaaggaggactccaagaccttcgaccagctcaccccggacgagagcaaggagaggctagggaagattgttgatcgaatcgacaatgatggggatggctttgtcactactgaggagctgaaaaccgaaaccccgcagagtttcatgattcttcagatcatcacacctttaaaaagatgctgccacgtgatgagagaagattcaaagctgcagacctcaatggtgacctgacagctactcgggaggagttcactgcctttctgcatcctgaagagtttgaacatatgaaggaaattgtggttttgtactgtaagtggtgtatatgaaacctccatgcattttccagtatggatctgctaatatgcacagtaaatccatgtctttgtttgtttttctattaaaaagttcggatttactctccgacaggggtccgaacgcagcccgggaacagaaagaaagcaggtcatttgcaatctaccggagcctggaggactgtgggtattaggtctccaagaagaaagctccaatctgccgacggcaggtaccttacttgggagttactatccgacaggggtccgaacgcagcccgggaacagaaagaaagcaggtcatttgcaatctaccggagcctggaggactgtgggtattaggtgtccaagaagaaagctcaaatctgctgacggcaggtaccttgcttgggatttactggaggactgtgggtattaggtgtccaagaagaaagctcaaatctgccaacggcaggtaccttacttgggatttactctccgacgggtcgatgccacccgggaacagaaagaaagcaggtcatttgcaatctaccggagcctggaggactgtgggtattaggtgtccaagaagaaagctcaaatctgccaacggcaggtaccttacttgggatttactctccgacgggtccgatgccgcccgg

SEQ ID NO: 331928 - DNA, 752 bp, Homo sapiens
tgagagagtgtatgggttcgtcaaggacgtcgagagtcccaggagtcgatgggagcgtcactgccgcgcagagacaaggaaatggctggcagcgtgggcaccattgagagggtacgcgacagcctggtcatagggcctaggagacactggaaggggtagagctgtgaaggagccatgcagagagccgtatccggcagcaggggtgagttaggtggggaagagttgccagaaagaccacgcatgccatgtataatgatccagcagctaggtgtgaggtaggggcctggtaggcataccaggccaggctaaggcactgacgcacactcagaggggtctgtagcttgcatgagaccccacctgcagagttgccacacattgtaccttatgatatggcaggcgtaaaatgataaacactaaatatacttgagaaaactttcttaatatgccaatgaggtaggcctgatctttgaaatagtgaataggaatacaatgcatttcctcagtgatcactgattagaatgagttggtgggatccttgggaagccaaacggagcggagttctggatcatgtcccatccagtccagtgaatccacgacccgcagacctgcccccccgcaacagcttataccatggaatgaggacaaggtgatactctgagctgtggactgaactggcagacacaacctgtacagattgaaatttcaccttgtaaggaggaagtgaatgaaataaaggatccccctaaggattt

SEQ ID NO: 331929 - DNA, 3409 bp, Homo sapiens
agtatgaggcgcccaccatggtgcgatgcgaccgcgggctgcagatgctgctgaccacggccggagccttcgccgccttctcgctcatggccatcgccatcggcaccgactactggctgtactccagcgcgcacatctgcaacggcaccaacctgaccatggacgacgggcccccgccccgccgcgcccgcggcgacctcacccactctggtctgtggcgggtgtgctgcatcgaagggatctataaagggcactgcttccggatcaatcacttcccagaggacaatgactacgaccacgacagctcggagtacctcctccgcatcgtgcgagcctccagcgtcttccccatcctcagcaccatcctgctcctgctgggtggcctgtgcatcggtgctggcaggatctacagccgcaagaacaacatcgtcctcagtgccggcatcctcttcgtggctgcaggcctcagtaacatcatcggtatcatcgtctacatttccagcaacacaggtgacccgagtgacaagcgggacgaagacaaaaagaaccattacaactacggctggtctttttactttggagctctgtctttcattgtggctgagaccgtgggcgtcctggctgtaaacatttacattgagaaaaataaagagttgaggtttaagaccaaacgggaattccttaaggcgtcttcctcttctccttatgccaggatgccgagctacaggtaccggcgacggcgctcgaggtccagctcaaggtccaccgaggcctcgccctccagggacgtgtcgcccatgggcctgaagatcacaggggccatccccatgggggagctgtccatgtacacgctgtccagggagcccctcaaggtgaccaccgcagccagctacagccccgaccaggaggccagcttcctgcaggtgcatgactttttccagcaggacctgaaggaaggtttccacgtcagcatgctgaaccgacggacgacccctgtgtgagccgcctgccctttctctccgctccagcctctccccagaacggctctttttgtcacacaggatggcatgtgatcctcaagacgacgaacaatgaactaaagccaaatgcagccctccctggcctccagaggtggcgtgggctggctttgcacgaaggttgtgctgggagaccggacccggggctgcagaagaagctgaaggctgactttgtcccctccccgaaaaagggtgttttgatgcctcagggtctctgaaatctcccgggaagccccagagctttcctgaggctgcctggccttgatcaacttgggaagacaaaattgagccattatctcctcttggaaacgaatcttgccagaaaaacgggatttcagggccttccctccctgcctgggtgtcgggccaccagaaggctctgccggacgccaagaagacggtctctgggctcttgtcagctgcttttgaacctgaggttcctgcgtcgttgagccagaaatcagaccaccgaagctcactcccttcctctccatctctccctctctccaagactctggcagtggcctatgatcctgaagacagctctgcagccaactggtgctttggcctttgcgctgtcccggggccagcttccctcgacctggggaggccgtggcctgtggaggaggcccaggtaaaggctgggggctgttgctggctatcctctttgcttctggaagtttctgcctcactcagaatgggcaggacagacccactgactggacttcagagtctggagggttccatcggtcaggggaatggcggccacgtgacctcttgccgtgccccttgtcatagacccaaggagcaactctgtcccctgagcgttgggggtcccgggggagaggtggacagacacctccctccaactggcatttggcaacaggagcctggacttctgtgcaagaaagggagacctaagggtgaacagtggccaataaaaaccctagagaacaaacatccatttcctaggtggttacaaatcataacttcctgcaaatcaacgccaggagagcaacttaccttcatttctttgtcttaaaaagtagcagcaactggccccacaactcctgtcattgtaagttattctgccaccacctaacaggacggagtggagtgagtttggataaacggaccgagctgggcttctcttcctccctacagaggggagatctcagcactttgtccggagctgaggaagtggtttctgtgttttacagtttttccagccattcttttcttccccctcctgaagcaagcaaagagcgtggaggcgtgtgcaggcttggaagaagaactctccagaacatggaacttaaccctcttttgtataaaacatgtgctttctaaagaaaaattgtttcttattttttgagactccttgatccaccctggaacagtcgcctgtagtcctggtagctgttgtgcttggaaataacgagcgcatccttgcctcagctacctgctcacagcccatgggtggactcggccccctggggttcagacccaggtccgttcggcctagtgatgatgtcatcgtccatcccatcttcctttgcccccaggaaaggacgcatccaccggtagcggccccagctgactgtcgccgtgtgctggggatctgaaatgaggcctgccagggcccctgtgtgctgtgctccagagccttcgctcccatcagggttggcatcatctgatggcatgtccaagtgtgcccagcagcggatgctgaagcaccagagctcaaggccttcacctgctctaggccagccctgtcaccacctccactgccatgaccaggccgaaggcagggaacgccctccccagtcccgctgtccagcaaggccccgagacttttcttctgtgatttccaaaagcaaggcagccgtgctgttctagttcctctccatccgccacctcccctcccgctgccccagaagtttctatcattccatggagaaagctgtgttccaatgaatcctacctcttgcccagtcccaggcagagtaagcagggcccacctagggaccaagaaagagtaggaagaaggggacgagccgggagcaaaaccacctcagacacccgggccttctcagccttctccccgcggccagctgggtctccggggaccctgggccctgggccgcccattcctggccctcccgctgcatctcagacctgacacccaacggggggatgtggtggcctgtgcccaccttctctccctcctcccgacccgccccctcgcccccacccctgtgtgtttcgccagttaagcacctgtgactccagtacctactactggttttgggttggttgttctgtcttttttttaattaaataaaaacatttttaaaatgttcacaaaatga

SEQ ID NO: 331930 - DNA, 1556 bp, Homo sapiens
agtatgaggcgcccaccatggtgcgatgcgaccgcgggctgcagatgctgctgaccacggccggagccttcgccgccttctcgctcatggccatcgccatcggcaccgactactggctgtactccagcgcgcacatctgcaacggcaccaacctgaccatggacgacgggcccccgccccgccgcgcccgcggcgacctcacccactctggtctgtggcgggtgtgctgcatcgaagggatctataaagggcactgcttccggatcaatcacttcccagaggacaatgactacgaccacgacagctcggagtacctcctccgcatcgtgcgagcctccagcgtcttccccatcctcagcaccatcctgctcctgctgggtggcctgtgcatcggtgctggcaggatctacagccgcaagaacaacatcgtcctcagtgccggcatcctcttcgtggctgcaggcctcagtaacatcatcggtatcatcgtctacatttccagcaacacaggtgacccgagtgacaagcgggacgaagacaaaaagaaccattacaactacggctggtctttttactttggagctctgtctttcattgtggctgagaccgtgggcgtcctggctgtaaacatttacattgagaaaaataaagagttgaggtttaagaccaaacgggaattccttaaggcgtcttcctcttctccttatgccaggatgccgagctacaggtaccggcgacggcgctcgaggtccagctcaaggtccaccgaggcctcgccctccagggacgtgtcgcccatgggcctgaagatcacaggggccatccccatgggggagctgtccatgtacacgctgtccagggagcccctcaaggtgaccaccgcagccagctacagccccgaccaggaggccagcttcctgcaggtgcatgactttttccagcaggacctgaaggaaggtttccacgtcagcatgctgaaccgacggacgacccctgtgtgagccgcctgccctttctctccgctccagcctctccccagaacggctctttttgtcacacaggatggcatgtgatcctcaagacgacgaacaatgaactaaagccaaatgcagccctccctggcctccagaggtggcgtgggctggctttgcacgaaggttgtgctgggagaccggacccggggctgcagagtaagcagggcccacctagggaccaagaaagagtaggaagaaggggacgagccgggagcaaaaccacctcagacacccgggccttctcagccttctccccgcggccagctgggtctccggggaccctgggccctgggccgcccattcctggccctcccgctgcatctcagacctgacacccaacggggggatgtggtggcctgtgcccaccttctctccctcctcccgacccgccccctcgcccccacccctgtgtgtttcgccagttaagcacctgtgactccagtacctactactggttttgggttggttgttctgtcttttttttaattaaataaaaacatttttaaaatgttcacaaaatga

SEQ ID NO: 331931 - DNA, 1325 bp, Homo sapiens
agtatgaggcgcccaccatggtgcgatgcgaccgcgggctgcagatgctgctgaccacggccggagccttcgccgccttctcgctcatggccatcgccatcggcaccgactactggctgtactccagcgcgcacatctgcaacggcaccaacctgaccatggacgacgggcccccgccccgccgcgcccgcggcgacctcacccactctggtctgtggcgggtgtgctgcatcgaagggatctataaagggcactgcttccggatcaatcacttcccagaggacaatgactacgaccacgacagctcggagtacctcctccgcatcgtgcgagcctccagcgtcttccccatcctcagcaccatcctgctcctgctgggtggcctgtgcatcggtgctggcaggatctacagccgcaagaacaacatcgtcctcagtgccggcatcctcttcgtggctgcaggcctcagtaacatcatcggtatcatcgtctacatttccagcaacacaggtgacccgagtgacaagcgggacgaagacaaaaagaaccattacaactacggctggtctttttactttggagctctgtctttcattgtggctgagaccgtgggcgtcctggctgtaaacatttacattgagaaaaataaagagttgaggtttaagaccaaacgggaattccttaaggcgtcttcctcttctccttatgccaggatgccgagctacaggtaccggcgacggcgctcgaggtccagctcaaggtccaccgaggcctcgccctccagggacgtgtcgcccatgggcctgaagatcacaggggccatccccatgggggagctgtccatgtacacgctgtccagggagcccctcaaggtgaccaccgcagccagctacagccccgaccaggaggccagcttcctgcaggtgcatgactttttccagcaggacctgaaggaaggtttccacgtcagcatgctgaaccgacggacgacccctgtgtgagccgcctgccctttctctccgctccagcctctccccagaacggctctttttgtcacacaggatggcatgtgatcctcaagacgacgaacaatgaactaaagccaaatgcagccctccctggcctccagaggtggcgtgggctggctttgcacgaaggtttgtgcccaccttctctccctcctcccgacccgccccctcgcccccacccctgtgtgtttcgccagttaagcacctgtgactccagtacctactactggttttgggttggttgttctgtcttttttttaattaaataaaaacatttttaaaatgttcacaaaatga

SEQ ID NO: 331932 - DNA, 299 bp, Homo sapiens
tgtccacctgttccctacactgcccgtcccactgtgggtctaacctctgcctctctccctccctggccccgctccccgctccccgcttccctttcaggcctcagtaacatcatcggtatcatcgtctacatttccagcaacacaggtgacccgagtgacaagcgggacgaagacaaaaagaaccattacaactacggctggtctttttactttggagctctgtctttcattgtggctgagaccgtgggcgtcctggctgtaaacatttacattgagaaaaataaagagttgaggtttaa

SEQ ID NO: 331933 - DNA, 2755 bp, Homo sapiens
agtatgaggcgcccaccatggtgcgatgcgaccgcgggctgcagatgctgctgaccacggccggagccttcgccgccttctcgctcatggccatcgccatcggcaccgactactggctgtactccagcgcgcacatctgcaacggcaccaacctgaccatggacgacgggcccccgccccgccgcgcccgcggcgacctcacccactctggtctgtggcgggtgtgctgcatcgaagggatctataaagggcactgcttccggatcaatcacttcccagaggacaatgactacgaccacgacagctcggagtacctcctccgcatcgtgcgagcctccagcgtcttccccatcctcagcaccatcctgctcctgctgggtggcctgtgcatcggtgctggcaggatctacagccgcaagaacaacatcgtcctcagtgccggcatcctcttcgtggctgcaggcctcagtaacatcatcggtatcatcgtctacatttccagcaacacaggtgacccgagtgacaagcgggacgaagacaaaaagaaccattacaactacggctggtctttttactttggagctctgtctttcattgtggctgagaccgtgggcgtcctggctgtaaacatttacattgagaaaaataaagagttgaggtttaagaccaaacgggaattccttaaggcgtcttcctcttctccttatgccaggatgccgagctacaggtaccggcgacggcgctcgaggtccagctcaaggtccaccgaggcctcgccctccagggacgtgtcgcccatgggcctgaagatcacaggggccatccccatgggggagctgtccatgtacacgctgtccagggagcccctcaaggtgaccaccgcagccagctacagccccgaccaggaggccagcttcctgcaggtgcatgactttttccagcaggacctgaaggaaggtttccacgtcagcatgctgaaccgacggacgacccctgtgtgagccgcctgccctttctctccgctccagcctctccccagaacggctctttttgtcacacaggatggcatgtgatcctcaagacgacgaacaatgaactaaagccaaatgcagccctccctggcctccagaggtggcgtgggctggctttgcacgaaggttgtgctgggagaccggacccggggctgcagaagaagctgaaggctgactttgtcccctccccgaaaaagggtgttttgatgcctcagggtctctgaaatctcccgggaagccccagagctttcctgaggctgcctggccttgatcaacttgggaagacaaaattgagccattatctcctcttggaaacgaatcttgccagaaaaacgggatttcagggccttccctccctgcctgggtgtcgggccaccagaaggctctgccggacgccaagaagacggtctctgggctcttgtcagctgcttttgaacctgaggttcctgcgtcgttgagccagaaatcagaccaccgaagctcactcccttcctctccatctctccctctctccaagactctggcagtggcctatgatcctgaagacagctctgcagccaactggtgctttggcctttgcgctgtcccggggccagcttccctcgacctggggaggccgtggcctgtggaggaggcccaggtaaaggctgggggctgttgctggctatcctctttgcttctggaagtttctgcctcactcagaatgggcaggacagacccactgactggacttcagagtctggagggttccatcggtcaggggaatggcggccacgtgacctcttgccgtgccccttgtcatagacccaaggagcaactctgtcccctgagcgttgggggtcccgggggagaggtggacagacacctccctccaactggcatttggcaacaggagcctggacttctgtgcaagaaagggagacctaagggtgaacagtggccaataaaaaccctagagaacaaacatccatttcctaggtggttacaaatcataacttcctgcaaatcaacgccaggagagcaacttaccttcatttctttgtcttaaaaagtagcagcaactggccccacaactcctgtcattgtaagttattctgccaccacctaacaggacggagtggagtgagtttggataaacggaccgagctgggcttctcttcctccctacagaggggagatctcagcactttgtccggagctgaggaagtggtttctgtgttttacagtttttccagccattcttttcttccccctcctgaagcaagcaaagagcgtggaggcgtgtgcaggcttggaagaagaactctccagaacatggaacttaaccctcttttgtataaaacatgtgctttctaaagaaaaattgtttcttattttttgagactccttgatccaccctggaacagtcgcctgtagtcctggtagctgttgtgcttggaaataacgagcgcatccttgcctcagctacctgctcacagcccatgggtggactcggccccctggggttcagacccaggtccgttcggcctagtgatgatgtcatcgtccatcccatcttctgtgcccaccttctctccctcctcccgacccgccccctcgcccccacccctgtgtgtttcgccagttaagcacctgtgactccagtacctactactggttttgggttggttgttctgtcttttttttaattaaataaaaacatttttaaaatgttcacaaaatga

SEQ ID NO: 331934 - DNA, 3208 bp, Homo sapiens
agatgataagatggttgattcacagaacccaggctggacgggacttgtggcgagcagtccagcacagcctcacagtgcagagcatgagctttggagcctgcccccaccctagctttgtgaccttaagtgagctacatagcttctcatgtgtaaactactcatcataatggttctgacctcagtggtttgttgtgttctaggaaatgatgccagtgaatgcgtagtcccagcctcagcacaggggagccaccttgaagctctcaaatatcactgttgtgaatacagagagggaaaaccaactgtaacgtgccacccaaatgtaagttttactcatattttgatgttaggatggatagcttggaaaaagttggagggtacggcctttactatgaggcatctatgaaggatcaggaatggatgtagacaaggaactaggaatggaaagtgttaaagctggagcctctggaaaaccagaaatgaggctgggcactcaggaagaaacaagtgaaggtgatgctaatgaaagctcattactagtcctgtccagcaacgtgcctctcctggccctagagttcttggaaatagcccaggccaaagagaaggcctttctccccatggtcagccacacgttccacatgcgcacagaggagtctgatgcctcacaggagggcgatgacctacccaagtcctcagcaaacaccagccatcccaagcaggatgacagccccaagtcctcagaagaaaccatccagcccaaggagggtgacatccccaaggccccagaagaaaccatccaatccaagaaggaggacctccccaagtcctcagaaaaagccatccagcccaaagagagtaacatccccaagtcctcagcaaaagccatccagcccaagctgggcagatattcccaaggcctcagtgaagcccagccagcccaaggagggtgacatccccaaggccccagaagaaaccatccaatccaagaaggaggacctccccaagtcctcagaagaagccatccagcccaaagagggtgacatccccaagtcctcagcaaaacccatccagcccaagctgggcaatattgccaagacctcagtgaagcccagccagcccaaggagagtgatatccccaagtccccagaagaaaccatccagcccaaggagggtgacatccccaagtcctcagcaaagcccatccagcccaagctgggcaatattcccaaggcctcagtgaagcccagccagcccaaggagggtgacatctccaagtccccagaagaagccatccagcccaaggagggtgacctccccaagtccctagaggaagccatccagcccaaggagggtgacatccccaagtccccagaagaagccatccagcccaaggagggtgacatccccaagtccctagaggaagccatccagcctaaggagggtgacatccccaagtccccagaagaaaccatccagcccaagaagggtgacatccccaagtccccagaagaagccatccagcccaaggagggtgacattcccaagtctccaaaacaagccatccagcccaaggagggtgacattcccaagtccctagaggaagccatcccacccaaggagattgacatccccaagtccccagaagaaaccatccagcccaaggaggatgacagccccaagtccctagaagaagccaccccatccaaggagggtgacatcctaaagcctgaagaagaaacaatggagttcccggagggggacaaggtgaaagtgatcctgagcaaggaggactttgaggcatcactgaaggaggccggggagaggctggtggctgtggacttctcggccacgtggtgtgggccctgcaggaccatcagaccattcttccatgccctgtctgtgaagcatgaggatgtggtgttcctggaggtggacgctgacaactgtgaggaggtggtgagagagtgcgccatcatgtgtgtcccaacctttcagttttataaaaaagaagaaaaggtggatgaactttgcggcgcccttaaggaaaaacttgaagcagtcattgcagaattaaagtaaacatgtattctgaaaacattgcagacagtcaggtgtttatagcttttgagttctcttttattatttacacaaagtgatcaggtataacaaaagtgtatgtccaaatggcactgcttgtacatgataatattaactctacccttttcaaaaaacagtccaagcattaaagtacattgcgactgtgtttctgttagtgggagagtataaaattagaaattcccatggtgaagactgctaagtcccatggtttcctatttttcaatcttgatatgtatttatttttcacttgtctttgaaaatttcacgcatttagtgtttgcagcaagactgaaaatttagataatttttctatagaggtagatgactgaaaggtgaatggaaacttcttttctcatgtcacacatctttggggattctgaaaagatatgtttggaaataaggaatttgaaagattcacatcttagctaacctccttcttgtgccggaagtgctacggaggccttgggaaattcagtgggttttccaagatctgatttgttggtgacggaagtgagatcaaggccgcttccagatttcaagtccagggctctacctactataatctacgctcacaaaatctcagacaagagatcggaacttcaggtttctcggaggttgaagtcctctggatctttgctgcctttatgacatcagtgccctgatggcagagttcctggttcgtctccctggtaattgagttcataatacctagaccttcctctgacttttttacttaaatttgttcttattttcaatattgaacaagccagcctttaacatgactctaccagcttagacatataggcctagactttaatgaattaacctaatcacagtgctaccagagtcttgtttggacaacttagtgagccccagatgtctatgagcccaaagtcccaggtctgaaccatagacagaggcttagtccagagtgggtttttaaaaatgaataaaaccagcttcattaggtataattgatatacaaagaactgcacatatttaatggagggagttggatgagtttggatgtgttgcatatgcccttgattgccatctccaccatcaaagtaattaacaccttcattgcctccag

SEQ ID NO: 331935 - DNA, 3355 bp, Homo sapiens
agatgataagatggttgattcacagaacccaggctggacgggacttgtggcgagcagtccagcacagcctcacagtgcagagcatgagctttggagcctgcccccaccctagctttgtgaccttaagtgagctacatagcttctcatgtgtaaactactcatcataatggttctgacctcagtggtttgttgtgttctaggaaatgatgccagtgaatgcgtagtcccagcctcagcacaggggagccaccttgaagctctcaaatatcactgttgtgaatacagagagggaaaaccaactgtaacgtgccacccaaatgtaagttttactcatattttgatgttaggatggatagcttggaaaaagttggagggtacggcctttactatgaggcatctatgaaggatcaggaatggatgtagacaaggaactaggaatggaaagtgttaaagctggagcctctggaaaaccagaaatgaggctgggcactcaggaagaaacaagtgaaggtgatgctaatgattaatacatcattcatcagacttcattcgtgatctcgaagagtgacatcagtcttccttggaatatgaagagaatttctttggttcttcttttgcatttctatttgatttattttattttattttattttatgttttttggtacagaaagctcattactagtcctgtccagcaacgtgcctctcctggccctagagttcttggaaatagcccaggccaaagagaaggcctttctccccatggtcagccacacgttccacatgcgcacagaggagtctgatgcctcacaggagggcgatgacctacccaagtcctcagcaaacaccagccatcccaagcaggatgacagccccaagtcctcagaagaaaccatccagcccaaggagggtgacatccccaaggccccagaagaaaccatccaatccaagaaggaggacctccccaagtcctcagaaaaagccatccagcccaaagagagtaacatccccaagtcctcagcaaaagccatccagcccaagctgggcagatattcccaaggcctcagtgaagcccagccagcccaaggagggtgacatccccaaggccccagaagaaaccatccaatccaagaaggaggacctccccaagtcctcagaagaagccatccagcccaaagagggtgacatccccaagtcctcagcaaaacccatccagcccaagctgggcaatattgccaagacctcagtgaagcccagccagcccaaggagagtgatatccccaagtccccagaagaaaccatccagcccaaggagggtgacatccccaagtcctcagcaaagcccatccagcccaagctgggcaatattcccaaggcctcagtgaagcccagccagcccaaggagggtgacatctccaagtccccagaagaagccatccagcccaaggagggtgacctccccaagtccctagaggaagccatccagcccaaggagggtgacatccccaagtccccagaagaagccatccagcccaaggagggtgacatccccaagtccctagaggaagccatccagcctaaggagggtgacatccccaagtccccagaagaaaccatccagcccaagaagggtgacatccccaagtccccagaagaagccatccagcccaaggagggtgacattcccaagtctccaaaacaagccatccagcccaaggagggtgacattcccaagtccctagaggaagccatcccacccaaggagattgacatccccaagtccccagaagaaaccatccagcccaaggaggatgacagccccaagtccctagaagaagccaccccatccaaggagggtgacatcctaaagcctgaagaagaaacaatggagttcccggagggggacaaggtgaaagtgatcctgagcaaggaggactttgaggcatcactgaaggaggccggggagaggctggtggctgtggacttctcggccacgtggtgtgggccctgcaggaccatcagaccattcttccatgccctgtctgtgaagcatgaggatgtggtgttcctggaggtggacgctgacaactgtgaggaggtggtgagagagtgcgccatcatgtgtgtcccaacctttcagttttataaaaaagaagaaaaggtggatgaactttgcggcgcccttaaggaaaaacttgaagcagtcattgcagaattaaagtaaacatgtattctgaaaacattgcagacagtcaggtgtttatagcttttgagttctcttttattatttacacaaagtgatcaggtataacaaaagtgtatgtccaaatggcactgcttgtacatgataatattaactctacccttttcaaaaaacagtccaagcattaaagtacattgcgactgtgtttctgttagtgggagagtataaaattagaaattcccatggtgaagactgctaagtcccatggtttcctatttttcaatcttgatatgtatttatttttcacttgtctttgaaaatttcacgcatttagtgtttgcagcaagactgaaaatttagataatttttctatagaggtagatgactgaaaggtgaatggaaacttcttttctcatgtcacacatctttggggattctgaaaagatatgtttggaaataaggaatttgaaagattcacatcttagctaacctccttcttgtgccggaagtgctacggaggccttgggaaattcagtgggttttccaagatctgatttgttggtgacggaagtgagatcaaggccgcttccagatttcaagtccagggctctacctactataatctacgctcacaaaatctcagacaagagatcggaacttcaggtttctcggaggttgaagtcctctggatctttgctgcctttatgacatcagtgccctgatggcagagttcctggttcgtctccctggtaattgagttcataatacctagaccttcctctgacttttttacttaaatttgttcttattttcaatattgaacaagccagcctttaacatgactctaccagcttagacatataggcctagactttaatgaattaacctaatcacagtgctaccagagtcttgtttggacaacttagtgagccccagatgtctatgagcccaaagtcccaggtctgaaccatagacagaggcttagtccagagtgggtttttaaaaatgaataaaaccagcttcattaggtataattgatatacaaagaactgcacatatttaatggagggagttggatgagtttggatgtgttgcatatgcccttgattgccatctccaccatcaaagtaattaacaccttcattgcctccag

SEQ ID NO: 331936 - DNA, 3005 bp, Homo sapiens
agatgataagatggttgattcacagaacccaggctggacgggacttgtggcgagcagtccagcacagcctcacagtgcagagcatgagctttggagcctgcccccaccctagctttgtgaccttaagtgagctacatagcttctcatgtgtaaactactcatcataatggttctgacctcagtggtttgttgtgttctaggaaatgatgccagtgaatgcgtagtcccagcctcagcacaggggagccaccttgaagctctcaaatatcactgttgtgaatacagagagggaaaaccaactgtaacgtgccacccaaataaagctcattactagtcctgtccagcaacgtgcctctcctggccctagagttcttggaaatagcccaggccaaagagaaggcctttctccccatggtcagccacacgttccacatgcgcacagaggagtctgatgcctcacaggagggcgatgacctacccaagtcctcagcaaacaccagccatcccaagcaggatgacagccccaagtcctcagaagaaaccatccagcccaaggagggtgacatccccaaggccccagaagaaaccatccaatccaagaaggaggacctccccaagtcctcagaaaaagccatccagcccaaagagagtaacatccccaagtcctcagcaaaagccatccagcccaagctgggcagatattcccaaggcctcagtgaagcccagccagcccaaggagggtgacatccccaaggccccagaagaaaccatccaatccaagaaggaggacctccccaagtcctcagaagaagccatccagcccaaagagggtgacatccccaagtcctcagcaaaacccatccagcccaagctgggcaatattgccaagacctcagtgaagcccagccagcccaaggagagtgatatccccaagtccccagaagaaaccatccagcccaaggagggtgacatccccaagtcctcagcaaagcccatccagcccaagctgggcaatattcccaaggcctcagtgaagcccagccagcccaaggagggtgacatctccaagtccccagaagaagccatccagcccaaggagggtgacctccccaagtccctagaggaagccatccagcccaaggagggtgacatccccaagtccccagaagaagccatccagcccaaggagggtgacatccccaagtccctagaggaagccatccagcctaaggagggtgacatccccaagtccccagaagaaaccatccagcccaagaagggtgacatccccaagtccccagaagaagccatccagcccaaggagggtgacattcccaagtctccaaaacaagccatccagcccaaggagggtgacattcccaagtccctagaggaagccatcccacccaaggagattgacatccccaagtccccagaagaaaccatccagcccaaggaggatgacagccccaagtccctagaagaagccaccccatccaaggagggtgacatcctaaagcctgaagaagaaacaatggagttcccggagggggacaaggtgaaagtgatcctgagcaaggaggactttgaggcatcactgaaggaggccggggagaggctggtggctgtggacttctcggccacgtggtgtgggccctgcaggaccatcagaccattcttccatgccctgtctgtgaagcatgaggatgtggtgttcctggaggtggacgctgacaactgtgaggaggtggtgagagagtgcgccatcatgtgtgtcccaacctttcagttttataaaaaagaagaaaaggtggatgaactttgcggcgcccttaaggaaaaacttgaagcagtcattgcagaattaaagtaaacatgtattctgaaaacattgcagacagtcaggtgtttatagcttttgagttctcttttattatttacacaaagtgatcaggtataacaaaagtgtatgtccaaatggcactgcttgtacatgataatattaactctacccttttcaaaaaacagtccaagcattaaagtacattgcgactgtgtttctgttagtgggagagtataaaattagaaattcccatggtgaagactgctaagtcccatggtttcctatttttcaatcttgatatgtatttatttttcacttgtctttgaaaatttcacgcatttagtgtttgcagcaagactgaaaatttagataatttttctatagaggtagatgactgaaaggtgaatggaaacttcttttctcatgtcacacatctttggggattctgaaaagatatgtttggaaataaggaatttgaaagattcacatcttagctaacctccttcttgtgccggaagtgctacggaggccttgggaaattcagtgggttttccaagatctgatttgttggtgacggaagtgagatcaaggccgcttccagatttcaagtccagggctctacctactataatctacgctcacaaaatctcagacaagagatcggaacttcaggtttctcggaggttgaagtcctctggatctttgctgcctttatgacatcagtgccctgatggcagagttcctggttcgtctccctggtaattgagttcataatacctagaccttcctctgacttttttacttaaatttgttcttattttcaatattgaacaagccagcctttaacatgactctaccagcttagacatataggcctagactttaatgaattaacctaatcacagtgctaccagagtcttgtttggacaacttagtgagccccagatgtctatgagcccaaagtcccaggtctgaaccatagacagaggcttagtccagagtgggtttttaaaaatgaataaaaccagcttcattaggtataattgatatacaaagaactgcacatatttaatggagggagttggatgagtttggatgtgttgcatatgcccttgattgccatctccaccatcaaagtaattaacaccttcattgcctccag

SEQ ID NO: 331937 - DNA, 2673 bp, Homo sapiens
ctccgagcaggacactgctacttaacaaggtggtttgagccaagtatgtgtcttgcgggtccttgcgaaagtgaaccagttattaggggcgcctaacgacctggggggtcaactaaggggactgtggcacgtttcaggcaggattcctccttcattcaaactgcatcacccaggagtctgcaaattccccaaagtaggaggaaaaatgaccacattcaaggaggcagtgaccttcaaggatgtggctgtggtcttcactgaggaggagctggggctgctggaccctgcccagaggaagctgtaccgagatgtgatgctggagaacttcaggaacctgctctcagtggggcatcaaccgttccaccaagatacttgccacttcctaagggaagaaaagttttggatgatggggacagcaacccaaagagaagggaattcaggaggcaagatccaaactgagttggagtctgttccagaagcaggagcacatgaagagtggtcctgccagcaaatctgggaacaaattgcaaaagacttaaccaggtctcaggactctatcataaataactctcagttctttgaaaatggtgatgtcccctcccaggttgaagcaggactacccacaattcatacaggacagaaaccttcccagggtgggaagtgtaaacagtccttcagtgatgttcccatctttgatcttcctcagcagttatactcagaagagaagtcttatacatgtgatgagtgtggaaaaagcatctgttacatctcagctcttcatgttcatcagagagtccacgtgggagagaaactctttatgtgtgatgtgtgtggcaaggaatttagtcaaagctcacatctgcaaactcatcagagagtccacactggagagaaaccattcaaatgtgagcaatgtgggaaaggtttcagtcgtagatcagcacttaatgttcatcataaattacacacaggagagaaaccttacatttgtgaggcatgtgggaaggccttcattcatgattcccagcttaaggaacataagagaatccatactggggagaaaccattcaaatgtgatatatgtggtaagaccttctattttaggtcaagacttaagagccattccatggttcacacaggagaaaaaccatttaggtgtgatacatgtgataagagctttcatcagagatcagcacttaataggcattgcatggtccacacaggagagaaaccgtacagatgtgagcagtgtggaaaaggctttattggtaggctagatttttataagcatcaggtggtccacacaggagagaaaccatataattgtaaagaatgtgggaagagcttcagatggtcctcatgccttttgaaccatcagcgagtccacagtggagaaaaaagcttcaaatgtgaagaatgtgggaagggattttatacaaattcacaactgtcttcccatcagagatcccacagtggtgaaaagccatataaatgtgaggagtgtgggaagggctatgttactaagtttaatcttgacttgcaccagagggtccacacgggagagagaccttataattgtaaggaatgtgggaagaactttagccgggcctcaagtattttgaatcataagagactccactgccagaaaaaaccattcaaatgtgaggactgtggaaagaggcttgtacacaggacataccgtaaagaccagccgagagactatagtggggaaaacccatccaaatgtgaggattgtgggagacgctacaagaggcgcttgaatctggatatacttttatcattatttctaaatgacacataactgttcatatttatggggtacaacgtgctattttaatgtgtgcatacaatttatagtgatccaatcagtgtaattggtgtatctgttacctcaaacatttaccatttctttgtgttggaaaattcaaaatccatttgagaggagttggtagacagcaagggaagggtccctggagacccccagccaaaggggtcagtgtctcatccccacataacacaaaaagcagcctggggaagacaatcaagctacaggcactgataagggaactagcacaggggattgtgcctggagacatgcccatgcctgcacagatagaagaacctccagcccattcaggtaaaaactcgcacaaacctccggctcactcagttaagggaacaagaccagacacagaaatgcctttgtcctttgtataatcagcaggctccgaggaaaaagtttcttcttttgtgggcatgaacacagtgggcttcagtaggttcaggttggcactttcttttgtggaaaaggaaaagcccagcctctgtaaatcatcacttcagctcctgattggtcccaggccaagctgaatagcccttaggaataatcacttcaactcctgattggtcccgggccaagctgaatagcccttatgaatcatcacttcggttcctgattggtcccgggccaaggtcccagaccaagctgaatcacgctttctccaagacagcccgcaggctaagtgcattccttccccttcccagtccataaaaaccccggaccccagcctcatactgggcaacttatttggatccccatctccactgtggagagcttttttctttcacttattaaacttttactccaatttc

SEQ ID NO: 331938 - DNA, 2929 bp, Homo sapiens
ctccgagcaggacactgctacttaacaaggtggtttgagccaagtatgtgtcttgcgggtccttgcgaaagtgaaccagttattaggggcgcctaacgacctggggggtcaactaaggggactgtggcacgtttcaggcaggattcctccttcattcaaactgcatcacccaggagtctgcaaattccccaaagtaggaggaaaaatgaccacattcaaggaggcagtgaccttcaaggatgtggctgtggtcttcactgaggaggagctggggctgctggaccctgcccagaggaagctgtaccgagatgtgatgctggagaacttcaggaacctgctctcagtggggcatcaaccgttccaccaagatacttgccacttcctaagggaagaaaagttttggatgatggggacagcaacccaaagagaagggaattcaggaggcaagatccaaactgagttggagtctgttccagaagcaggagcacatgaagagtggtcctgccagcaaatctgggaacaaattgcaaaagacttaaccaggtctcaggactctatcataaataactctcagttctttgaaaatggtgatgtcccctcccaggttgaagcaggactacccacaattcatacaggacagaaaccttcccagggtgggaagtgtaaacagtccttcagtgatgttcccatctttgatcttcctcagcagttatactcagaagagaagtcttatacatgtgatgagtgtggaaaaagcatctgttacatctcagctcttcatgttcatcagagagtccacgtgggagagaaactctttatgtgtgatgtgtgtggcaaggaatttagtcaaagctcacatctgcaaactcatcagagagtccacactggagagaaaccattcaaatgtgagcaatgtgggaaaggtttcagtcgtagatcagcacttaatgttcatcataaattacacacaggagagaaaccttacatttgtgaggcatgtgggaaggccttcattcatgattcccagcttaaggaacataagagaatccatactggggagaaaccattcaaatgtgatatatgtggtaagaccttctattttaggtcaagacttaagagccattccatggttcacacaggagaaaaaccatttaggtgtgatacatgtgataagagctttcatcagagatcagcacttaataggcattgcatggtccacacaggagagaaaccgtacagatgtgagcagtgtggaaaaggctttattggtaggctagatttttataagcatcaggtggtccacacaggagagaaaccatataattgtaaagaatgtgggaagagcttcagatggtcctcatgccttttgaaccatcagcgagtccacagtggagaaaaaagcttcaaatgtgaagaatgtgggaagggattttatacaaattcacaactgtcttcccatcagagatcccacagtggtgaaaagccatataaatgtgaggagtgtgggaagggctatgttactaagtttaatcttgacttgcaccagagggtccacacgggagagagaccttataattgtaaggaatgtgggaagaactttagccgggcctcaagtattttgaatcataagagactccactgccagaaaaaaccattcaaatgtgaggactgtggaaagaggcttgtacacaggacataccgtaaagaccagccgagagactatagtggggaaaacccatccaaatgtgaggattgtgggagacgctacaagaggcgcttgaatctggatatacttttatcattatttctaaatgacacataactgttcatatttatggggtacaacgtgctattttaatgtgtgcatacaatttatagtgatccaatcagtgtaattggtgtatctgttacctcaaacatttaccatttctttgtgttggaaaattcaaaatccatttgagaggagttggtagacagcaagggaagggtccctggagacccccagccaaaggggtcagtgtctcatccccacataacacaaaaagcagcctggggaagacaatcaagctacaggcactgataagggaactagcacaggggattgtgcctggagacatgcccatgcctgcacagatagaagaacctccagcccattcaggtaaaaactcgcacaaacctccggctcactcagttaagggaacaagaccagacacagaaatgcctttgtcctttgtataatcagcaggctccgaggaaaaagtttcttcttttgtgggcatgaacacagtgggcttcagtaggttcaggttggcactttcttttgtggaaaaggaaaagcccagcctctgtaaatcatcattcaactcctgattggtcccgggccaagctgaatagcccttatgaatcatcacttcggttcctgattggtcccgggccaaggtcccagaccaagctgaatcacgctttctccaagacagcccgcaggctaagtgcattccttccccttcccagtccataaaaaccccggaccccagcctcatactgggcaacttatttggatccccatctccactgtggagagcttttttctttcacttattaaacttttactccaatttcacccttgtgtctgtgcttcttaatcatattggacgtgagattaagaactccgggggataagagagactgttacagagagactgttacagtgtggtgcatttgtgagactacaacacatttttagcaatttgtaaataattgttgatgatagtcacctttagtgctgcagaacagtagaacttattcttcccctctacctcttttgtatctgttggccaacctttggccatctcacctacctcctacacttccttgcctgtctacatccactgttctactctctactacaaaatcaactttttttaacttc

SEQ ID NO: 331939 - DNA, 2619 bp, Homo sapiens
ctccgagcaggacactgctacttaacaaggtggtttgagccaagtatgtgtcttgcgggtccttgcgaaagtgaaccagttattaggggcgcctaacgacctggggggtcaactaaggggactgtggcacgtttcaggcaggattcctccttcattcaaactgcatcacccaggagtctgcaaattccccaaagtaggaggaaaaatgaccacattcaaggaggcagtgaccttcaaggatgtggctgtggtcttcactgaggaggagctggggctgctggaccctgcccagaggaagctgtaccgagatgtgatgctggagaacttcaggaacctgctctcagtggggcatcaaccgttccaccaagatacttgccacttcctaagggaagaaaagttttggatgatggggacagcaacccaaagagaagggaattcaggaggcaagatccaaactgagttggagtctgttccagaagcaggagcacatgaagagtggtcctgccagcaaatctgggaacaaattgcaaaagacttaaccaggtctcaggactctatcataaataactctcagttctttggacagaaaccttcccagggtgggaagtgtaaacagtccttcagtgatgttcccatctttgatcttcctcagcagttatactcagaagagaagtcttatacatgtgatgagtgtggaaaaagcatctgttacatctcagctcttcatgttcatcagagagtccacgtgggagagaaactctttatgtgtgatgtgtgtggcaaggaatttagtcaaagctcacatctgcaaactcatcagagagtccacactggagagaaaccattcaaatgtgagcaatgtgggaaaggtttcagtcgtagatcagcacttaatgttcatcataaattacacacaggagagaaaccttacatttgtgaggcatgtgggaaggccttcattcatgattcccagcttaaggaacataagagaatccatactggggagaaaccattcaaatgtgatatatgtggtaagaccttctattttaggtcaagacttaagagccattccatggttcacacaggagaaaaaccatttaggtgtgatacatgtgataagagctttcatcagagatcagcacttaataggcattgcatggtccacacaggagagaaaccgtacagatgtgagcagtgtggaaaaggctttattggtaggctagatttttataagcatcaggtggtccacacaggagagaaaccatataattgtaaagaatgtgggaagagcttcagatggtcctcatgccttttgaaccatcagcgagtccacagtggagaaaaaagcttcaaatgtgaagaatgtgggaagggattttatacaaattcacaactgtcttcccatcagagatcccacagtggtgaaaagccatataaatgtgaggagtgtgggaagggctatgttactaagtttaatcttgacttgcaccagagggtccacacgggagagagaccttataattgtaaggaatgtgggaagaactttagccgggcctcaagtattttgaatcataagagactccactgccagaaaaaaccattcaaatgtgaggactgtggaaagaggcttgtacacaggacataccgtaaagaccagccgagagactatagtggggaaaacccatccaaatgtgaggattgtgggagacgctacaagaggcgcttgaatctggatatacttttatcattatttctaaatgacacataactgttcatatttatggggtacaacgtgctattttaatgtgtgcatacaatttatagtgatccaatcagtgtaattggtgtatctgttacctcaaacatttaccatttctttgtgttggaaaattcaaaatccatttgagaggagttggtagacagcaagggaagggtccctggagacccccagccaaaggggtcagtgtctcatccccacataacacaaaaagcagcctggggaagacaatcaagctacaggcactgataagggaactagcacaggggattgtgcctggagacatgcccatgcctgcacagatagaagaacctccagcccattcaggtaaaaactcgcacaaacctccggctcactcagttaagggaacaagaccagacacagaaatgcctttgtcctttgtataatcagcaggctccgaggaaaaagtttcttcttttgtgggcatgaacacagtgggcttcagtaggttcaggttggcactttcttttgtggaaaaggaaaagcccagcctctgtaaatcatcacttcagctcctgattggtcccaggccaagctgaatagcccttaggaataatcacttcaactcctgattggtcccgggccaagctgaatagcccttatgaatcatcacttcggttcctgattggtcccgggccaaggtcccagaccaagctgaatcacgctttctccaagacagcccgcaggctaagtgcattccttccccttcccagtccataaaaaccccggaccccagcctcatactgggcaacttatttggatccccatctccactgtggagagcttttttctttcacttattaaacttttactccaatttc

SEQ ID NO: 331940 - DNA, 2596 bp, Homo sapiens
ctccgagcaggacactgctacttaacaaggtggtttgagccaaactgtggcacgtttcaggcaggattcctccttcattcaaactgcatcacccaggagtctgcaaattccccaaagtaggaggaaaaatgaccacattcaaggaggcagtgaccttcaaggatgtggctgtggtcttcactgaggaggagctggggctgctggaccctgcccagaggaagctgtaccgagatgtgatgctggagaacttcaggaacctgctctcagtggggcatcaaccgttccaccaagatacttgccacttcctaagggaagaaaagttttggatgatggggacagcaacccaaagagaagggaattcaggaggcaagatccaaactgagttggagtctgttccagaagcaggagcacatgaagagtggtcctgccagcaaatctgggaacaaattgcaaaagacttaaccaggtctcaggactctatcataaataactctcagttctttgaaaatggtgatgtcccctcccaggttgaagcaggactacccacaattcatacaggacagaaaccttcccagggtgggaagtgtaaacagtccttcagtgatgttcccatctttgatcttcctcagcagttatactcagaagagaagtcttatacatgtgatgagtgtggaaaaagcatctgttacatctcagctcttcatgttcatcagagagtccacgtgggagagaaactctttatgtgtgatgtgtgtggcaaggaatttagtcaaagctcacatctgcaaactcatcagagagtccacactggagagaaaccattcaaatgtgagcaatgtgggaaaggtttcagtcgtagatcagcacttaatgttcatcataaattacacacaggagagaaaccttacatttgtgaggcatgtgggaaggccttcattcatgattcccagcttaaggaacataagagaatccatactggggagaaaccattcaaatgtgatatatgtggtaagaccttctattttaggtcaagacttaagagccattccatggttcacacaggagaaaaaccatttaggtgtgatacatgtgataagagctttcatcagagatcagcacttaataggcattgcatggtccacacaggagagaaaccgtacagatgtgagcagtgtggaaaaggctttattggtaggctagatttttataagcatcaggtggtccacacaggagagaaaccatataattgtaaagaatgtgggaagagcttcagatggtcctcatgccttttgaaccatcagcgagtccacagtggagaaaaaagcttcaaatgtgaagaatgtgggaagggattttatacaaattcacaactgtcttcccatcagagatcccacagtggtgaaaagccatataaatgtgaggagtgtgggaagggctatgttactaagtttaatcttgacttgcaccagagggtccacacgggagagagaccttataattgtaaggaatgtgggaagaactttagccgggcctcaagtattttgaatcataagagactccactgccagaaaaaaccattcaaatgtgaggactgtggaaagaggcttgtacacaggacataccgtaaagaccagccgagagactatagtggggaaaacccatccaaatgtgaggattgtgggagacgctacaagaggcgcttgaatctggatatacttttatcattatttctaaatgacacataactgttcatatttatggggtacaacgtgctattttaatgtgtgcatacaatttatagtgatccaatcagtgtaattggtgtatctgttacctcaaacatttaccatttctttgtgttggaaaattcaaaatccatttgagaggagttggtagacagcaagggaagggtccctggagacccccagccaaaggggtcagtgtctcatccccacataacacaaaaagcagcctggggaagacaatcaagctacaggcactgataagggaactagcacaggggattgtgcctggagacatgcccatgcctgcacagatagaagaacctccagcccattcaggtaaaaactcgcacaaacctccggctcactcagttaagggaacaagaccagacacagaaatgcctttgtcctttgtataatcagcaggctccgaggaaaaagtttcttcttttgtgggcatgaacacagtgggcttcagtaggttcaggttggcactttcttttgtggaaaaggaaaagcccagcctctgtaaatcatcacttcagctcctgattggtcccaggccaagctgaatagcccttaggaataatcacttcaactcctgattggtcccgggccaagctgaatagcccttatgaatcatcacttcggttcctgattggtcccgggccaaggtcccagaccaagctgaatcacgctttctccaagacagcccgcaggctaagtgcattccttccccttcccagtccataaaaaccccggaccccagcctcatactgggcaacttatttggatccccatctccactgtggagagcttttttctttcacttattaaacttttactccaatttc

SEQ ID NO: 331941 - DNA, 2983 bp, Homo sapiens
ctccgagcaggacactgctacttaacaaggtggtttgagccaagtatgtgtcttgcgggtccttgcgaaagtgaaccagttattaggggcgcctaacgacctggggggtcaactaaggggactgtggcacgtttcaggcaggattcctccttcattcaaactgcatcacccaggagtctgcaaattccccaaagtaggaggaaaaatgaccacattcaaggaggcagtgaccttcaaggatgtggctgtggtcttcactgaggaggagctggggctgctggaccctgcccagaggaagctgtaccgagatgtgatgctggagaacttcaggaacctgctctcagtggggcatcaaccgttccaccaagatacttgccacttcctaagggaagaaaagttttggatgatggggacagcaacccaaagagaagggaattcaggaggcaagatccaaactgagttggagtctgttccagaagcaggagcacatgaagagtggtcctgccagcaaatctgggaacaaattgcaaaagacttaaccaggtctcaggactctatcataaataactctcagttctttgaaaatggtgatgtcccctcccaggttgaagcaggactacccacaattcatacaggacagaaaccttcccagggtgggaagtgtaaacagtccttcagtgatgttcccatctttgatcttcctcagcagttatactcagaagagaagtcttatacatgtgatgagtgtggaaaaagcatctgttacatctcagctcttcatgttcatcagagagtccacgtgggagagaaactctttatgtgtgatgtgtgtggcaaggaatttagtcaaagctcacatctgcaaactcatcagagagtccacactggagagaaaccattcaaatgtgagcaatgtgggaaaggtttcagtcgtagatcagcacttaatgttcatcataaattacacacaggagagaaaccttacatttgtgaggcatgtgggaaggccttcattcatgattcccagcttaaggaacataagagaatccatactggggagaaaccattcaaatgtgatatatgtggtaagaccttctattttaggtcaagacttaagagccattccatggttcacacaggagaaaaaccatttaggtgtgatacatgtgataagagctttcatcagagatcagcacttaataggcattgcatggtccacacaggagagaaaccgtacagatgtgagcagtgtggaaaaggctttattggtaggctagatttttataagcatcaggtggtccacacaggagagaaaccatataattgtaaagaatgtgggaagagcttcagatggtcctcatgccttttgaaccatcagcgagtccacagtggagaaaaaagcttcaaatgtgaagaatgtgggaagggattttatacaaattcacaactgtcttcccatcagagatcccacagtggtgaaaagccatataaatgtgaggagtgtgggaagggctatgttactaagtttaatcttgacttgcaccagagggtccacacgggagagagaccttataattgtaaggaatgtgggaagaactttagccgggcctcaagtattttgaatcataagagactccactgccagaaaaaaccattcaaatgtgaggactgtggaaagaggcttgtacacaggacataccgtaaagaccagccgagagactatagtggggaaaacccatccaaatgtgaggattgtgggagacgctacaagaggcgcttgaatctggatatacttttatcattatttctaaatgacacataactgttcatatttatggggtacaacgtgctattttaatgtgtgcatacaatttatagtgatccaatcagtgtaattggtgtatctgttacctcaaacatttaccatttctttgtgttggaaaattcaaaatccatttgagaggagttggtagacagcaagggaagggtccctggagacccccagccaaaggggtcagtgtctcatccccacataacacaaaaagcagcctggggaagacaatcaagctacaggcactgataagggaactagcacaggggattgtgcctggagacatgcccatgcctgcacagatagaagaacctccagcccattcaggtaaaaactcgcacaaacctccggctcactcagttaagggaacaagaccagacacagaaatgcctttgtcctttgtataatcagcaggctccgaggaaaaagtttcttcttttgtgggcatgaacacagtgggcttcagtaggttcaggttggcactttcttttgtggaaaaggaaaagcccagcctctgtaaatcatcacttcagctcctgattggtcccaggccaagctgaatagcccttaggaataatcacttcaactcctgattggtcccgggccaagctgaatagcccttatgaatcatcacttcggttcctgattggtcccgggccaaggtcccagaccaagctgaatcacgctttctccaagacagcccgcaggctaagtgcattccttccccttcccagtccataaaaaccccggaccccagcctcatactgggcaacttatttggatccccatctccactgtggagagcttttttctttcacttattaaacttttactccaatttcacccttgtgtctgtgcttcttaatcatattggacgtgagattaagaactccgggggataagagagactgttacagagagactgttacagtgtggtgcatttgtgagactacaacacatttttagcaatttgtaaataattgttgatgatagtcacctttagtgctgcagaacagtagaacttattcttcccctctacctcttttgtatctgttggccaacctttggccatctcacctacctcctacacttccttgcctgtctacatccactgttctactctctactacaaaatcaactttttttaacttc

SEQ ID NO: 331942 - DNA, 324 bp, Homo sapiens
ataatagattgttgacagcaactgattctattcagttgtgggctcctccaggagatgatattctggaagaggaggaagaaattgataatacagttcctcctgttttaaatgattggaagtgtgtctggcagtgcaaaacctcagtatctgtacatttgatggaatggtctcctgatggtgaatattttgctactgctggaaaggatgattgtcttttgaaagtgtggtatcctatgactggttggaagtcttcaattatacctcaggatcatcatgaagtaaaaaggagacagtcctctactcaattttctttgtttacttggc

SEQ ID NO: 331943 - DNA, 236 bp, Homo sapiens
gctgaaagagaaaatgcagatttaattatttgccatagggagcattcctttgttaccaatcaaaggactggaaagttgaaaatttctgtttcaatgaaaaagcatggattatttttttttagcatggaaattttataaggtaggaattttttttttttccaagacagggtctaactctgctgcccaggctggagtgcagtggcatgatcttgacttactgcaacctctacctccca

SEQ ID NO: 331944 - DNA, 240 bp, Homo sapiens
gcaccagtcatgtgtggagtgggttggtggagatgcgcagagtgcaaggaggtctggaggtgagacctccaggcagaatggagggaggtgtgtcccatagcatgtggactctaaggggctgggagatcttaggggtccctggaggctgactgaaggctggccagggagcctgcctggtaagggcctccaaggtcaggtttgggtgtaagagtagccatttctagcactggttgaggtgca

SEQ ID NO: 331945 - DNA, 585 bp, Homo sapiens
agttggtcccgttcagaaagtaggtgtctttaaaacctaactgagcaacacagaattcatcctatatctatcccattcaaaaaaattataaatccaactttcccactactgagacaaaagtcttaaggtgatcttgagctttgatctctcaattatcaactaggggctgggggaagaattagatgttttctctggctaataccattactattctacaaataaatcctagacatttaatgtatgttaatgagataatctgttagtacttaacacagagtataaatgttcaagaaatgttagttctgtcccctcatcacaagaaatgcttataatacagagaaatctgaagtctctctgtagctatactgaaaattccttaggctcaattcataagcactttgaaggccaggctcattggctcacacctataatcccagtgctttgggaggccaaggcaggaggactgcttgagtccaggagtttgagaccagcctgagcaacatagtgagacccctgtctctacaatatttttaaaattagctgggcatggtggcatctacctgtaattctagctcctcaagaggc

SEQ ID NO: 331946 - DNA, 401 bp, Homo sapiens
aaagaaataaagtatattctgtctagaggagacaatattcatagctatcccctattagacatcaatctaattttaggacatttccattatcctaaaaagaaacctcatgtccttttacagttatccccattgcctgccctaggcaccaccaaactttctgtctttatatatttgcctttcttagacatttaatataataaacataatgctttaaaggatcatccatgttgttaactcgtgtcttttaaaaccaacatacatggtggttctgactggtatctcctaatgatctcatttgaaagtcaaggcaaaatttctgccatgtacaaagttaaataaagccaatttaaagaatttatagaatcagttacacaaaactaaaatggatgggtaccgagcta

SEQ ID NO: 331947 - DNA, 500 bp, Homo sapiens
cttttccactaggatggcttgcattatggctctcccttggttaaaaaaaaaaaaaaaaaaagagaaaagaaatggagggtttagcaggttactttgggctgcagccagagtgattgccacatgcatttctctctttatctcctctctctcctaccataggctcagttctgtatcagaaagggctgaggttcctacatgcaccaccttccttcaaaggggcaggtacgtcaggtcacatacactcaagtgttttgaaagaatccatttccccactgactttctgataggctgcttctgggtcaagttctgtagccaatactttttttagtctgttttccccgtgaggaaaacatccagtcagaatggcagtctcaaggacaagtggggaactgtggtggagacgatttgcttacttccatcttggaggccaagggtgtaacttggctacctcagtagctccttggtggtgcttactcagtgcccctgggtaggaaaatcaa

SEQ ID NO: 331948 - DNA, 684 bp, Homo sapiens
tgagtctttgaagcttcaaggctgctgaataatttccttctcccattttgtgcctgcctagctatccagacagagcagctaccctcagctctagctgatactacagacagtacaacaggtgtggtacatgtggctttgctcactcatgtggatagcatggatttgattacaaaaggtgaccttatagaaatagagagatgtgagcctgtgaggtccaaggtaatgaatgatgcccttcgtaaacacattttctggggtatgttactacaatcacatactagtgtgtataaaaataaaaacaagcagctactgggtttaagaagaattacaaaattacttaaatagggcccgtttcccaagatttaaaaattaaatacagttgttccttggtatttgcaggggattagttccaggactttgcattgttaccaaaatctgtggatgcttaatggcatagtatttgtatttgcatataacctatgcacatcctttggtatactttaaataatatctagattacttataatacctaacccaaattaaatgctttgtaaatagttgttctactctatttttcattattaatgacaagaaaataacctgtacatgttcagtacagatgaaatattttttcaaaatttatttttttgagatgaagtttctgttgcccaggctggagtgcag

SEQ ID NO: 331949 - DNA, 1276 bp, Homo sapiens
tgagtctttgaagcttcaaggctgctgaataatttccttctcccattttgtgcctgcctagctatccagacagagcagctaccctcagctctagctgatactacagacagtacaacagattcactggatgaaagaaagataaaaggggtcattgagctcaggaagagcttactgtctgccttgagaacttatgaaccatatggatccctggttcaacaaatacgaattctgctgctgggtccaattggagctgggaagtccagctttttcaactcagtgaggtctgttttccaagggcatgtaacgcatcaggctttggtgggcactaatacaactgggatatctgagaagtataggacatactctattagagacgggaaagatggcaaatacctgccgtttattctgtgtgactcactggggctgagtgagaaagaaggcggcctgtgcagggatgacatattctatatcttgaacggtaacattcgtgatagataccagtttaatcccatggaatcaatcaaattaaatcatcatgactacattgattccccatcgctgaaggacagaattcattgtgtggcatttgtatttgatgccagctctattcaatacttctcctctcagatgatagtaaagatcaaaagaattcgaagggagttggtaaacgctggtgtggtacatgtggctttgctcactcatgtggatagcatggatttgattacaaaaggtgaccttatagaaatagagagatgtgagcctgtgaggtccaagctagaggaagtccaaagaaaacttggatttgctctttctgacatctcggtggttagcaattattcctctgagtgggagctggaccctgtaaaggatgttctaattctttctgctctgagacgaatgctatgggctgcagatgacttcttagaggatttgccttttgagcaaatagggaatctaagggaggaaattatcaactgtgcacaaggaaaaaaatagatatgtgaaaggttcacgtaaatttcctcacatcacagaagattaaaattcagaaaggagaaaacacagaccaaagagaagtatctaagaccaaagggatgtgttttattaatgtctaggatgaagaaatgcatagaacattgtagtacttgtaaataactagaaataacatgatttagtcataattgtgaaaaataataataatttttcttggatttatgttctgtatctgtgaaaaaataaatttcttataaaactcgggaaaaaaaatagagagtgt

SEQ ID NO: 331950 - DNA, 1695 bp, Homo sapiens
tgagtctttgaagcttcaaggctgctgaataatttccttctcccattttgtgcctgcctagctatccagacagagcagctaccctcagctctagctgatactacagacagtacaacagatcaagaagtatggcagtgacaactcgtttgacatggttgcacgaaaagatcctgcaaaatcattttggagggaagcggcttagccttctctataagggtagtgtccatggattccgtaatggagttttgcttgacagatgttgtaatcaagggcctactctaacagtgatttatagtgaagatcatattattggagcatatgcagaagagagttaccaggaaggaaagtatgcttccatcatcctttttgcacttcaagatactaaaatttcagaatggaaactaggactatgtacaccagaaacactgttttgttgtgatgttacaaaatataactccccaactaatttccagatagatggaagaaatagaaaagtgattatggacttaaagacaatggaaaatcttggacttgctcattcactggatgaaagaaagataaaaggggtcattgagctcaggaagagcttactgtctgccttgagaacttatgaaccatatggatccctggttcaacaaatacgaattctgctgctgggtccaattggagctgggaagtccagctttttcaactcagtgaggtctgttttccaagggcatgtaacgcatcaggctttggtgggcactaatacaactgggatatctgagaagtataggacatactctattagagacgggaaagatggcaaatacctgccgtttattctgtgtgactcactggggctgagtgagaaagaaggcggcctgtgcagggatgacatattctatatcttgaacggtaacattcgtgatagataccagtttaatcccatggaatcaatcaaattaaatcatcatgactacattgattccccatcgctgaaggacagaattcattgtgtggcatttgtatttgatgccagctctattcaatacttctcctctcagatgatagtaaagatcaaaagaattcgaagggagttggtaaacgctggtgtggtacatgtggctttgctcactcatgtggatagcatggatttgattacaaaaggtgaccttatagaaatagagagatgtgagcctgtgaggtccaagctagaggaagtccaaagaaaacttggatttgctctttctgacatctcggtggttagcaattattcctctgagtgggagctggaccctgtaaaggatgttctaattctttctgctctgagacgaatgctatgggctgcagatgacttcttagaggatttgccttttgagcaaatagggaatctaagggaggaaattatcaactgtgcacaaggaaaaaaatagatatgtgaaaggttcacgtaaatttcctcacatcacagaagattaaaattcagaaaggagaaaacacagaccaaagagaagtatctaagaccaaagggatgtgttttattaatgtctaggatgaagaaatgcatagaacattgtagtacttgtaaataactagaaataacatgatttagtcataattgtgaaaaataataataatttttcttggatttatgttctgtatctgtgaaaaaataaatttcttataaaactcgggaaaaaaaatagagagtgt

SEQ ID NO: 331951 - DNA, 2629 bp, Homo sapiens
tgagtctttgaagcttcaaggctgctgaataatttccttctcccattttgtgcctgcctagctatccagacagagcagctaccctcagctctagctgatactacagacagtacaacagatcaagaagtatggcagtgacaactcgtttgacatggttgcacgaaaagatcctgcaaaatcattttggagggaagcggcttagccttctctataagggtagtgtccatggattccgtaatggagttttgcttgacagatgttgtaatcaagggcctactctaacagtgatttatagtgaagatcatattattggagcatatgcagaagagagttaccaggaaggaaagtatgcttccatcatcctttttgcacttcaagatactaaaatttcagaatggaaactaggactatgtacaccagaaacactgttttgttgtgatgttacaaaatataactccccaactaatttccagatagatggaagaaatagaaaagtgattatggacttaaagacaatggaaaatcttggacttgctcaaaattgtactatctctattcaggattatgaagtttttcgatgcgaagattcactggatgaaagaaagataaaaggggtcattgagctcaggaagagcttactgtctgccttgagaacttatgaaccatatggatccctggttcaacaaatacgaattctgctgctgggtccaattggagctgggaagtccagctttttcaactcagtgaggtctgttttccaagggcatgtaacgcatcaggctttggtgggcactaatacaactgggatatctgagaagtataggacatactctattagagacgggaaagatggcaaatacctgccgtttattctgtgtgactcactggggctgagtgagaaagaaggcggcctgtgcagggatgacatattctatatcttgaacggtaacattcgtgatagataccagtttaatcccatggaatcaatcaaattaaatcatcatgactacattgattccccatcgctgaaggacagaattcattgtgtggcatttgtatttgatgccagctctattcaatacttctcctctcagatgatagtaaagatcaaaagaattcgaagggagttggtaaacgctggtgtggtacatgtggctttgctcactcatgtggatagcatggatttgattacaaaaggtgaccttatagaaatagagagatgtgagcctgtgaggtccaagctagaggaagtccaaagaaaacttggatttgctctttctgacatctcggtggttagcaattattcctctgagtgggagctggaccctgtaaaggatgttctaattctttctgctctgagacgaatgctatgggctgcagatgacttcttagaggatttgccttttgagcaaataggtagatggtttggtggtgtggaagcttggaagcggtcaggtagttggctactttctgcttggatctattaaatacctggcagctctctgtctttttgtgggttgttgccctgtgattagttctgctttttaacccactccctggatgcatttttccctccttgcatttccctcttttcctggagttcatactagagaatctgcactatgtttttccctttttgtcttgagatgaaagttttaaaataatccacctctgtcatttccactctctgaacatcccaagctgtatccctggcctcttttctcagactatgtttctttacttgggacctagaactggattggattggcattgctcctgatcagatgagacctttgattatttgccccttccttaggaccttacactcctgtctttctttgacttgcctttttgtttctttccttcatcttagtccctcttcatgcagtatggtcattgctaggtagaggtatgtccttttatgtaatggccaccgcatttagtattacataaactttcttttaacaatctgtgcatagtacatgctgctctgttccatttagagatttgacagaggtttcagtttagtatactcaaatcttattttagtgcttgggaaatcaattcagaatatcacatcctctccaattctctcttactcaaattgctgggaaactctcatgttactaactttgttgctctaactctgccatcttggtttccccatcccttctcttcctcatggtacgtgtgctcctaatattagcgttggttgagattttcagtggtccaatattcctcttccctctggttgcctttcctgagataatccactaagaatattttgtgtttcttttctcagggaatctaagggaggaaattatcaactgtgcacaaggaaaaaaatagatatgtgaaaggttcacgtaaatttcctcacatcacagaagattaaaattcagaaaggagaaaacacagaccaaagagaagtatctaagaccaaagggatgtgttttattaatgtctaggatgaagaaatgcatagaacattgtagtacttgtaaataactagaaataacatgatttagtcataattgtgaaaaataataataatttttcttggatttatgttctgtatctgtgaaaaaataaatttcttataaaactcgggaaaaaaaatagagagtgt

SEQ ID NO: 331952 - DNA, 1217 bp, Homo sapiens
tgagtctttgaagcttcaaggctgctgaataatttccttctcccattttgtgcctgcctagctatccagacagagcagctaccctcagctctagctgatactacagacagtacaacaggccttgagaacttatgaaccatatggatccctggttcaacaaatacgaattctgctgctgggtccaattggagctgggaagtccagctttttcaactcagtgaggtctgttttccaagggcatgtaacgcatcaggctttggtgggcactaatacaactgggatatctgagaagtataggacatactctattagagacgggaaagatggcaaatacctgccgtttattctgtgtgactcactggggctgagtgagaaagaaggcggcctgtgcagggatgacatattctatatcttgaacggtaacattcgtgatagataccagtttaatcccatggaatcaatcaaattaaatcatcatgactacattgattccccatcgctgaaggacagaattcattgtgtggcatttgtatttgatgccagctctattcaatacttctcctctcagatgatagtaaagatcaaaagaattcgaagggagttggtaaacgctggtgtggtacatgtggctttgctcactcatgtggatagcatggatttgattacaaaaggtgaccttatagaaatagagagatgtgagcctgtgaggtccaagctagaggaagtccaaagaaaacttggatttgctctttctgacatctcggtggttagcaattattcctctgagtgggagctggaccctgtaaaggatgttctaattctttctgctctgagacgaatgctatgggctgcagatgacttcttagaggatttgccttttgagcaaatagggaatctaagggaggaaattatcaactgtgcacaaggaaaaaaatagatatgtgaaaggttcacgtaaatttcctcacatcacagaagattaaaattcagaaaggagaaaacacagaccaaagagaagtatctaagaccaaagggatgtgttttattaatgtctaggatgaagaaatgcatagaacattgtagtacttgtaaataactagaaataacatgatttagtcataattgtgaaaaataataataatttttcttggatttatgttctgtatctgtgaaaaaataaatttcttataaaactcgggaaaaaaaatagagagtgt

SEQ ID NO: 331953 - DNA, 1642 bp, Homo sapiens
tgagtctttgaagcttcaaggctgctgaataatttccttctcccattttgtgcctgcctagctatccagacagagcagctaccctcagctctagctgatactacagacagtacaacagatcaagaagtatggcagtgacaactcgtttgacatggttgcacgaaaagatcctgcaaaatcattttggagggaagcggcttagccttctctataagggtagtgtccatggattccgtaatggagttttgcttgacagatgttgtaatcaagggcctactctaacagtgatttatagtgaagatcatattattggagcatatgcagaagagagttaccaggaaggaaagtatgcttccatcatcctttttgcacttcaagatactaaaatttcagaatggaaactaggactatgtacaccagaaacactgttttgttgtgatgttacaaaatataactccccaactaatttccagatagatggaagaaatagaaaagtgattatggacttaaagacaatggaaaatcttggacttgctcaaaattgtactatctctattcaggattatgaagtttttcgatgcgaagattcactggatgaaagaaagataaaaggggtcattgagctcaggaagagcttactgtctgccttgagaacttatgaaccatatggatccctggttcaacaaatacgaattctgctgctgggtccaattggagctgggaagtccagctttttcaactcagtgaggtctgttttccaagggcatgtaacgcatcaggctttggtgggcactaatacaactgggatatctgagaagtataggacatactctattagagacgggaaagatggcaaatacctgccgtttattctgtgtgactcactggggctgagtgagaaagaaggcggcctgtgcagggatgacatattctatatcttgaacggtaacattcgtgatagataccagtttaatcccatggaatcaatcaaattaaatcatcatgactacattgattccccatcgctgaaggacagaattcattgtgtggcatttgtatttgatgccagctctattcaatacttctcctctcagatgatagtaaagatcaaaagaattcgaagggagttggtaaacgctgctagaggaagtccaaagaaaacttggatttgctctttctgacatctcggtggttagcaattattcctctgagtgggagctggaccctgtaaaggatgttctaattctttctgctctgagacgaatgctatgggctgcagatgacttcttagaggatttgccttttgagcaaatagggaatctaagggaggaaattatcaactgtgcacaaggaaaaaaatagatatgtgaaaggttcacgtaaatttcctcacatcacagaagattaaaattcagaaaggagaaaacacagaccaaagagaagtatctaagaccaaagggatgtgttttattaatgtctaggatgaagaaatgcatagaacattgtagtacttgtaaataactagaaataacatgatttagtcataattgtgaaaaataataataatttttcttggatttatgttctgtatctgtgaaaaaataaatttcttataaaactcgggaaaaaaaatagagagtgt

SEQ ID NO: 331954 - DNA, 802 bp, Homo sapiens
ggcgtctagagcgatgcttatacaccctttaatcccatggaatcaatcaaattaaatcatcatgactacattgattccccatcgctgaaggacagaattcattgtgtggcatttgtatttgatgccagctctattcaatacttctcctctcagatgatagtaaagatcaaaagaattcgaagggagttggtaaacgctggtgtggtacatgtggctttgctcactcatgtggatagcatggatttgattacaaaaggtgaccttatagaaatagagagatgtgagcctgtgaggtccaagctagaggaagtccaaagaaaacttggatttgctctttctgacatctcggtggttagcaattattcctctgagtgggagctggaccctgtaaaggatgttctaattctttctgctctgagacgaatgctatgggctgcagatgacttcttagaggatttgccttttgagcaaatagggaatctaagggaggaaattatcaactgtgcacaaggaaaaaaatagatatgtgaaaggttcacgtaaatttcctcacatcacagaagattaaaattcagaaaggagaaaacacagaccaaagagaagtatctaagaccaaagggatgtgttttattaatgtctaggatgaagaaatgcatagaacattgtagtacttgtaaataactagaaataacatgatttagtcataattgtgaaaaataataataatttttcttggatttatgttctgtatctgtgaaaaaataaatttcttataaaactcgggaaaaaaaatagagagtgt

SEQ ID NO: 331955 - DNA, 1608 bp, Homo sapiens
tttagaatccactgcatgtattccaaattacaattatcagtgacattagaacttgatatgtgaagttcttcaagagtactttgtgagaccagatctccatttttttccaatgggaaattattgcaagttcctacatcttgatattgctttcataatttatactaacataaaataatatttttcactgttttgcaatgtctttttaatttctgtattgcagctagaggaagtccaaagaaaacttggatttgctctttctgacatctcggtggttagcaattattcctctgagtgggagctggaccctgtaaaggatgttctaattctttctgctctgagacgaatgctatgggctgcagatgacttcttagaggatttgccttttgagcaaataggtagatggtttggtggtgtggaagcttggaagcggtcaggtagttggctactttctgcttggatctattaaatacctggcagctctctgtctttttgtgggttgttgccctgtgattagttctgctttttaacccactccctggatgcatttttccctccttgcatttccctcttttcctggagttcatactagagaatctgcactatgtttttccctttttgtcttgagatgaaagttttaaaataatccacctctgtcatttccactctctgaacatcccaagctgtatccctggcctcttttctcagactatgtttctttacttgggacctagaactggattggattggcattgctcctgatcagatgagacctttgattatttgccccttccttaggaccttacactcctgtctttctttgacttgcctttttgtttctttccttcatcttagtccctcttcatgcagtatggtcattgctaggtagaggtatgtccttttatgtaatggccaccgcatttagtattacataaactttcttttaacaatctgtgcatagtacatgctgctctgttccatttagagatttgacagaggtttcagtttagtatactcaaatcttattttagtgcttgggaaatcaattcagaatatcacatcctctccaattctctcttactcaaattgctgggaaactctcatgttactaactttgttgctctaactctgccatcttggtttccccatcccttctcttcctcatggtacgtgtgctcctaatattagcgttggttgagattttcagtggtccaatattcctcttccctctggttgcctttcctgagataatccactaagaatattttgtgtttcttttctcagggaatctaagggaggaaattatcaactgtgcacaaggaaaaaaatagatatgtgaaaggttcacgtaaatttcctcacatcacagaagattaaaattcagaaaggagaaaacacagaccaaagagaagtatctaagaccaaagggatgtgttttattaatgtctaggatgaagaaatgcatagaacattgtagtacttgtaaataactagaaataacatgatttagtcataattgtgaaaaataataataatttttcttggatttatgttctgtatctgtgaaaaaataaatttcttataaaactcgggaaaaaaaatagagagtgt

SEQ ID NO: 331956 - DNA, 1967 bp, Homo sapiens
acgcgtccgcggacgcgtgggtaaatgtttattgatattatctttaaggttgagccagtgtgttactctcttatcagctacacagatcatgaaaaaaattcccccgcactaaaaattttacaattttataaatagtggtgaggggatgggagtgtgggataagaaaaagttgacaagagattatgtacgattgagtgtgataaatataatgaaacaatgaaaaataaagtgctttaaaagtttagagaaggaaagtatagtgttaaaggggttcggggagatttcatcaatggaacggcacagggaaacggctttcaaggagaagaaatatttcacaaaatgaagagacaaaaagggccaacaaattcagcatatgacaatatattaatggaggaaaagtcagcatgtttgggaaatgtggagttcaggttagtgaagggctggatctttgtaggcagagataaaatgggcaaggaacatttgcatgaagtaattttatttaattaggagcattatgaggaatcacagcaattttttgaaagagtaatgatatgatcaaatttaatttctgtattgcagctagaggaagtccaaagaaaacttggatttgctctttctgacatctcggtggttagcaattattcctctgagtgggagctggaccctgtaaaggatgttctaattctttctgctctgagacgaatgctatgggctgcagatgacttcttagaggatttgccttttgagcaaataggtagatggtttggtggtgtggaagcttggaagcggtcaggtagttggctactttctgcttggatctattaaatacctggcagctctctgtctttttgtgggttgttgccctgtgattagttctgctttttaacccactccctggatgcatttttccctccttgcatttccctcttttcctggagttcatactagagaatctgcactatgtttttccctttttgtcttgagatgaaagttttaaaataatccacctctgtcatttccactctctgaacatcccaagctgtatccctggcctcttttctcagactatgtttctttacttgggacctagaactggattggattggcattgctcctgatcagatgagacctttgattatttgccccttccttaggaccttacactcctgtctttctttgacttgcctttttgtttctttccttcatcttagtccctcttcatgcagtatggtcattgctaggtagaggtatgtccttttatgtaatggccaccgcatttagtattacataaactttcttttaacaatctgtgcatagtacatgctgctctgttccatttagagatttgacagaggtttcagtttagtatactcaaatcttattttagtgcttgggaaatcaattcagaatatcacatcctctccaattctctcttactcaaattgctgggaaactctcatgttactaactttgttgctctaactctgccatcttggtttccccatcccttctcttcctcatggtacgtgtgctcctaatattagcgttggttgagattttcagtggtccaatattcctcttccctctggttgcctttcctgagataatccactaagaatattttgtgtttcttttctcagggaatctaagggaggaaattatcaactgtgcacaaggaaaaaaatagatatgtgaaaggttcacgtaaatttcctcacatcacagaagattaaaattcagaaaggagaaaacacagaccaaagagaagtatctaagaccaaagggatgtgttttattaatgtctaggatgaagaaatgcatagaacattgtagtacttgtaaataactagaaataacatgatttagtcataattgtgaaaaataataataatttttcttggatttatgttctgtatctgtgaaaaaataaatttcttataaaactcgggaaaaaaaatagagagtgt

SEQ ID NO: 331957 - DNA, 1568 bp, Homo sapiens
tgagtctttgaagcttcaaggctgctgaataatttccttctcccattttgtgcctgcctagctatccagacagagcagctaccctcagctctagctgatactacagacagtacaacagatcaagaagtatggcagtgacaactcgtttgacatggttgcacgaaaagatcctgcaaaatcattttggagggaagcggcttagccttctctataagggtagtgtccatggattccgtaatggagttttgcttgacagatgttgtaatcaagggcctactctaacagtgatttatagtgaagatcatattattggagcatatgcagaagagagttaccaggaaggaaagtatgcttccatcatcctttttgcacttcaagatactaaaatttcagaatggaaactaggactatgtacaccagaaacactgttttgttgtgatgttacaaaatataactccccaactaatttccagatagatggaagaaatagaaaagtgattatggacttaaagacaatggaaaatcttggacttgctcaaaattgtactatctctattcaggattatgaagtttttcgatgcgaagattcactggatgaaagaaagataaaaggggtcattgagctcaggaagagcttactgtctgccttgagaacttatgaaccatatggatccctggttcaacaaatacgaattctgctgctgggtccaattggagctgggaagtccagctttttcaactcagtgaggtctgttttccaagggcatgtaacgcatcaggctttggtgggcactaatacaactgggatatctgagaagtataggacatactctattagagacgggaaagatggcaaatacctgccgtttattctgtgtgactcactggggctgagtgagaaagaaggcggcctgtgcagggatgacatattctatatcttgaacggtaacattcgtgatagataccagtttaatcccatggaatcaatcaaattaaatcatcatgactacattgattccccatcgctgaaggacagaattcattgtgtggcatttgtatttgatgccagctctattcaatacttctcctctcagatgatagtaaagatcaaaagaattcgaagggagttggtaaacgctggtgtggtacatgtggctttgctcactcatgtggatagcatggatttgattacaaaaggtgaccttatagaaatagagagatgtgagcctgtgaggtccaagggaatctaagggaggaaattatcaactgtgcacaaggaaaaaaatagatatgtgaaaggttcacgtaaatttcctcacatcacagaagattaaaattcagaaaggagaaaacacagaccaaagagaagtatctaagaccaaagggatgtgttttattaatgtctaggatgaagaaatgcatagaacattgtagtacttgtaaataactagaaataacatgatttagtcataattgtgaaaaataataataatttttcttggatttatgttctgtatctgtgaaaaaataaatttcttataaaactcgggaaaaaaaatagagagtgt

SEQ ID NO: 331958 - DNA, 1101 bp, Homo sapiens
tgagtctttgaagcttcaaggctgctgaataatttccttctcccattttgtgcctgcctagctatccagacagagcagctaccctcagctctagctgatactacagacagtacaacagattcactggatgaaagaaagataaaaggggtcattgagctcaggaagagcttactgtctgccttgagaacttatgaaccatatggatccctggttcaacaaatacgaattctgctgctgggtccaattggagctgggaagtccagctttttcaactcagtgaggtctgttttccaagggcatgtaacgcatcaggctttggtgggcactaatacaactgggatatctgagaagtataggacatactctattagagacgggaaagatggcaaatacctgccgtttattctgtgtgactcactggggctgagtgagaaagaaggcggcctgtgcagggatgacatattctatatcttgaacggtaacattcgtgatagataccagtttaatcccatggaatcaatcaaattaaatcatcatgactacattgattccccatcgctgaaggacagaattcattgtgtggcatttgtatttgatgccagctctattcaatacttctcctctcagatgatagtaaagatcaaaagaattcgaagggagttggtaaacgctggtgtggtacatgtggctttgctcactcatgtggatagcatggatttgattacaaaaggtgaccttatagaaatagagagatgtgagcctgtgaggtccaagggaatctaagggaggaaattatcaactgtgcacaaggaaaaaaatagatatgtgaaaggttcacgtaaatttcctcacatcacagaagattaaaattcagaaaggagaaaacacagaccaaagagaagtatctaagaccaaagggatgtgttttattaatgtctaggatgaagaaatgcatagaacattgtagtacttgtaaataactagaaataacatgatttagtcataattgtgaaaaataataataatttttcttggatttatgttctgtatctgtgaaaaaataaatttcttataaaactcgggaaaaaaaatagagagtgt

SEQ ID NO: 331959 - DNA, 1000 bp, Homo sapiens
tgagtctttgaagcttcaaggctgctgaataatttccttctcccattttgtgcctgcctagctatccagacagagcagctaccctcagctctagctgatactacagacagtacaacagattcactggatgaaagaaagataaaaggggtcattgagctcaggaagagcttactgtctgccttgagaacttatgaaccatatggatccctggttcaacaaatacgaattctgctgctgggtccaattggagctgggaagtccagctttttcaactcagtgaggtctgttttccaagggcatgtaacgcatcaggctttggtgggcactaatacaactgggatatctgagaagtataggacatactctattagagacgggaaagatggcaaatacctgccgtttattctgtgtgactcactggggctgagtgagaaagaaggcggcctgtgcagggatgacatattctatatcttgaacggtaacattcgtgatagataccagtttaatcccatggaatcaatcaaattaaatcatcatgactacattgattccccatcgctgaaggacagaattcattgtgtggcatttgtatttgatgccagctctattcaatacttctcctctcagatgatagtaaagatcaaaagaattcgaagggagttggtaaacgctgggaatctaagggaggaaattatcaactgtgcacaaggaaaaaaatagatatgtgaaaggttcacgtaaatttcctcacatcacagaagattaaaattcagaaaggagaaaacacagaccaaagagaagtatctaagaccaaagggatgtgttttattaatgtctaggatgaagaaatgcatagaacattgtagtacttgtaaataactagaaataacatgatttagtcataattgtgaaaaataataataatttttcttggatttatgttctgtatctgtgaaaaaataaatttcttataaaactcgggaaaaaaaatagagagtgt

SEQ ID NO: 331960 - DNA, 851 bp, Homo sapiens
acgcgtccgcggacgcgtgggtaaatgtttattgatattatctttaaggttgagccagtgtgttactctcttatcagctacacagatcatgaaaaaaattcccccgcactaaaaattttacaattttataaatagtggtgaggggatgggagtgtgggataagaaaaagttgacaagagattatgtacgattgagtgtgataaatataatgaaacaatgaaaaataaagtgctttaaaagtttagagaaggaaagtatagtgttaaaggggttcggggagatttcatcaatggaacggcacagggaaacggctttcaaggagaagaaatatttcacaaaatgaagagacaaaaagggccaacaaattcagcatatgacaatatattaatggaggaaaagtcagcatgtttgggaaatgtggagttcaggttagtgaagggctggatctttgtaggcagagataaaatgggcaaggaacatttgcatgaagtaattttatttaattaggagcattatgaggaatcacagcaattttttgaaagagtaatgatatgatcaaagttaattaaagttatgatcttcagaaaaattaatctggcactgtgtacagaatagattggaatcaaaaggaacctggaggtgggaacaccagttgggagaatgcaatgatagcaagtatttgttgagcactaagtatgtgatagattttcttaatcagtccttataacaagcctatgaaatgggtactatcattactgcattttacaagtgaggaaacaaagaaaacagagtaaacatctgccaacgtttattgacagtgctgagcagtgacagataaatatttcgaacct

SEQ ID NO: 331961 - DNA, 797 bp, Homo sapiens
acgcgtccgcggacgcgtgggtaaatgtttattgatattatctttaaggttgagccagtgtgttactctcttatcagctacacagatcatgaaaaaaattcccccgcactaaaaattttacaattttataaatagtggtgaggggatgggagtgtgggataagaaaaagttgacaagagattatgtacgattgagtgtgataaatataatgaaacaatgaaaaataaagtgctttaaaagtttagagaaggaaagtatagtgttaaaggggttcggggagatttcatcaatggaacggcacagggaaacggctttcaaggagaagaaatatttcacaaaatgaagagacaaaaagggccaacaaattcagcatatgacaatatattaatggaggaaaagtcagcatgtttgggaaatgtggagttcaggttagtgaagggctggatctttgtaggcagagataaaatgggcaaggaacatttgcatgaagtaattttatttaattaggagcattatgaggaatcacagcaattttttgaaagagtaatgatatgatcaaagttaattaaagttatgatcttcagaaaaattaatctggcactgtgtacagaatagattggaatatttgttgagcactaagtatgtgatagattttcttaatcagtccttataacaagcctatgaaatgggtactatcattactgcattttacaagtgaggaaacaaagaaaacagagtaaacatctgccaacgtttattgacagtgctgagcagtgacagataaatatttcgaacct

SEQ ID NO: 331962 - DNA, 797 bp, Homo sapiens
acgcgtccgcggacgcgtgggtaaatgtttattgatattatctttaaggttgagccagtgtgttactctcttatcagctacacagatcatgaaaaaaattcccccgcactaaaaattttacaattttataaatagtggtgaggggatgggagtgtgggataagaaaaagttgacaagagattatgtacgattgagtgtgataaatataatgaaacaatgaaaaataaagtgctttaaaagtttagagaaggaaagtatagtgttaaaggggttcggggagatttcatcaatggaacggcacagggaaacggctttcaaggagaagaaatatttcacaaaatgaagagacaaaaagggccaacaaattcagcatatgacaatatattaatggaggaaaagtcagcatgtttgggaaatgtggagttcaggttagtgaagggctggatctttgtaggcagagatgaggaatcacagcaattttttgaaagagtaatgatatgatcaaagttaattaaagttatgatcttcagaaaaattaatctggcactgtgtacagaatagattggaatcaaaaggaacctggaggtgggaacaccagttgggagaatgcaatgatagcaagtatttgttgagcactaagtatgtgatagattttcttaatcagtccttataacaagcctatgaaatgggtactatcattactgcattttacaagtgaggaaacaaagaaaacagagtaaacatctgccaacgtttattgacagtgctgagcagtgacagataaatatttcgaacct

SEQ ID NO: 331963 - DNA, 1743 bp, Homo sapiens
tgagtctttgaagcttcaaggctgctgaataatttccttctcccattttgtgcctgcctagctatccagacagagcagctaccctcagctctagctgatactacagacagtacaacagatcaagaagtatggcagtgacaactcgtttgacatggttgcacgaaaagatcctgcaaaatcattttggagggaagcggcttagccttctctataagggtagtgtccatggattccgtaatggagttttgcttgacagatgttgtaatcaagggcctactctaacagtgatttatagtgaagatcatattattggagcatatgcagaagagagttaccaggaaggaaagtatgcttccatcatcctttttgcacttcaagatactaaaatttcagaatggaaactaggactatgtacaccagaaacactgttttgttgtgatgttacaaaatataactccccaactaatttccagatagatggaagaaatagaaaagtgattatggacttaaagacaatggaaaatcttggacttgctcaaaattgtactatctctattcaggattatgaagtttttcgatgcgaagattcactggatgaaagaaagataaaaggggtcattgagctcaggaagagcttactgtctgccttgagaacttatgaaccatatggatccctggttcaacaaatacgaattctgctgctgggtccaattggagctgggaagtccagctttttcaactcagtgaggtctgttttccaagggcatgtaacgcatcaggctttggtgggcactaatacaactgggatatctgagaagtataggacatactctattagagacgggaaagatggcaaatacctgccgtttattctgtgtgactcactggggctgagtgagaaagaaggcggcctgtgcagggatgacatattctatatcttgaacggtaacattcgtgatagataccagtttaatcccatggaatcaatcaaattaaatcatcatgactacattgattccccatcgctgaaggacagaattcattgtgtggcatttgtatttgatgccagctctattcaatacttctcctctcagatgatagtaaagatcaaaagaattcgaagggagttggtaaacgctggtgtggtacatgtggctttgctcactcatgtggatagcatggatttgattacaaaaggtgaccttatagaaatagagagatgtgagcctgtgaggtccaagctagaggaagtccaaagaaaacttggatttgctctttctgacatctcggtggttagcaattattcctctgagtgggagctggaccctgtaaaggatgttctaattctttctgctctgagacgaatgctatgggctgcagatgacttcttagaggatttgccttttgagcaaatagggaatctaagggaggaaattatcaactgtgcacaaggaaaaaaatagatatgtgaaaggttcacgtaaatttcctcacatcacagaagattaaaattcagaaaggagaaaacacagaccaaagagaagtatctaagaccaaagggatgtgttttattaatgtctaggatgaagaaatgcatagaacattgtagtacttgtaaataactagaaataacatgatttagtcataattgtgaaaaataataataatttttcttggatttatgttctgtatctgtgaaaaaataaatttcttataaaactcgggaaaaaaaatagagagtgt

SEQ ID NO: 331964 - DNA, 1684 bp, Homo sapiens
tgagtctttgaagcttcaaggctgctgaataatttccttctcccattttgtgcctgcctagctatccagacagagcagctaccctcagctctagctgatactacagacagtacaacagatcaagaagtatggcagtgacaactcgtttgacatggttgcacgaaaagatcctgcaaaatcattttggagggaagcggcttagccttctctataagggtagtgtccatggattccgtaatggagttttgcttgacagatgttgtaatcaagggcctactctaacagtgatttatagtgaagatcatattattggagcatatgcagaagagagttaccaggaaggaaagtatgcttccatcatcctttttgcacttcaagatactaaaatttcagaatggaaactaggactatgtacaccagaaacactgttttgttgtgatgttacaaaatataactccccaactaatttccagatagatggaagaaatagaaaagtgattatggacttaaagacaatggaaaatcttggacttgctcaaaattgtactatctctattcaggattatgaagtttttcgatgcgaaggccttgagaacttatgaaccatatggatccctggttcaacaaatacgaattctgctgctgggtccaattggagctgggaagtccagctttttcaactcagtgaggtctgttttccaagggcatgtaacgcatcaggctttggtgggcactaatacaactgggatatctgagaagtataggacatactctattagagacgggaaagatggcaaatacctgccgtttattctgtgtgactcactggggctgagtgagaaagaaggcggcctgtgcagggatgacatattctatatcttgaacggtaacattcgtgatagataccagtttaatcccatggaatcaatcaaattaaatcatcatgactacattgattccccatcgctgaaggacagaattcattgtgtggcatttgtatttgatgccagctctattcaatacttctcctctcagatgatagtaaagatcaaaagaattcgaagggagttggtaaacgctggtgtggtacatgtggctttgctcactcatgtggatagcatggatttgattacaaaaggtgaccttatagaaatagagagatgtgagcctgtgaggtccaagctagaggaagtccaaagaaaacttggatttgctctttctgacatctcggtggttagcaattattcctctgagtgggagctggaccctgtaaaggatgttctaattctttctgctctgagacgaatgctatgggctgcagatgacttcttagaggatttgccttttgagcaaatagggaatctaagggaggaaattatcaactgtgcacaaggaaaaaaatagatatgtgaaaggttcacgtaaatttcctcacatcacagaagattaaaattcagaaaggagaaaacacagaccaaagagaagtatctaagaccaaagggatgtgttttattaatgtctaggatgaagaaatgcatagaacattgtagtacttgtaaataactagaaataacatgatttagtcataattgtgaaaaataataataatttttcttggatttatgttctgtatctgtgaaaaaataaatttcttataaaactcgggaaaaaaaatagagagtgt

SEQ ID NO: 331965 - DNA, 1780 bp, Homo sapiens
tgagtctttgaagcttcaaggctgctgaataatttccttctcccattttgtgcctgcctagctatccagacagagcagctaccctcagctctagctgatactacagacagtacaacagatcaagaagtatggcagtgacaactcgtttgacatggttgcacgaaaagatcctgcaaaatcattttggagggaagcggcttagccttctctataagggtagtgtccatggattccgtaatggagttttgcttgacagatgttgtaatcaagggcctactctaacagtgatttatagtgaagatcatattattggagcatatgcagaagagagttaccaggaaggaaagtatgcttccatcatcctttttgcacttcaagatactaaaatttcagaatggaaactaggactatgtacaccagaaacactgttttgttgtgatgttacaaaatataactccccaactaatttccagatagatggaagaaatagaaaagtgattatggacttaaagacaatggaaaatcttggacttgctcaaaattgtactatctctattcaggattatgaagtttttcgatgcgaagattcactggatgaaagaaagataaaaggggtcattgagctcaggaagagcttactgtctgccttgagaacttatgaaccatatggatccctggttcaacaaatacgaattctgctgctgggtccaattggagctgggaagtccagctttttcaactcagtgaggtctgttttccaagggcatgtaacgcatcaggctttggtgggcactaatacaactgggatatctgagaagtataggacatactctattagagacgggaaagatggcaaatacctgccgtttattctgtgtgactcactggggctgagtgagaaagaaggcggcctgtgcagggatgacatattctatatcttgaacggtaacattcgtgatagataccagtttaatcccatggaatcaatcaaattaaatcatcatgactacattgattccccatcgctgaaggacagaattcattgtgtggcatttgtatttgatgccagctctattcaatacttctcctctcagatgatagtaaagatcaaaagaattcgaagggagttggtaaacgctggtgtggtacatgtggctttgctcactcatgtggatagcatggatttgattacaaaaggtgaccttatagaaatagagagatgtgagcctgtgaggtccaaggtaatgaatgatgcccttcgtaaacacattttctgggctagaggaagtccaaagaaaacttggatttgctctttctgacatctcggtggttagcaattattcctctgagtgggagctggaccctgtaaaggatgttctaattctttctgctctgagacgaatgctatgggctgcagatgacttcttagaggatttgccttttgagcaaatagggaatctaagggaggaaattatcaactgtgcacaaggaaaaaaatagatatgtgaaaggttcacgtaaatttcctcacatcacagaagattaaaattcagaaaggagaaaacacagaccaaagagaagtatctaagaccaaagggatgtgttttattaatgtctaggatgaagaaatgcatagaacattgtagtacttgtaaataactagaaataacatgatttagtcataattgtgaaaaataataataatttttcttggatttatgttctgtatctgtgaaaaaataaatttcttataaaactcgggaaaaaaaatagagagtgt

SEQ ID NO: 331966 - DNA, 1467 bp, Homo sapiens
tgagtctttgaagcttcaaggctgctgaataatttccttctcccattttgtgcctgcctagctatccagacagagcagctaccctcagctctagctgatactacagacagtacaacagatcaagaagtatggcagtgacaactcgtttgacatggttgcacgaaaagatcctgcaaaatcattttggagggaagcggcttagccttctctataagggtagtgtccatggattccgtaatggagttttgcttgacagatgttgtaatcaagggcctactctaacagtgatttatagtgaagatcatattattggagcatatgcagaagagagttaccaggaaggaaagtatgcttccatcatcctttttgcacttcaagatactaaaatttcagaatggaaactaggactatgtacaccagaaacactgttttgttgtgatgttacaaaatataactccccaactaatttccagatagatggaagaaatagaaaagtgattatggacttaaagacaatggaaaatcttggacttgctcaaaattgtactatctctattcaggattatgaagtttttcgatgcgaagattcactggatgaaagaaagataaaaggggtcattgagctcaggaagagcttactgtctgccttgagaacttatgaaccatatggatccctggttcaacaaatacgaattctgctgctgggtccaattggagctgggaagtccagctttttcaactcagtgaggtctgttttccaagggcatgtaacgcatcaggctttggtgggcactaatacaactgggatatctgagaagtataggacatactctattagagacgggaaagatggcaaatacctgccgtttattctgtgtgactcactggggctgagtgagaaagaaggcggcctgtgcagggatgacatattctatatcttgaacggtaacattcgtgatagataccagtttaatcccatggaatcaatcaaattaaatcatcatgactacattgattccccatcgctgaaggacagaattcattgtgtggcatttgtatttgatgccagctctattcaatacttctcctctcagatgatagtaaagatcaaaagaattcgaagggagttggtaaacgctgggaatctaagggaggaaattatcaactgtgcacaaggaaaaaaatagatatgtgaaaggttcacgtaaatttcctcacatcacagaagattaaaattcagaaaggagaaaacacagaccaaagagaagtatctaagaccaaagggatgtgttttattaatgtctaggatgaagaaatgcatagaacattgtagtacttgtaaataactagaaataacatgatttagtcataattgtgaaaaataataataatttttcttggatttatgttctgtatctgtgaaaaaataaatttcttataaaactcgggaaaaaaaatagagagtgt

SEQ ID NO: 331967 - DNA, 785 bp, Homo sapiens
gaccttccaccatgaatgcagcagcacgtgaggctttcaccagaagcagatgcttgggccatgcttcttgtgcagcctgcagaactacagagtcttgctgtgtcgccagccagagtgcaatggcacgatctcggttcaccacaacctccgtcccttgggttcaagcgattctcctgcctcagcctcctgagtagctgggactacaggtgctcaccacgcccagctaatttttgtatttttagtagagacggggtttcaccatgttggccagtatggtctcaatctcttgaccttgtgatccacccacctcagccctccaaagtgctgggattacaggcgtgagccaccgctccgggccaagactctaatctttctatagtgtttgcttaacctaattcatgataatttatttctgcgatttccatgtctttcttttttaattgctactttattttactgagggttttccctgcattttatctgagagaatacttgtggcctgtctttaagaaacagctttgaagtagatttaccaggtgacttaatggtaatccctgtcttaggaataatatgatgtatattgttaaaattaacagtatattcattttaacctcaaacctgggatagccgaaggactaaaatttctctttggagatatatacgtgtaaaacatagagcctagacagagacagacaaacttccttgctatcttcctgtgatgctgggcaatttaaaaatttaatcatctatcaaatgtgtagacttttgagggcccctgttctgct

SEQ ID NO: 331968 - DNA, 909 bp, Homo sapiens
gaccttccaccatgaatgcagcagcacgtgaggctttcaccagaagcagatgcttgggccatgcttcttgtgcagcctgcagaactagacagggtctcactcagtttcccaggctggagtgcagtggtgtcatcatagctcactggagcctcgaaatcctgggttcaagcaatcatcctgcctcagacgcctgagtagctgcagctacagacagagtcttgctgtgtcgccagccagagtgcaatggcacgatctcggttcaccacaacctccgtcccttgggttcaagcgattctcctgcctcagcctcctgagtagctgggactacaggtgctcaccacgcccagctaatttttgtatttttagtagagacggggtttcaccatgttggccagtatggtctcaatctcttgaccttgtgatccacccacctcagccctccaaagtgctgggattacaggcgtgagccaccgctccgggccaagactctaatctttctatagtgtttgcttaacctaattcatgataatttatttctgcgatttccatgtctttcttttttaattgctactttattttactgagggttttccctgcattttatctgagagaatacttgtggcctgtctttaagaaacagctttgaagtagatttaccaggtgacttaatggtaatccctgtcttaggaataatatgatgtatattgttaaaattaacagtatattcattttaacctcaaacctgggatagccgaaggactaaaatttctctttggagatatatacgtgtaaaacatagagcctagacagagacagacaaacttccttgctatcttcctgtgatgctgggcaatttaaaaatttaatcatctatcaaatgtgtagacttttgagggcccctgttctgct

SEQ ID NO: 331969 - DNA, 949 bp, Homo sapiens
tagagaccaaggtttccctgtgtgacccaggctggtctccaactcctgagctcaagcagtcctttcaccttggcttcctgaagtgctgggattacacgcatgagccaccaggtttggccttaaacaatgtattaaatgctacagcatttaatatttgtcatccctaggctgatacaaccagttggaaaaatgcaatggttaatccattggtgagagaacatctgaagtggcactttgctatcttctaaagacagagtcttgctgtgtcgccagccagagtgcaatggcacgatctcggttcaccacaacctccgtcccttgggttcaagcgattctcctgcctcagcctcctgagtagctgggactacaggtgctcaccacgcccagctaatttttgtatttttagtagagacggggtttcaccatgttggccagtatggtctcaatctcttgaccttgtgatccacccacctcagccctccaaagtgctgggattacaggcgtgagccaccgctccgggccaagactctaatctttctatagtgtttgcttaacctaattcatgataatttatttctgcgatttccatgtctttcttttttaattgctactttattttactgagggttttccctgcattttatctgagagaatacttgtggcctgtctttaagaaacagctttgaagtagatttaccaggtgacttaatggtaatccctgtcttaggaataatatgatgtatattgttaaaattaacagtatattcattttaacctcaaacctgggatagccgaaggactaaaatttctctttggagatatatacgtgtaaaacatagagcctagacagagacagacaaacttccttgctatcttcctgtgatgctgggcaatttaaaaatttaatcatctatcaaatgtgtagacttttgagggcccctgttctgct

SEQ ID NO: 331970 - DNA, 493 bp, Homo sapiens
gcagtgccagggtcatcaggatgatgcggacgcagtgtctgctggggctgcgcacgttcgtggccttcgccgccaagctctggagcttctccgcccttttgcggtggcagatctgcatggtaattcagcaccaaactgttcgatatgatatcatccccttatcttcttgtcctggaatcagctaggtgaagaggaagatcatggtgctggatccggatgagatacttattcactcccaccatgatggggtcctgaggctcacagtctggcctggaacgcctcctgacttcatcctcaaggtggtaatagacaaacatcctgtccgtttctttgtacattagaggccccatgtggatttctttttggaagtcgtgagcgagtggtgggagctggtagtgtttatagcaagcatggagatctatggctctgctgtggcagataaactggacaatagcagaagcattcttaagacgagatactacggacagcactg

SEQ ID NO: 331971 - DNA, 365 bp, Homo sapiens
gggagaaataagcagttgctattcaatgggtataaattcttcatttatgcaacataattcagttctagagacctgctgtggagcattatgccaatagttaatactgctgtattatatacttaaaatgtgttcaaaagtgttaagaggacagatctcatgttaagtgttcttaccacaataaagaaaaagggaatgaattattgatacatgcaacaacttggatatatctcaatgacattatgccaagtagaaaaaaaaagtcattctcaaaaggtcatggactgcataatttcagttacacaacacactctaattgacaaaattatagagatatagaaaagattgttgattgcaaggaaaaaggg

SEQ ID NO: 331972 - DNA, 395 bp, Homo sapiens
tttacttaaaatatattctgggggctgggcacggtggctcacacctgtaatcccagcactttgagaggccaaggtgggcggatcacttgaggtcaggtgttcaagaccagcctggccaacatggtgaaaccccgtctgtactaaaaatacaaaaattagccaggcgtggtggcgggtgcctgtaatcccagctactcaggaggctgacgtgggaggattgcttaaggccagcctaggcaacagcaagaccttgtccctaaaaaggaaaaaaaaaaaattacaaaaaaagagcagctcaagaaactataggaaacactttggttaacacaaatctgttctctgtgctgccttcaaactaatctataagaaataatgaagtccatgttagggaacac

SEQ ID NO: 331973 - DNA, 1932 bp, Homo sapiens
gaaggacagaacgtttacagcagttgtctacggctgcctctgtgttctgaagaccccatgcacccctcgtcccttctgggttgggcctggcagtcccgtaggctgtctttcccttgctttgcagatgccagccccagagtcccacctccaccgttgtaagtctttgaaatcctgtgtgtattctacattgacgggacatctcattttggactaaccacatttcaagtgctcagtattcacatatggatactgtgcaggacagcacacactaattggtccatgggcgcaggtccctgagcccacagcttcgcgggggtctggccgagcatgcgtcacaacctacgcggccaagagcagtgcgcacgcgcaacctaacgcgggactgccagcaacttccgggcgtttacaggcaggcaggtcagtgatgtgtcctaagggtccgaccgacctagatacccctctttgattcctcctcttgggattagtgtccatctctggaagcaggatccaggaggacgggaggggccgctgcggaccgcagtcgctccacctggaggagacaccagaaggaagacagcctgagggacgcagccatccccggctcctaccggcgccccgccccgcgcatgcgcacgcgcacagggagtcagctggctgcgcgggaggtcacgggaagtggggcggtgcccagacagctggagggaaggaggtgtcaggcggggagagacgcaaacggcgggaccagcagcgacggtagcagcagcatggccgcgatctatgggggtgtagaggggggaggcacacgatccgaggtccttttagtctcagaggatgggaagatcctggcagaagcagatggactgagcacaaaccactggctgatcgggacagacaagtgtgtggagaggatcaatgagatggtgaacagggccaaacggaaagcaggggtggatcctctggtaccgctgcgaagcttgggcctatctctgagcggtggggaccaggaggacgcggggaggatcctgatcgaggagctgagggaccgatttccctacctgagtgaaagctacttaatcaccaccgatgccgccggctccatcgccacagctacaccggatggtggagttgtgctcatatctggaacaggctccaactgcaggctcatcaaccctgatggctccgagagtggctgcggcggctggggccatatgatgggtgatgagggttcagcctactggatcgcacaccaagcagtgaaaatagtgtttgactccattgacaacctagaggcggctcctcatgatatcggctacgtcaaacaggccatgttccactatttccaggtgccagatcggctagggatactcactcacctgtatagggactttgataaatgcaggtttgctgggttttgccggaaaattgcagaaggtgctcagcagggagaccccctttcccgctatatcttcaggaaggctggggagatgctgggcagacacatcgtagcagtgttgcccgagattgacccggtcttgttccagggcaagattggactccccatcctgtgcgtgggctctgtgtggaagagctgggagctgctgaaggaaggttttcttttggcgctgacccagggcagagagatccaggctcagaacttcttctccagcttcaccctgatgaagctgaggcactcctccgctctgggtggggccagcctaggggccaggcacatcgggcacctcctccccatggactatagcgccaatgccattgccttctattcctacaccttttcctagggggctggtcccggctccaccccctccaagctcagtggacactgggtctgaaaggaaggagtcttttgcttcctttctcctttttacaaaaacaaacatagaagaaaataaatgcactttatccactccccaa

SEQ ID NO: 331974 - DNA, 2530 bp, Homo sapiens
tatcatgtagtgatttactttttacttttgtgaattacaacgtggtagggtaggaaatgagaaagcttaaaaagcctaattttctcactaaagcataaccagacacagcagcctattaggggtttctccagaagatggcaggcagtcaagggggacagagttcgacccgcgacaggccaactgatttccccaaaaagatgccaagggcagctaaccgccctcctggcccgcgaagctgctccttgagggcccaaaacttcccggaggagccagaggaggccctcaggagccacagctctccctgacttggcctgtatttgcacccctagggatcccattccctttcccgacgcagcgcaaggaaggggagcggaatgggggctgaaaggcaataaaaaacttgtaaagccgtatctgctagttctcccagtgggctatgtccctgcaaatatcctccacaagaagtaaactgggtgggtaggaagaggtgaaggctccctcctcagggctgccgggaccgcctcgagggcttgtctgtttaggtcccaattcctcccggatccgtacattcacacgagcgcagggcaacaatctgagcgagtgttcgtgtgtgcccgtgtgactcgccatcgcgtggcagatgttcagtagaacattacagtaatttctgttacaggtccatgggcgcaggtccctgagcccacagcttcgcgggggtctggccgagcatgcgtcacaacctacgcggccaagagcagtgcgcacgcgcaacctaacgcgggactgccagcaacttccgggcgtttacaggcaggcaggtcagtgatgtgtcctaagggtccgaccgacctagatacccctctttgattcctcctcttgggattagtgtccatctctggaagcaggatccaggaggacgggaggggccgctgcggaccgcagtcgctccacctggaggagacaccagaaggaagacagcctgagggacgcagccatccccggctcctaccggcgccccgccccgcgcatgcgcacgcgcacagggagtcagctggctgcgcgggaggtcacgggaagtggggcggtgcccagacagctggagggaaggaggtgtcaggcggggagagacgcaaacggcgggaccagcagcgacggtagcagcagcatggccgcgatctatgggggtgtagaggggggaggcacacgatccgaggtccttttagtctcagaggatgggaagatcctggcagaagcagatggactgagcacaaaccactggctgatcgggacagacaagtgtgtggagaggatcaatgagatggtgaacagggccaaacggaaagcaggggtggatcctctggtaccgctgcgaagcttgggcctatctctgagcggtggggaccaggaggacgcggggaggatcctgatcgaggagctgagggaccgatttccctacctgagtgaaagctacttaatcaccaccgatgccgccggctccatcgccacagctacaccggatggtggagttgtgctcatatctggaacaggctccaactgcaggctcatcaaccctgatggctccgagagtggctgcggcggctggggccatatgatgggtgatgagggttcagcctactggatcgcacaccaagcagtgaaaatagtgtttgactccattgacaacctagaggcggctcctcatgatatcggctacgtcaaacaggccatgttccactatttccaggtgccagatcggctagggatactcactcacctgtatagggactttgataaatgcaggtttgctgggttttgccggaaaattgcagaaggtgctcagcagggagaccccctttcccgctatatcttcaggaaggctggggagatgctgggcagacacatcgtagcagtgttgcccgagattgacccggtcttgttccagggcaagattggactccccatcctgtgcgtgggctctgtgtggaagagctgggagctgctgaaggaaggttttcttttggcgctgacccagggcagagagatccaggctcagaacttcttctccagcttcaccctgatgaagctgaggcactcctccgctctgggtggggccagcctaggggccaggcacatcgggcacctcctccccatggactatagcgccaatgccattgccttctattcctacaccttttcctagggggctggtcccggctccaccccctccaagctcagtggacactgggtctgaaaggaaggagtcttttgcttcctttctcctttttacaaaaacaaacatagaagaaaataaatgcactttatccactccccaaaaaaaaaaacaaaaaaaccaaaaaagaaaaaaaaaagaaaaaaaaaaaataaaaagacaaagaagaacaacagaaaaagaaaagcaaaaaaaaaagagggggggcgcgacacaaaaatcccccagaggggggccccataagcaggacacgcaccgattttctggcacaagggggggccacaacgagggcggttaaga

SEQ ID NO: 331975 - DNA, 2682 bp, Homo sapiens
tatcatgtagtgatttactttttacttttgtgaattacaacgtggtagggtaggaaatgagaaagcttaaaaagcctaattttctcactaaagcataaccagacacagcagcctattaggggtttctccagaagatggcaggcagtcaagggggacagagttcgacccgcgacaggccaactgatttccccaaaaagatgccaagggcagctaaccgccctcctggcccgcgaagctgctccttgagggcccaaaacttcccggaggagccagaggaggccctcaggagccacagctctccctgacttggcctgtatttgcacccctagggatcccattccctttcccgacgcagcgcaaggaaggggagcggaatgggggctgaaaggcaataaaaaacttgtaaagccgtatctgctagttctcccagtgggctatgtccctgcaaatatcctccacaagaagtaaactgggtgggtaggaagaggtgaaggctccctcctcagggctgccgggaccgcctcgagggcttgtctgtttaggtcccaattcctcccggatccgtacattcacacgagcgcagggcaacaatctgagcgagtgttcgtgtgtgcccgtgtgactcgccatcgcgtggcagatgttcagtagaacattacagtaatttctgttacaggtccatgggcgcaggtccctgagcccacagcttcgcgggggtctggccgagcatgcgtcacaacctacgcggccaagagcagtgcgcacgcgcaacctaacgcgggactgccagcaacttccgggcgtttacaggcaggcaggtcagtgatgtgtcctaagggtccgaccgacctagatacccctctttgattcctcctcttgggattagtgtccatctctggaagcaggatccaggaggacgggaggggccgctgcggaccgcagtcgctccacctggaggagacaccagaaggaagacagcctgagggacgcagccatccccggctcctaccggcgccccgccccgcgcatgcgcacgcgcacagggagtcagctggctgcgcgggaggtcacgggaagtggggcggtgcccagacagctggagggaaggaggtgtcaggcggggagagacgcaaacggcgggaccagcagcgacggtagcagcagcatggccgcgatctatgggggtgtagaggggtgagtgcggcccggcggagggagcctgggcccgaaggcggggcggaaggccgtggccagcctggcaagctggtggccttgatcctcggcgtccgggcactttgggcggcgggaccttgcggtgaagaggtgtgtgcacgcgcaggggcgccctggagcgcacagctgtatgccttacggggactctgcctgtgcaacagccacaccccgggttggggatcctttgtgtttcttggcggaaccacgcccctttcttccacgaaacacccactccgctgtcttcagctggagaagcagctcctttttcctattcctgacctcggacagagttttgcagaacaggtgtcaggggaggcacacgatccgaggtccttttagtctcagaggatgggaagatcctggcagaagcagatggactgagcacaaaccactggctgatcgggacagacaagtgtgtggagaggatcaatgagatggtgaacagggccaaacggaaagcaggggtggatcctctggtaccgctgcgaagcttgggcctatctctgagcggtggggaccaggaggacgcggggaggatcctgatcgaggagctgagggaccgatttccctacctgagtgaaagctacttaatcaccaccgatgccgccggctccatcgccacagctacaccggatggtggagttgtgctcatatctggaacaggctccaactgcaggctcatcaaccctgatggctccgagagtggctgcggcggctggggccatatgatgggtgatgagggttcagcctactggatcgcacaccaagcagtgaaaatagtgtttgactccattgacaacctagaggcggctcctcatgatatcggctacgtcaaacaggccatgttccactatttccaggtgccagatcggctagggatactcactcacctgtatagggactttgataaatgcaggtttgctgggttttgccggaaaattgcagaaggtgctcagcagggagaccccctttcccgctatatcttcaggaaggctggggagatgctgggcagacacatcgtagcagtgttgcccgagattgacccggtcttgttccagggcaagattggactccccatcctgtgcgtgggctctgtgtggaagagctgggagctgctgaaggaaggttttcttttggcgctgacccagggcagagagatccaggctcagaacttcttctccagcttcaccctgatgaagctgaggcactcctccgctctgggtggggccagcctaggggccaggcacatcgggcacctcctccccatggactatagcgccaatgccattgccttctattcctacaccttttcctagggggctggtcccggctccaccccctccaagctcagtggacactgggtctgaaaggaaggagtcttttgcttcctttctcctttttacaaaaacaaacatagaagaaaataaatgcactttatccactccccaa

SEQ ID NO: 331976 - DNA, 2149 bp, Homo sapiens
tatcatgtagtgatttactttttacttttgtgaattacaacgtggtagggtaggaaatgagaaagcttaaaaagcctaattttctcactaaagcataaccagacacagcagcctattaggggtttctccagaagatggcaggcagtcaagggggacagagttcgacccgcgacaggccaactgatttccccaaaaagatgccaagggcagctaaccgccctcctggcccgcgaagctgctccttgagggcccaaaacttcccggaggagccagaggaggccctcaggagccacagctctccctgacttggcctgtatttgcacccctagggatcccattccctttcccgacgcagcgcaaggaaggggagcggaatgggggctgaaaggcaataaaaaacttgtaaagccgtatctgctagttctcccagtgggctatgtccctgcaaatatcctccacaagaagtaaactgggtgggtaggaagaggtgaaggctccctcctcagggctgccgggaccgcctcgagggcttgtctgtttaggtcccaattcctcccggatccgtacattcacacgagcgcagggcaacaatctgagcgagtgttcgtgtgtgcccgtgtgactcgccatcgcgtggcagatgttcagtagaacattacagtaatttctgttacaggtccatgggcgcaggtccctgagcccacagcttcgcgggggtctggccgagcatgcgtcacaacctacgcggccaagagcagtgcgcacgcgcaacctaacgcgggactgccagcaacttccgggcgtttacaggcaggcaggtcagtgatgtgtcctaagggtccgaccgacctagatacccctctttgattcctcctcttgggattagtgtccatctctggaagcaggatccaggaggacgggaggggccgctgcggaccgcagtcgctccacctggaggagacaccagaaggaagacagcctgagggacgcagccatccccggctcctaccggcgccccgccccgcgcatgcgcacgcgcacagggagtcagctggctgcgcgggaggtcacgggaagtggggcggtgcccagacagctggagggaaggaggtgtcaggcggggagagacgcaaacggcgggaccagcagcgacggtagcagcagcatggccgcgatctatgggggtgtagagggggcctatctctgagcggtggggaccaggaggacgcggggaggatcctgatcgaggagctgagggaccgatttccctacctgagtgaaagctacttaatcaccaccgatgccgccggctccatcgccacagctacaccggatggtggagttgtgctcatatctggaacaggctccaactgcaggctcatcaaccctgatggctccgagagtggctgcggcggctggggccatatgatgggtgatgagggttcagcctactggatcgcacaccaagcagtgaaaatagtgtttgactccattgacaacctagaggcggctcctcatgatatcggctacgtcaaacaggccatgttccactatttccaggtgccagatcggctagggatactcactcacctgtatagggactttgataaatgcaggtttgctgggttttgccggaaaattgcagaaggtgctcagcagggagaccccctttcccgctatatcttcaggaaggctggggagatgctgggcagacacatcgtagcagtgttgcccgagattgacccggtcttgttccagggcaagattggactccccatcctgtgcgtgggctctgtgtggaagagctgggagctgctgaaggaaggttttcttttggcgctgacccagggcagagagatccaggctcagaacttcttctccagcttcaccctgatgaagctgaggcactcctccgctctgggtggggccagcctaggggccaggcacatcgggcacctcctccccatggactatagcgccaatgccattgccttctattcctacaccttttcctagggggctggtcccggctccaccccctccaagctcagtggacactgggtctgaaaggaaggagtcttttgcttcctttctcctttttacaaaaacaaacatagaagaaaataaatgcactttatccactccccaa

SEQ ID NO: 331977 - DNA, 3296 bp, Homo sapiens
tatcatgtagtgatttactttttacttttgtgaattacaacgtggtagggtaggaaatgagaaagcttaaaaagcctaattttctcactaaagcataaccagacacagcagcctattaggggtttctccagaagatggcaggcagtcaagggggacagagttcgacccgcgacaggccaactgatttccccaaaaagatgccaagggcagctaaccgccctcctggcccgcgaagctgctccttgagggcccaaaacttcccggaggagccagaggaggccctcaggagccacagctctccctgacttggcctgtatttgcacccctagggatcccattccctttcccgacgcagcgcaaggaaggggagcggaatgggggctgaaaggcaataaaaaacttgtaaagccgtatctgctagttctcccagtgggctatgtccctgcaaatatcctccacaagaagtaaactgggtgggtaggaagaggtgaaggctccctcctcagggctgccgggaccgcctcgagggcttgtctgtttaggtcccaattcctcccggatccgtacattcacacgagcgcagggcaacaatctgagcgagtgttcgtgtgtgcccgtgtgactcgccatcgcgtggcagatgttcagtagaacattacagtaatttctgttacaggtccatgggcgcaggtccctgagcccacagcttcgcgggggtctggccgagcatgcgtcacaacctacgcggccaagagcagtgcgcacgcgcaacctaacgcgggactgccagcaacttccgggcgtttacaggcaggcaggtcagtgatgtgtcctaagggtccgaccgacctagatacccctctttgattcctcctcttgggattagtgtccatctctggaagcaggatccaggaggacgggaggggccgctgcggaccgcagtcgctccacctggaggagacaccagaaggaagacagcctgagggacgcagccatccccggctcctaccggcgccccgccccgcgcatgcgcacgcgcacagggagtcagctggctgcgcgggaggtcacgggaagtggggcggtgcccagacagctggagggaaggaggtgtcaggcggggagagacgcaaacggcgggaccagcagcgacggtagcagcagcatggccgcgatctatgggggtgtagaggggggaggcacacgatccgaggtccttttagtctcagaggatgggaagatcctggcagaagcagatggactgagcacaaaccactggctgatcgggacagacaagtgtgtggagaggatcaatgagatggtgaacagggccaaacggaaagcaggggtggatcctctggtaccgctgcgaagcttgggcctatctctgagcggtggggaccaggaggacgcggggaggatcctgatcgaggagctgagggaccgatttccctacctgagtgaaagctacttaatcaccaccgatgccgccggctccatcgccacagctacaccggatggtggagttgtgctcatatctggaacaggctccaactgcaggctcatcaaccctgatggctccgagagtggctgcggcggctggggccatatgatgggtgatgagggttcagcctactggatcgcacaccaagcagtgaaaatagtgtttgactccattgacaacctagaggcggctcctcatgatatcggctacgtcaaacaggccatgttccactatttccaggtgccagatcggctagggatactcactcacctgtatagggactttgataaatgcaggtttgctgggttttgccggaaaattgcagaaggtactggaggtggggggtgggttttatctggctttgttctccaaagatccccagttgggagattgagtggggttcagacaggactgacaacaattttcctctcaccaagtgacctcagttctctgccaccactggccttggtggtggtgggccttggggtggaggcagaagggcacgtgggtcgtgttgacagttttgtattacctgtgtttttttctttaatagctatcatggcttgcttaggctgtatgcctgtttctgaggaatttatgaagcagttgtcctttggacaaatctataactttcttttcctagccaattatactcaaagaactaggggattatagagaggttaggcatattttgttgggtgtcaggagatgctgaacagagggcttgtatatctgtacattgctctttctccactgtgaggtccatcctgccttaatttgggttcctgcagcctcagggcattctagggctctcttagatcctgctggactgagtcccctctagaaaagaagcaggaacaggctaaccaacagcagactgttagaagttggtggagggcactgacaggagtaccagccagctgttcagctaggatcctgggtccccagagctgacagcctcataggaacagacttacagtaactcagtgttgagctggatgcatactaggtgccagtgcattcctttagtgggtgctgccctcccttcctgagttggggggcctgagtgagcacctctgtacagggcacccctctacagagggaggtagctggtatgtttgtcagtggagacttgcttctccacctgccacgaggcgggcatccatccggcagtagactcctagctcagggtgctcctgtgatggctgccttgcaacagagagaggatagcccaggaatggcagctccctcctttctcaccagtttccttcttccgtcctccctaccccaggtgctcagcagggagaccccctttcccgctatatcttcaggaaggctggggagatgctgggcagacacatcgtagcagtgttgcccgagattgacccggtcttgttccagggcaagattggactccccatcctgtgcgtgggctctgtgtggaagagctgggagctgctgaaggaaggttttcttttggcgctgacccagggcagagagatccaggctcagaacttcttctccagcttcaccctgatgaagctgaggcactcctccgctctgggtggggccagcctaggggccaggcacatcgggcacctcctccccatggactatagcgccaatgccattgccttctattcctacaccttttcctagggggctggtcccggctccaccccctccaagctcagtggacactgggtctgaaaggaaggagtcttttgcttcctttctcctttttacaaaaacaaacatagaagaaaataaatgcactttatccactccccaa

SEQ ID NO: 331978 - DNA, 3063 bp, Homo sapiens
tatcatgtagtgatttactttttacttttgtgaattacaacgtggtagggtaggaaatgagaaagcttaaaaagcctaattttctcactaaagcataaccagacacagcagcctattaggggtttctccagaagatggcaggcagtcaagggggacagagttcgacccgcgacaggccaactgatttccccaaaaagatgccaagggcagctaaccgccctcctggcccgcgaagctgctccttgagggcccaaaacttcccggaggagccagaggaggccctcaggagccacagctctccctgacttggcctgtatttgcacccctagggatcccattccctttcccgacgcagcgcaaggaaggggagcggaatgggggctgaaaggcaataaaaaacttgtaaagccgtatctgctagttctcccagtgggctatgtccctgcaaatatcctccacaagaagtaaactgggtgggtaggaagaggtgaaggctccctcctcagggctgccgggaccgcctcgagggcttgtctgtttaggtcccaattcctcccggatccgtacattcacacgagcgcagggcaacaatctgagcgagtgttcgtgtgtgcccgtgtgactcgccatcgcgtggcagatgttcagtagaacattacagtaatttctgttacaggtccatgggcgcaggtccctgagcccacagcttcgcgggggtctggccgagcatgcgtcacaacctacgcggccaagagcagtgcgcacgcgcaacctaacgcgggactgccagcaacttccgggcgtttacaggcaggcaggtcagtgatgtgtcctaagggtccgaccgacctagatacccctctttgattcctcctcttgggattagtgtccatctctggaagcaggatccaggaggacgggaggggccgctgcggaccgcagtcgctccacctggaggagacaccagaaggaagacagcctgagggacgcagccatccccggctcctaccggcgccccgccccgcgcatgcgcacgcgcacagggagtcagctggctgcgcgggaggtcacgggaagtggggcggtgcccagacagctggagggaaggaggtgtcaggcggggagagacgcaaacggcgggaccagcagcgacggtagcagcagcatggccgcgatctatgggggtgtagaggggggaggcacacgatccgaggtccttttagtctcagaggatgggaagatcctggcagaagcagatggactgagcacaaaccactggctgatcgggacagacaagtgtgtggagaggatcaatgagatggtgaacagggccaaacggaaagcaggggtggatcctctggtaccgctgcgaagcttgggcctatctctgagcggtggggaccaggaggacgcggggaggatcctgatcgaggagctgagggaccgatttccctacctgagtgaaagctacttaatcaccaccgatgccgccggctccatcgccacagctacaccggatggtggagttgtgctcatatctggaacaggctccaactgcaggctcatcaaccctgatggctccgagagtggctgcggcggctggggccatatgatgggtgatgagggttcaggtgagctcactgactggcccagctccaggtcctggatctgctccttccttcactccctgtctttctctccttagccttggctcactgagcccttggggcttcctggggacaactcctgaacctggccattccatgtgcaggatcatgactgagatcatagaggtgcaaatgctggacgagctgctgaccctgctctccagcagtgacttgcacccaggactcagattcatccctcagcacaggggcctgcctgtgttgacttgctgtccttagggaggagttgaaactgagggtaaggccatagatgccaggagatgccataccagtctgctaggggaaagggtgtagaagcccttccaacatcacctctctctaggtagtgtgtgtttattttcataggggcccttgaggtccagttcatggcagtgactccggtggtatttgtgacaacagactgaccttgccttatccttgggtaggagctggtgtgacacagcctcacctattctgttttccccctccaactttcccttatcttggtcagtcagatacagtttgatagagaccctcccacccccctctcccaccccctgccacccctggctgggaatcaggaaacctaatttgtataaaattcaagcagatcactaacctgtctggatctgagtttccctcctcgtgagctcaggatgactgctcccatcttcttagccctctctgctccctgcagcctactggatcgcacaccaagcagtgaaaatagtgtttgactccattgacaacctagaggcggctcctcatgatatcggctacgtcaaacaggccatgttccactatttccaggtgccagatcggctagggatactcactcacctgtatagggactttgataaatgcaggtttgctgggttttgccggaaaattgcagaaggtgctcagcagggagaccccctttcccgctatatcttcaggaaggctggggagatgctgggcagacacatcgtagcagtgttgcccgagattgacccggtcttgttccagggcaagattggactccccatcctgtgcgtgggctctgtgtggaagagctgggagctgctgaaggaaggttttcttttggcgctgacccagggcagagagatccaggctcagaacttcttctccagcttcaccctgatgaagctgaggcactcctccgctctgggtggggccagcctaggggccaggcacatcgggcacctcctccccatggactatagcgccaatgccattgccttctattcctacaccttttcctagggggctggtcccggctccaccccctccaagctcagtggacactgggtctgaaaggaaggagtcttttgcttcctttctcctttttacaaaaacaaacatagaagaaaataaatgcactttatccactccccaa

SEQ ID NO: 331979 - DNA, 2301 bp, Homo sapiens
tatcatgtagtgatttactttttacttttgtgaattacaacgtggtagggtaggaaatgagaaagcttaaaaagcctaattttctcactaaagcataaccagacacagcagcctattaggggtttctccagaagatggcaggcagtcaagggggacagagttcgacccgcgacaggccaactgatttccccaaaaagatgccaagggcagctaaccgccctcctggcccgcgaagctgctccttgagggcccaaaacttcccggaggagccagaggaggccctcaggagccacagctctccctgacttggcctgtatttgcacccctagggatcccattccctttcccgacgcagcgcaaggaaggggagcggaatgggggctgaaaggcaataaaaaacttgtaaagccgtatctgctagttctcccagtgggctatgtccctgcaaatatcctccacaagaagtaaactgggtgggtaggaagaggtgaaggctccctcctcagggctgccgggaccgcctcgagggcttgtctgtttaggtcccaattcctcccggatccgtacattcacacgagcgcagggcaacaatctgagcgagtgttcgtgtgtgcccgtgtgactcgccatcgcgtggcagatgttcagtagaacattacagtaatttctgttacaggtccatgggcgcaggtccctgagcccacagcttcgcgggggtctggccgagcatgcgtcacaacctacgcggccaagagcagtgcgcacgcgcaacctaacgcgggactgccagcaacttccgggcgtttacaggcaggcaggtcagtgatgtgtcctaagggtccgaccgacctagatacccctctttgattcctcctcttgggattagtgtccatctctggaagcaggatccaggaggacgggaggggccgctgcggaccgcagtcgctccacctggaggagacaccagaaggaagacagcctgagggacgcagccatccccggctcctaccggcgccccgccccgcgcatgcgcacgcgcacagggagtcagctggctgcgcgggaggtcacgggaagtggggcggtgcccagacagctggagggaaggaggtgtcaggcggggagagacgcaaacggcgggaccagcagcgacggtagcagcagcatggccgcgatctatgggggtgtagaggggggaggcacacgatccgaggtccttttagtctcagaggatgggaagatcctggcagaagcagatggactgagcacaaaccactggctgatcgggacagacaagtgtgtggagaggatcaatgagatggtgaacagggccaaacggaaagcaggggtggatcctctggtaccgctgcgaagcttgggcctatctctgagcggtggggaccaggaggacgcggggaggatcctgatcgaggagctgagggaccgatttccctacctgagtgaaagctacttaatcaccaccgatgccgccggctccatcgccacagctacaccggatggtggagttgtgctcatatctggaacaggctccaactgcaggctcatcaaccctgatggctccgagagtggctgcggcggctggggccatatgatgggtgatgagggttcagcctactggatcgcacaccaagcagtgaaaatagtgtttgactccattgacaacctagaggcggctcctcatgatatcggctacgtcaaacaggccatgttccactatttccaggtgccagatcggctagggatactcactcacctgtatagggactttgataaatgcaggtgctcagcagggagaccccctttcccgctatatcttcaggaaggctggggagatgctgggcagacacatcgtagcagtgttgcccgagattgacccggtcttgttccagggcaagattggactccccatcctgtgcgtgggctctgtgtggaagagctgggagctgctgaaggaaggttttcttttggcgctgacccagggcagagagatccaggctcagaacttcttctccagcttcaccctgatgaagctgaggcactcctccgctctgggtggggccagcctaggggccaggcacatcgggcacctcctccccatggactatagcgccaatgccattgccttctattcctacaccttttcctagggggctggtcccggctccaccccctccaagctcagtggacactgggtctgaaaggaaggagtcttttgcttcctttctcctttttacaaaaacaaacatagaagaaaataaatgcactttatccactccccaa

SEQ ID NO: 331980 - DNA, 2989 bp, Homo sapiens
tatcatgtagtgatttactttttacttttgtgaattacaacgtggtagggtaggaaatgagaaagcttaaaaagcctaattttctcactaaagcataaccagacacagcagcctattaggggtttctccagaagatggcaggcagtcaagggggacagagttcgacccgcgacaggccaactgatttccccaaaaagatgccaagggcagctaaccgccctcctggcccgcgaagctgctccttgagggcccaaaacttcccggaggagccagaggaggccctcaggagccacagctctccctgacttggcctgtatttgcacccctagggatcccattccctttcccgacgcagcgcaaggaaggggagcggaatgggggctgaaaggcaataaaaaacttgtaaagccgtatctgctagttctcccagtgggctatgtccctgcaaatatcctccacaagaagtaaactgggtgggtaggaagaggtgaaggctccctcctcagggctgccgggaccgcctcgagggcttgtctgtttaggtcccaattcctcccggatccgtacattcacacgagcgcagggcaacaatctgagcgagtgttcgtgtgtgcccgtgtgactcgccatcgcgtggcagatgttcagtagaacattacagtaatttctgttacaggtccatgggcgcaggtccctgagcccacagcttcgcgggggtctggccgagcatgcgtcacaacctacgcggccaagagcagtgcgcacgcgcaacctaacgcgggactgccagcaacttccgggcgtttacaggcaggcaggtcagtgatgtgtcctaagggtccgaccgacctagatacccctctttgattcctcctcttgggattagtgtccatctctggaagcaggatccaggaggacgggaggggccgctgcggaccgcagtcgctccacctggaggagacaccagaaggaagacagcctgagggacgcagccatccccggctcctaccggcgccccgccccgcgcatgcgcacgcgcacagggagtcagctggctgcgcgggaggtcacgggaagtggggcggtgcccagacagctggagggaaggaggtgtcaggcggggagagacgcaaacggcgggaccagcagcgacggtagcagcagcatggccgcgatctatgggggtgtagaggggggaggcacacgatccgaggtccttttagtctcagaggatgggaagatcctggcagaagcagatggactgagcacaaaccactggctgatcgggacagacaagtgtgtggagaggatcaatgagatggtgaacagggccaaacggaaagcaggggtggatcctctggtaccgctgcgaagcttgggcctatctctgagcggtggggaccaggaggacgcggggaggatcctgatcgaggagctgagggaccgatttccctacctgagtgaaagctacttaatcaccaccgatgccgccggctccatcgccacagctacaccggatggtggagttgtgctcatatctggaacaggctccaactgcaggctcatcaaccctgatggctccgagagtggctgcggcggctggggccatatgatgggtgatgagggttcagccttggctcactgagcccttggggcttcctggggacaactcctgaacctggccattccatgtgcaggatcatgactgagatcatagaggtgcaaatgctggacgagctgctgaccctgctctccagcagtgacttgcacccaggactcagattcatccctcagcacaggggcctgcctgtgttgacttgctgtccttagggaggagttgaaactgagggtaaggccatagatgccaggagatgccataccagtctgctaggggaaagggtgtagaagcccttccaacatcacctctctctaggtagtgtgtgtttattttcataggggcccttgaggtccagttcatggcagtgactccggtggtatttgtgacaacagactgaccttgccttatccttgggtaggagctggtgtgacacagcctcacctattctgttttccccctccaactttcccttatcttggtcagtcagatacagtttgatagagaccctcccacccccctctcccaccccctgccacccctggctgggaatcaggaaacctaatttgtataaaattcaagcagatcactaacctgtctggatctgagtttccctcctcgtgagctcaggatgactgctcccatcttcttagccctctctgctccctgcagcctactggatcgcacaccaagcagtgaaaatagtgtttgactccattgacaacctagaggcggctcctcatgatatcggctacgtcaaacaggccatgttccactatttccaggtgccagatcggctagggatactcactcacctgtatagggactttgataaatgcaggtttgctgggttttgccggaaaattgcagaaggtgctcagcagggagaccccctttcccgctatatcttcaggaaggctggggagatgctgggcagacacatcgtagcagtgttgcccgagattgacccggtcttgttccagggcaagattggactccccatcctgtgcgtgggctctgtgtggaagagctgggagctgctgaaggaaggttttcttttggcgctgacccagggcagagagatccaggctcagaacttcttctccagcttcaccctgatgaagctgaggcactcctccgctctgggtggggccagcctaggggccaggcacatcgggcacctcctccccatggactatagcgccaatgccattgccttctattcctacaccttttcctagggggctggtcccggctccaccccctccaagctcagtggacactgggtctgaaaggaaggagtcttttgcttcctttctcctttttacaaaaacaaacatagaagaaaataaatgcactttatccactccccaa

SEQ ID NO: 331981 - DNA, 2352 bp, Homo sapiens
tatcatgtagtgatttactttttacttttgtgaattacaacgtggtagggtaggaaatgagaaagcttaaaaagcctaattttctcactaaagcataaccagacacagcagcctattaggggtttctccagaagatggcaggcagtcaagggggacagagttcgacccgcgacaggccaactgatttccccaaaaagatgccaagggcagctaaccgccctcctggcccgcgaagctgctccttgagggcccaaaacttcccggaggagccagaggaggccctcaggagccacagctctccctgacttggcctgtatttgcacccctagggatcccattccctttcccgacgcagcgcaaggaaggggagcggaatgggggctgaaaggcaataaaaaacttgtaaagccgtatctgctagttctcccagtgggctatgtccctgcaaatatcctccacaagaagtaaactgggtgggtaggaagaggtgaaggctccctcctcagggctgccgggaccgcctcgagggcttgtctgtttaggtcccaattcctcccggatccgtacattcacacgagcgcagggcaacaatctgagcgagtgttcgtgtgtgcccgtgtgactcgccatcgcgtggcagatgttcagtagaacattacagtaatttctgttacaggtccatgggcgcaggtccctgagcccacagcttcgcgggggtctggccgagcatgcgtcacaacctacgcggccaagagcagtgcgcacgcgcaacctaacgcgggactgccagcaacttccgggcgtttacaggcaggcaggtcagtgatgtgtcctaagggtccgaccgacctagatacccctctttgattcctcctcttgggattagtgtccatctctggaagcaggatccaggaggacgggaggggccgctgcggaccgcagtcgctccacctggaggagacaccagaaggaagacagcctgagggacgcagccatccccggctcctaccggcgccccgccccgcgcatgcgcacgcgcacagggagtcagctggctgcgcgggaggtcacgggaagtggggcggtgcccagacagctggagggaaggaggtgtcaggcggggagagacgcaaacggcgggaccagcagcgacggtagcagcagcatggccgcgatctatgggggtgtagaggggggaggcacacgatccgaggtccttttagtctcagaggatgggaagatcctggcagaagcagatggactgagcacaaaccactggctgatcgggacagacaagtgtgtggagaggatcaatgagatggtgaacagggccaaacggaaagcaggggtggatcctctggtaccgctgcgaagcttgggcctatctctgagcggtggggaccaggaggacgcggggaggatcctgatcgaggagctgagggaccgatttccctacctgagtgaaagctacttaatcaccaccgatgccgccggctccatcgccacagctacaccggatggtggagttgtgctcatatctggaacaggctccaactgcaggctcatcaaccctgatggctccgagagtggctgcggcggctggggccatatgatgggtgatgagggttcagccctctctgctccctgcagcctactggatcgcacaccaagcagtgaaaatagtgtttgactccattgacaacctagaggcggctcctcatgatatcggctacgtcaaacaggccatgttccactatttccaggtgccagatcggctagggatactcactcacctgtatagggactttgataaatgcaggtttgctgggttttgccggaaaattgcagaaggtgctcagcagggagaccccctttcccgctatatcttcaggaaggctggggagatgctgggcagacacatcgtagcagtgttgcccgagattgacccggtcttgttccagggcaagattggactccccatcctgtgcgtgggctctgtgtggaagagctgggagctgctgaaggaaggttttcttttggcgctgacccagggcagagagatccaggctcagaacttcttctccagcttcaccctgatgaagctgaggcactcctccgctctgggtggggccagcctaggggccaggcacatcgggcacctcctccccatggactatagcgccaatgccattgccttctattcctacaccttttcctagggggctggtcccggctccaccccctccaagctcagtggacactgggtctgaaaggaaggagtcttttgcttcctttctcctttttacaaaaacaaacatagaagaaaataaatgcactttatccactccccaa

SEQ ID NO: 331982 - DNA, 760 bp, Homo sapiens
  misc_feature (40)..(40): n is a, c, g, or t
gcgactcttgtaggatccccggcgcatggggtctgtatgntgggtgatgagggttcagcctactggatcgcacaccaagcagtgaaaatagtgtttgactccattgacaacctagaggcggctcctcatgatatcggctacgtcaaacaggccatgttccactatttccaggtgccagatcggctagggatactcactcacctgtatagggactttgataaatgcaggtttgctgggttttgccggaaaattgcagaaggtgctcagcagggagaccccctttcccgctatatcttcaggaaggctggggagatgctgggcagacacatcgtagcagtgttgcccgagattgacccggtcttgttccagggcaagattggactccccatcctgtgcgtgggctctgtgtggaagagctgggagctgctgaaggaaggttttcttttggcgctgacccagggcagagagatccaggctcagaacttcttctccagcttcaccctgatgaagctgaggcactcctccgctctgggtggggccagcctaggggccaggcacatcgggcacctcctccccatggactatagcgccaatgccattgccttctattcctacaccttttcctagggggctggtcccggctccaccccctccaagctcagtggacactgggtctgaaaggaaggagtcttttgcttcctttctcctttttacaaaaacaaacatagaagaaaataaatgcactttatccactccccaa

SEQ ID NO: 331983 - DNA, 1586 bp, Homo sapiens
tctgatgactctcttgtgccctttctcctctcaggtgccagatcggctagggatactcactcacctgtatagggactttgataaatgcaggtttgctgggttttgccggaaaattgcagaaggtactggaggtggggggtgggttttatctggctttgttctccaaagatccccagttgggagattgagtggggttcagacaggactgacaacaattttcctctcaccaagtgacctcagttctctgccaccactggccttggtggtggtgggccttggggtggaggcagaagggcacgtgggtcgtgttgacagttttgtattacctgtgtttttttctttaatagctatcatggcttgcttaggctgtatgcctgtttctgaggaatttatgaagcagttgtcctttggacaaatctataactttcttttcctagccaattatactcaaagaactaggggattatagagaggttaggcatattttgttgggtgtcaggagatgctgaacagagggcttgtatatctgtacattgctctttctccactgtgaggtccatcctgccttaatttgggttcctgcagcctcagggcattctagggctctcttagatcctgctggactgagtcccctctagaaaagaagcaggaacaggctaaccaacagcagactgttagaagttggtggagggcactgacaggagtaccagccagctgttcagctaggatcctgggtccccagagctgacagcctcataggaacagacttacagtaactcagtgttgagctggatgcatactaggtgccagtgcattcctttagtgggtgctgccctcccttcctgagttggggggcctgagtgagcacctctgtacagggcacccctctacagagggaggtagctggtatgtttgtcagtggagacttgcttctccacctgccacgaggcgggcatccatccggcagtagactcctagctcagggtgctcctgtgatggctgccttgcaacagagagaggatagcccaggaatggcagctccctcctttctcaccagtttccttcttccgtcctccctaccccaggtgctcagcagggagaccccctttcccgctatatcttcaggaaggctggggagatgctgggcagacacatcgtagcagtgttgcccgagattgacccggtcttgttccagggcaagattggactccccatcctgtgcgtgggctctgtgtggaagagctgggagctgctgaaggaaggttttcttttggcgctgacccagggcagagagatccaggctcagaacttcttctccagcttcaccctgatgaagctgaggcactcctccgctctgggtggggccagcctaggggccaggcacatcgggcacctcctccccatggactatagcgccaatgccattgccttctattcctacaccttttcctagggggctggtcccggctccaccccctccaagctcagtggacactgggtctgaaaggaaggagtcttttgcttcctttctcctttttacaaaaacaaacatagaagaaaataaatgcactttatccactccccaa

SEQ ID NO: 331984 - DNA, 2147 bp, Homo sapiens
tatcatgtagtgatttactttttacttttgtgaattacaacgtggtagggtaggaaatgagaaagcttaaaaagcctaattttctcactaaagcataaccagacacagcagcctattaggggtttctccagaagatggcaggcagtcaagggggacagagttcgacccgcgacaggccaactgatttccccaaaaagatgccaagggcagctaaccgccctcctggcccgcgaagctgctccttgagggcccaaaacttcccggaggagccagaggaggccctcaggagccacagctctccctgacttggcctgtatttgcacccctagggatcccattccctttcccgacgcagcgcaaggaaggggagcggaatgggggctgaaaggcaataaaaaacttgtaaagccgtatctgctagttctcccagtgggctatgtccctgcaaatatcctccacaagaagtaaactgggtgggtaggaagaggtgaaggctccctcctcagggctgccgggaccgcctcgagggcttgtctgtttaggtcccaattcctcccggatccgtacattcacacgagcgcagggcaacaatctgagcgagtgttcgtgtgtgcccgtgtgactcgccatcgcgtggcagatgttcagtagaacattacagtaatttctgttacaggtccatgggcgcaggtccctgagcccacagcttcgcgggggtctggccgagcatgcgtcacaacctacgcggccaagagcagtgcgcacgcgcaacctaacgcgggactgccagcaacttccgggcgtttacaggcaggcaggtcagtgatgtgtcctaagggtccgaccgacctagatacccctctttgattcctcctcttgggattagtgtccatctctggaagcaggatccaggaggacgggaggggccgctgcggaccgcagtcgctccacctggaggagacaccagaaggaagacagcctgagggacgcagccatccccggctcctaccggcgccccgccccgcgcatgcgcacgcgcacagggagtcagctggctgcgcgggaggtcacgggaagtggggcggtgcccagacagctggagggaaggaggtgtcaggcggggagagacgcaaacggcgggaccagcagcgacggtagcagcagcatggccgcgatctatgggggtgtagaggggggaggcacacgatccgaggtccttttagtctcagaggatgggaagatcctggcagaagcagatggactgagcacaaaccactggctgatcgggacagacaagtgtgtggagaggatcaatgagatggtgaacagggccaaacggaaagcaggggtggatcctctggtaccgctgcgaagcttgggcctatctctgagcggtggggaccaggaggacgcggggaggatcctgatcgaggagctgagggaccgatttccctacctgagtgaaagctacttaatcaccaccgatgccgccggctccatcgccacagctacaccggatggtggagttgtgctcatatctggaacaggctccaactgcaggctcatcaaccctgatggctccgagagtggctgcggcggctggggccatatgatgggtgatgagggttcagcctactggatcgcacaccaagcagtgaaaatagtgtttgactccattgacaacctagaggcggctcctcatgatatcggctacgtcaaacaggccatgttccactatttccaggtcttgttccagggcaagattggactccccatcctgtgcgtgggctctgtgtggaagagctgggagctgctgaaggaaggttttcttttggcgctgacccagggcagagagatccaggctcagaacttcttctccagcttcaccctgatgaagctgaggcactcctccgctctgggtggggccagcctaggggccaggcacatcgggcacctcctccccatggactatagcgccaatgccattgccttctattcctacaccttttcctagggggctggtcccggctccaccccctccaagctcagtggacactgggtctgaaaggaaggagtcttttgcttcctttctcctttttacaaaaacaaacatagaagaaaataaatgcactttatccactccccaa

SEQ ID NO: 331985 - DNA, 2160 bp, Homo sapiens
tatcatgtagtgatttactttttacttttgtgaattacaacgtggtagggtaggaaatgagaaagcttaaaaagcctaattttctcactaaagcataaccagacacagcagcctattaggggtttctccagaagatggcaggcagtcaagggggacagagttcgacccgcgacaggccaactgatttccccaaaaagatgccaagggcagctaaccgccctcctggcccgcgaagctgctccttgagggcccaaaacttcccggaggagccagaggaggccctcaggagccacagctctccctgacttggcctgtatttgcacccctagggatcccattccctttcccgacgcagcgcaaggaaggggagcggaatgggggctgaaaggcaataaaaaacttgtaaagccgtatctgctagttctcccagtgggctatgtccctgcaaatatcctccacaagaagtaaactgggtgggtaggaagaggtgaaggctccctcctcagggctgccgggaccgcctcgagggcttgtctgtttaggtcccaattcctcccggatccgtacattcacacgagcgcagggcaacaatctgagcgagtgttcgtgtgtgcccgtgtgactcgccatcgcgtggcagatgttcagtagaacattacagtaatttctgttacaggtccatgggcgcaggtccctgagcccacagcttcgcgggggtctggccgagcatgcgtcacaacctacgcggccaagagcagtgcgcacgcgcaacctaacgcgggactgccagcaacttccgggcgtttacaggcaggcaggtcagtgatgtgtcctaagggtccgaccgacctagatacccctctttgattcctcctcttgggattagtgtccatctctggaagcaggatccaggaggacgggaggggccgctgcggaccgcagtcgctccacctggaggagacaccagaaggaagacagcctgagggacgcagccatccccggctcctaccggcgccccgccccgcgcatgcgcacgcgcacagggagtcagctggctgcgcgggaggtcacgggaagtggggcggtgcccagacagctggagggaaggaggtgtcaggcggggagagacgcaaacggcgggaccagcagcgacggtagcagcagcatggccgcgatctatgggggtgtagaggggggaggcacacgatccgaggtccttttagtctcagaggatgggaagatcctggcagaagcagatggactgagcacaaaccactggctgatcgggacagacaagtgtgtggagaggatcaatgagatggtgaacagggccaaacggaaagcaggggtggatcctctggtaccgctgcgaagcttgggcctatctctgagcggtggggaccaggaggacgcggggaggatcctgatcgaggagctgagggaccgatttccctacctgagtgaaagctacttaatcaccaccgatgccgccggctccatcgccacagctacaccggatggtggagttgtgctcatatctggaacaggctccaactgcaggctcatcaaccctgatggctccgagagtggctgcggcggctggggccatatgatgggtgatgagggttcaggtgagctcactgactggcccagctccaggtcctggatctgctccttccttcactccctgtctttctctccttagccttggctcactgagcccttggggcttcctggggacaactcctgaacctggccattccatgtgcaggatcatgactgagatcatagaggtgcaaatgctggacgagctgctgaccctgctctccagcagtgacttgcacccaggactcagattcatccctcagcacaggggcctgcctgtgttgacttgctgtccttagggaggagttgaaactgagggtaaggccatagatgccaggagatgccataccagtctgctaggggaaagggtgtagaagcccttccaacatcacctctctctaggtagtgtgtgtttattttcataggggcccttgaggtccagttcatggcagtgactccggtggtatttgtgacaacagctcctacccaaggataaagcaaggtcagtctttgtcacaaataccaccggagtcactgccatgagaagtcctgtga

SEQ ID NO: 331986 - DNA, 110 bp, Homo sapiens
tgggactcacagagcagcctgtgggggcaacatagcttctgtaagcctttgtaactccttcttcccttgattggggccagctgatcgggacagacaagtgtgtggagagg

SEQ ID NO: 331987 - DNA, 274 bp, Homo sapiens
tacaaaaacaaacatagaagaaaataaatgcactttatccactccccaattggactgcattatcaaacacatgtgctatgtacatcctcagtgcacctgccagcagatatcctggagggctcatgagtgaatttagtccaagatttaaagccctgcccccaggtgctcagcctgtgatctgtatccactcagcatgcacttgggcagatgatttgtctgtgtgctacccttccccccatattaccatacatatgcactgtgtggctgccagtta

SEQ ID NO: 331988 - DNA, 777 bp, Homo sapiens
cagcgacggtagcagcagcatggccgcgatctatgggggtgtagaggggtgagtgcggcccggcggagggagcctgggcccgaaggcggggcggaaggccgtggccagcctggcaagctggtggccttgatcctcggcgtccgggcactttgggcggcgggaccttgcggtgaagaggtgtgtgcacgcgcaggggcgccctggagcgcacagctgtatgccttacggggactctgcctgtgcaacagccacaccccgggttggggatcctttgtgtttcttggcggaaccacgcccctttcttccacgaaacacccactccgctgtcttcagctggagaagcagctcctttttcctattcctgacctcggacagagttttgcagaacaggtgtcaggtgtgaaattgctgagcgcgggcagggtggggagtgggagtggggagaagcgggacaaagatcttggctgaggttatccgggagctggagcagctgcgagccagagtactaggttgtcctgatgtctgaaaaccgctccatccctgttggccttccatgctgctttcactagattgcatttttctgctcagaagcttgtttactgaactttttgtaatagctctgcccctgggtatgaccatggacaagatatttaccctccctgggctacagttaccgtatgtgcaaagtgaggatagggataaataagatcgctatgtccctgccagtggcaacattctgtgaatctgagtttgtcaaatcagggaataatgggggtc

SEQ ID NO: 331989 - DNA, 2333 bp, Homo sapiens
tatcatgtagtgatttactttttacttttgtgaattacaacgtggtagggtaggaaatgagaaagcttaaaaagcctaattttctcactaaagcataaccagacacagcagcctattaggggtttctccagaagatggcaggcagtcaagggggacagagttcgacccgcgacaggccaactgatttccccaaaaagatgccaagggcagctaaccgccctcctggcccgcgaagctgctccttgagggcccaaaacttcccggaggagccagaggaggccctcaggagccacagctctccctgacttggcctgtatttgcacccctagggatcccattccctttcccgacgcagcgcaaggaaggggagcggaatgggggctgaaaggcaataaaaaacttgtaaagccgtatctgctagttctcccagtgggctatgtccctgcaaatatcctccacaagaagtaaactgggtgggtaggaagaggtgaaggctccctcctcagggctgccgggaccgcctcgagggcttgtctgtttaggtcccaattcctcccggatccgtacattcacacgagcgcagggcaacaatctgagcgagtgttcgtgtgtgcccgtgtgactcgccatcgcgtggcagatgttcagtagaacattacagtaatttctgttacaggtccatgggcgcaggtccctgagcccacagcttcgcgggggtctggccgagcatgcgtcacaacctacgcggccaagagcagtgcgcacgcgcaacctaacgcgggactgccagcaacttccgggcgtttacaggcaggcaggtcagtgatgtgtcctaagggtccgaccgacctagatacccctctttgattcctcctcttgggattagtgtccatctctggaagcaggatccaggaggacgggaggggccgctgcggaccgcagtcgctccacctggaggagacaccagaaggaagacagcctgagggacgcagccatccccggctcctaccggcgccccgccccgcgcatgcgcacgcgcacagggagtcagctggctgcgcgggaggtcacgggaagtggggcggtgcccagacagctggagggaaggaggtgtcaggcggggagagacgcaaacggcgggaccagcagcgacggtagcagcagcatggccgcgatctatgggggtgtagaggggggaggcacacgatccgaggtccttttagtctcagaggatgggaagatcctggcagaagcagatggactgagcacaaaccactggctgatcgggacagacaagtgtgtggagaggatcaatgagatggtgaacagggccaaacggaaagcaggggtggatcctctggtaccgctgcgaagcttgggcctatctctgagcggtggggaccaggaggacgcggggaggatcctgatcgaggagctgagggaccgatttccctacctgagtgaaagctacttaatcaccaccgatgccgccggctccatcgccacagctacaccggatggtggagttgtgctcatatctggaacaggctccaactgcaggctcatcaaccctgatggctccgagagtggctgcggcggctggggccatatgatgggtgatgagggttcagcctactggatcgcacaccaagcagtgaaaatagtgtttgactccattgacaacctagaggcggctcctcatgatatcggctacgtcaaacaggccatgttccactatttccaggtgccagatcggctagggatactcactcacctgtatagggactttgataaatgcaggtttgctgggttttgccggaaaattgcagaaggtgctcagcagggagaccccctttcccgctatatcttcaggaaggctggggagatgctgggcagacacatcgtagcagtgttgcccgagattgacccggtcttgttccagggcaagattggactccccatcctgtgcgtgggctctgtgtggaagagctgggagctgctgaaggaaggttttcttttggcgctgacccagggcagagagatccaggctcagaacttcttctccagcttcaccctgatgaagctgaggcactcctccgctctgggtggggccagcctaggggccaggcacatcgggcacctcctccccatggactatagcgccaatgccattgccttctattcctacaccttttcctagggggctggtcccggctccaccccctccaagctcagtggacactgggtctgaaaggaaggagtcttttgcttcctttctcctttttacaaaaacaaacatagaagaaaataaatgcactttatccactccccaa

SEQ ID NO: 331990 - DNA, 1958 bp, Homo sapiens
tatcatgtagtgatttactttttacttttgtgaattacaacgtggtagggtaggaaatgagaaagcttaaaaagcctaattttctcactaaagcataaccagacacagcagcctattaggggtttctccagaagatggcaggcagtcaagggggacagagttcgacccgcgacaggccaactgatttccccaaaaagatgccaagggcagctaaccgccctcctggcccgcgaagctgctccttgagggcccaaaacttcccggaggagccagaggaggccctcaggagccacagctctccctgacttggcctgtatttgcacccctagggatcccattccctttcccgacgcagcgcaaggaaggggagcggaatgggggctgaaaggcaataaaaaacttgtaaagccgtatctgctagttctcccagtgggctatgtccctgcaaatatcctccacaagaagtaaactgggtgggtaggaagaggtgaaggctccctcctcagggctgccgggaccgcctcgagggcttgtctgtttaggtcccaattcctcccggatccgtacattcacacgagcgcagggcaacaatctgagcgagtgttcgtgtgtgcccgtgtgactcgccatcgcgtggcagatgttcagtagaacattacagtaatttctgttacaggtccatgggcgcaggtccctgagcccacagcttcgcgggggtctggccgagcatgcgtcacaacctacgcggccaagagcagtgcgcacgcgcaacctaacgcgggactgccagcaacttccgggcgtttacaggcaggcagggggaggcacacgatccgaggtccttttagtctcagaggatgggaagatcctggcagaagcagatggactgagcacaaaccactggctgatcgggacagacaagtgtgtggagaggatcaatgagatggtgaacagggccaaacggaaagcaggggtggatcctctggtaccgctgcgaagcttgggcctatctctgagcggtggggaccaggaggacgcggggaggatcctgatcgaggagctgagggaccgatttccctacctgagtgaaagctacttaatcaccaccgatgccgccggctccatcgccacagctacaccggatggtggagttgtgctcatatctggaacaggctccaactgcaggctcatcaaccctgatggctccgagagtggctgcggcggctggggccatatgatgggtgatgagggttcagcctactggatcgcacaccaagcagtgaaaatagtgtttgactccattgacaacctagaggcggctcctcatgatatcggctacgtcaaacaggccatgttccactatttccaggtgccagatcggctagggatactcactcacctgtatagggactttgataaatgcaggtttgctgggttttgccggaaaattgcagaaggtgctcagcagggagaccccctttcccgctatatcttcaggaaggctggggagatgctgggcagacacatcgtagcagtgttgcccgagattgacccggtcttgttccagggcaagattggactccccatcctgtgcgtgggctctgtgtggaagagctgggagctgctgaaggaaggttttcttttggcgctgacccagggcagagagatccaggctcagaacttcttctccagcttcaccctgatgaagctgaggcactcctccgctctgggtggggccagcctaggggccaggcacatcgggcacctcctccccatggactatagcgccaatgccattgccttctattcctacaccttttcctagggggctggtcccggctccaccccctccaagctcagtggacactgggtctgaaaggaaggagtcttttgcttcctttctcctttttacaaaaacaaacatagaagaaaataaatgcactttatccactccccaa

SEQ ID NO: 331991 - DNA, 2248 bp, Homo sapiens
tatcatgtagtgatttactttttacttttgtgaattacaacgtggtagggtaggaaatgagaaagcttaaaaagcctaattttctcactaaagcataaccagacacagcagcctattaggggtttctccagaagatggcaggcagtcaagggggacagagttcgacccgcgacaggccaactgatttccccaaaaagatgccaagggcagctaaccgccctcctggcccgcgaagctgctccttgagggcccaaaacttcccggaggagccagaggaggccctcaggagccacagctctccctgacttggcctgtatttgcacccctagggatcccattccctttcccgacgcagcgcaaggaaggggagcggaatgggggctgaaaggcaataaaaaacttgtaaagccgtatctgctagttctcccagtgggctatgtccctgcaaatatcctccacaagaagtaaactgggtgggtaggaagaggtgaaggctccctcctcagggctgccgggaccgcctcgagggcttgtctgtttaggtcccaattcctcccggatccgtacattcacacgagcgcagggcaacaatctgagcgagtgttcgtgtgtgcccgtgtgactcgccatcgcgtggcagatgttcagtagaacattacagtaatttctgttacaggtccatgggcgcaggtccctgagcccacagcttcgcgggggtctggccgagcatgcgtcacaacctacgcggccaagagcagtgcgcacgcgcaacctaacgcgggactgccagcaacttccgggcgtttacaggcaggcaggtcagtgatgtgtcctaagggtccgaccgacctagatacccctctttgattcctcctcttgggattagtgtccatctctggaagcaggatccaggaggacgggaggggccgctgcggaccgcagtcgctccacctggaggagacaccagaaggaagacagcctgagggacgcagccatccccggctcctaccggcgccccgccccgcgcatgcgcacgcgcacagggagtcagctggctgcgcgggaggtcacgggaagtggggcggtgcccagacagctggagggaaggaggtgtcaggcggggagagacgcaaacggcgggaccagcagcgacggtagcagcagcatggccgcgatctatgggggtgtagagggctgatcgggacagacaagtgtgtggagaggatcaatgagatggtgaacagggccaaacggaaagcaggggtggatcctctggtaccgctgcgaagcttgggcctatctctgagcggtggggaccaggaggacgcggggaggatcctgatcgaggagctgagggaccgatttccctacctgagtgaaagctacttaatcaccaccgatgccgccggctccatcgccacagctacaccggatggtggagttgtgctcatatctggaacaggctccaactgcaggctcatcaaccctgatggctccgagagtggctgcggcggctggggccatatgatgggtgatgagggttcagcctactggatcgcacaccaagcagtgaaaatagtgtttgactccattgacaacctagaggcggctcctcatgatatcggctacgtcaaacaggccatgttccactatttccaggtgccagatcggctagggatactcactcacctgtatagggactttgataaatgcaggtttgctgggttttgccggaaaattgcagaaggtgctcagcagggagaccccctttcccgctatatcttcaggaaggctggggagatgctgggcagacacatcgtagcagtgttgcccgagattgacccggtcttgttccagggcaagattggactccccatcctgtgcgtgggctctgtgtggaagagctgggagctgctgaaggaaggttttcttttggcgctgacccagggcagagagatccaggctcagaacttcttctccagcttcaccctgatgaagctgaggcactcctccgctctgggtggggccagcctaggggccaggcacatcgggcacctcctccccatggactatagcgccaatgccattgccttctattcctacaccttttcctagggggctggtcccggctccaccccctccaagctcagtggacactgggtctgaaaggaaggagtcttttgcttcctttctcctttttacaaaaacaaacatagaagaaaataaatgcactttatccactccccaa

SEQ ID NO: 331992 - DNA, 1785 bp, Homo sapiens
gcctgggaattcagccatctgtgacactgagacagctagcaagtttggactagatgagtttgatgactgcagagggaaagacctccaagacttagtccctggtgtcaaaactgtcataatctcacccagtctcatggcttcagttgccacctacaaactacaaatgtgttggaagagcacagggctttggagagctgctgagaccttggtttgaatcccagctttgctgctcagtatctgcgtaaccctgtgtaggttactcaccttctctaagcctcagtttcctcatttggaaaatgtgaatagtagctacctcagagttgttgggaaagtaaaatggcatgatacattgcaaagtggttagtatagagcctgacccataagcactcattaaatgttagctattatttactcctggttcagatctttctcccaagttgcggtagctccagctactccctggacatatatgtgagatgttctgcagacacaggcaaacctcgtgtataccaaaccaagcttacctctctccatctcccctcaccttgccccgctgcctgatctttctgttaagagcactactgcccttccaagctccaaagctggcattgttgaatcccctctttcttctgtccatccccagtccaggttgttcttataaccacagccttctgaggggtcattgtgtggggagaaaggaggactggggctgggtgaacagggtatggccagatggggagaacaggaatcaggcatcaggagggggcgggggttgagaaaagagctggggctggggctctgcacactcgctcacctcccgcgtggcctagggcctatctctgagcggtggggaccaggaggacgcggggaggatcctgatcgaggagctgagggaccgatttccctacctgagtgaaagctacttaatcaccaccgatgccgccggctccatcgccacagctacaccggatggtggagttgtgctcatatctggaacaggctccaactgcaggctcatcaaccctgatggctccgagagtggctgcggcggctggggccatatgatgggtgatgagggttcagcctactggatcgcacaccaagcagtgaaaatagtgtttgactccattgacaacctagaggcggctcctcatgatatcggctacgtcaaacaggccatgttccactatttccaggtgccagatcggctagggatactcactcacctgtatagggactttgataaatgcaggtttgctgggttttgccggaaaattgcagaaggtgctcagcagggagaccccctttcccgctatatcttcaggaaggctggggagatgctgggcagacacatcgtagcagtgttgcccgagattgacccggtcttgttccagggcaagattggactccccatcctgtgcgtgggctctgtgtggaagagctgggagctgctgaaggaaggttttcttttggcgctgacccagggcagagagatccaggctcagaacttcttctccagcttcaccctgatgaagctgaggcactcctccgctctgggtggggccagcctaggggccaggcacatcgggcacctcctccccatggactatagcgccaatgccattgccttctattcctacaccttttcctagggggctggtcccggctccaccccctccaagctcagtggacactgggtctgaaaggaaggagtcttttgcttcctttctcctttttacaaaaacaaacatagaagaaaataaatgcactttatccactccccaa

SEQ ID NO: 331993 - DNA, 1816 bp, Homo sapiens
tatcatgtagtgatttactttttacttttgtgaattacaacgtggtagggtaggaaatgagaaagcttaaaaagcctaattttctcactaaagcataaccagacacagcagcctattaggggtttctccagaagatggcaggcagtcaagggggacagagttcgacccgcgacaggccaactgatttccccaaaaagatgccaagggcagctaaccgccctcctggcccgcgaagctgctccttgagggcccaaaacttcccggaggagccagaggaggccctcaggagccacagctctccctgacttggcctgtatttgcacccctagggatcccattccctttcccgacgcagcgcaaggaaggggagcggaatgggggctgaaaggcaataaaaaacttgtaaagccgtatctgctagttctcccagtgggctatgtccctgcaaatatcctccacaagaagtaaactgggtgggtaggaagaggtgaaggctccctcctcagggctgccgggaccgcctcgagggcttgtctgtttaggtcccaattcctcccggatccgtacattcacacgagcgcagggcaacaatctgagcgagtgttcgtgtgtgcccgtgtgactcgccatcgcgtggcagatgttcagtagaacattacagtaatttctgttacaggtccatgggcgcaggtccctgagcccacagcttcgcgggggtctggccgagcatgcgtcacaacctacgcggccaagagcagtgcgcacgcgcaacctaacgcgggactgccagcaacttccgggcgtttacaggcaggcagggggaggcacacgatccgaggtccttttagtctcagaggatgggaagatcctggcagaagcagatggactgagcacaaaccactggctgatcgggacagacaagtgtgtggagaggatcaatgagatggtgaacagggccaaacggaaagcaggggtggatcctctggtaccgctgcgaagcttggtggagttgtgctcatatctggaacaggctccaactgcaggctcatcaaccctgatggctccgagagtggctgcggcggctggggccatatgatgggtgatgagggttcagcctactggatcgcacaccaagcagtgaaaatagtgtttgactccattgacaacctagaggcggctcctcatgatatcggctacgtcaaacaggccatgttccactatttccaggtgccagatcggctagggatactcactcacctgtatagggactttgataaatgcaggtttgctgggttttgccggaaaattgcagaaggtgctcagcagggagaccccctttcccgctatatcttcaggaaggctggggagatgctgggcagacacatcgtagcagtgttgcccgagattgacccggtcttgttccagggcaagattggactccccatcctgtgcgtgggctctgtgtggaagagctgggagctgctgaaggaaggttttcttttggcgctgacccagggcagagagatccaggctcagaacttcttctccagcttcaccctgatgaagctgaggcactcctccgctctgggtggggccagcctaggggccaggcacatcgggcacctcctccccatggactatagcgccaatgccattgccttctattcctacaccttttcctagggggctggtcccggctccaccccctccaagctcagtggacactgggtctgaaaggaaggagtcttttgcttcctttctcctttttacaaaaacaaacatagaagaaaataaatgcactttatccactccccaa

SEQ ID NO: 331994 - DNA, 2053 bp, Homo sapiens
tatcatgtagtgatttactttttacttttgtgaattacaacgtggtagggtaggaaatgagaaagcttaaaaagcctaattttctcactaaagcataaccagacacagcagcctattaggggtttctccagaagatggcaggcagtcaagggggacagagttcgacccgcgacaggccaactgatttccccaaaaagatgccaagggcagctaaccgccctcctggcccgcgaagctgctccttgagggcccaaaacttcccggaggagccagaggaggccctcaggagccacagctctccctgacttggcctgtatttgcacccctagggatcccattccctttcccgacgcagcgcaaggaaggggagcggaatgggggctgaaaggcaataaaaaacttgtaaagccgtatctgctagttctcccagtgggctatgtccctgcaaatatcctccacaagaagtaaactgggtgggtaggaagaggtgaaggctccctcctcagggctgccgggaccgcctcgagggcttgtctgtttaggtcccaattcctcccggatccgtacattcacacgagcgcagggcaacaatctgagcgagtgttcgtgtgtgcccgtgtgactcgccatcgcgtggcagatgttcagtagaacattacagtaatttctgttacaggtccatgggcgcaggtccctgagcccacagcttcgcgggggtctggccgagcatgcgtcacaacctacgcggccaagagcagtgcgcacgcgcaacctaacgcgggactgccagcaacttccgggcgtttacaggcaggcaggtcagtgatgtgtcctaagggtccgaccgacctagatacccctctttgattcctcctcttgggattagtgtccatctctggaagcaggatccaggaggacgggaggggccgctgcggaccgcagtcgctccacctggaggagacaccagaaggaagacagcctgagggacgcagccatccccggctcctaccggcgccccgccccgcgcatgcgcacgcgcacagggagtcagctggctgcgcgggaggtcacgggaagtggggcggtgcccagacagctggagggaaggaggtgtcaggcggggagagacgcaaacggcgggaccagcagcgacggtagcagcagcatggccgcgatctatgggggtgtagaggggtggagttgtgctcatatctggaacaggctccaactgcaggctcatcaaccctgatggctccgagagtggctgcggcggctggggccatatgatgggtgatgagggttcagcctactggatcgcacaccaagcagtgaaaatagtgtttgactccattgacaacctagaggcggctcctcatgatatcggctacgtcaaacaggccatgttccactatttccaggtgccagatcggctagggatactcactcacctgtatagggactttgataaatgcaggtttgctgggttttgccggaaaattgcagaaggtgctcagcagggagaccccctttcccgctatatcttcaggaaggctggggagatgctgggcagacacatcgtagcagtgttgcccgagattgacccggtcttgttccagggcaagattggactccccatcctgtgcgtgggctctgtgtggaagagctgggagctgctgaaggaaggttttcttttggcgctgacccagggcagagagatccaggctcagaacttcttctccagcttcaccctgatgaagctgaggcactcctccgctctgggtggggccagcctaggggccaggcacatcgggcacctcctccccatggactatagcgccaatgccattgccttctatatctaactttctaggggtgtccggtcaccctcaatcgggactggctgaggaaggccttggtcctccctttcaaaccaccttagaaaattggtttccccaaaaaaagggggcaaatctcaggcccgtccctgtaaggccgaggtaaacggcgaccggacacctgacttggggaccacgaattgtcttcgctcagaccc

SEQ ID NO: 331995 - DNA, 825 bp, Homo sapiens
attggttcctcaggaccttagaggtgttaaagatgtataagtttgttgggattggaaggacctaccttctgtggtcaaataagttttgggagaaacaaattgatttcttgattgcaggacttctcagagcctttaatttgctaatgtgcattgtgactccccaagggagagttacaatatgcaatattccttggattcctttgaccaaagaaatcttttcaagagcaccccaacccagctactcaggaggctgacgtgggaggattgcttaaggccagcctaggcaacagcaagaccttgtccctaaaaaggaaaaaaaaaaaattacaaaaaaagagcagctcaagaaactataggaaacactttggttaacacaaatctgttctctgtgctgccttcaaactaatctataagaaataatgaagtccatgttagggaacacagataacttttctcaaatgagaaatctcaaatccctgtactttggagttaaaaaaaattattctagcttttccaacagtagagacattaggaaggccaactttggtgggcagattggggattttcctttgcttctgatgactctcttgtgccctttctcctctcaggtgccagatcggctagggatactcactcacctgtatagggactttgataaatgcaggtttgctgggttttgccggaaaattgcagaaggtactggaggtggggggtgggttttatctggctttgttctccaaagatccccagttgggagattgagtggggttcagacaggactgacaacaattttcctctcaccaagtgacctcagttctctgccac

SEQ ID NO: 331996 - DNA, 1833 bp, Homo sapiens
agcggggcggccgccgagcatccgggctcccggcagcggcgctgcggcggctcgcgggagacgctgcgcgcggggctagcgggcggcggagcggacggcgacggggcgctctcgggctgccggcggggccgagcgccgcgcgtcccgagcatggcaggctccctgcctccctgcgtggtggactgtggcaccgggtataccaagcttggctacgcaggcaacactgagccccagttcattattccttcatgtattgccatcagagagtcagcaaaggtagttgaccaagctcaaaggagagtgttgaggggagttgatgaccttgactttttcataggagatgaagccatcgataaacctacatatgctacaaagtggccgatacgacatggaatcattgaagactgggatcttatggaaaggttcatggagcaagtggtttttaaatatcttcgagctgaacctgaggaccattattttttaatgacagaacctccactcaatacaccagaaaacagagagtatcttgcagaaattatgtttgaatcatttaacgtaccaggactctacattgcagttcaggcagtgctggccttggcggcatcttggacatctcgacaagtgggtgaacgtacgttaacggggatagtcattgacagcggagatggagtcacccatgttatcccagtggcagaaggttatgtaattggaagctgcatcaaacacatcccgattgcaggtagagatattacgtatttcattcaacagctgctaagggagagggaggtgggaatccctcctgagcagtcactggagaccgcaaaagccattaaggagaaatactgttacatttgccccgatatagtcaaggaatttgccaagtatgatgtggatccccggaagtggatcaaacagtacacgggtatcaatgcgatcaaccagaagaagtttgttatagacgttggttacgaaagattcctgggacctgaaatattctttcacccggagtttgccaacccagactttatggagtccatctcagatgttgttgatgaagtaatacagaactgccccatcgatgtgcggcgcccgctgtataagaatgtcgtactctcaggaggctccaccatgttcagggatttcggacgccgactgcagagggatttgaagagagtggtggatgctaggctgaggctcagcgaggagctcagcggcgggaggatcaagccgaagcctgtggaggtccaggtggtcacgcatcacatgcagcgctacgccgtgtggttcggaggctccatgctggcctcgactcccgagttctttcaggtctgccacaccaagaaggactatgaagagtacgggcccagcatctgccgccacaaccccgtctttggagtcatgtcctagtgtctgcctgaacgcgtcgttcgatggtgtcacgttggggaacaagtgtccttcagaacccagagaaggccgccgttctgtaaatagcgacgtcggtgttgctgcccagcagcgtgcttgcattgccggtgcatgaggcgcggcgcgggcccttcagtaaaagccatttatccgtgtgccgaccgctgtctgccagcctcctccttctcccgccctcctcaccctcgctctccctcctcctcctcctccgagctgctagctgacaaatacaattctgaaggaatccaaatgtgactttgaaaattgttagagaaaacaacattagaaaatggcgcaaaatcgttaggtcccaggagagaatgtgggggcgcaaacccttttcctcccagcctatttttgtaaataaaatgtttaaacttgaaatac

SEQ ID NO: 331997 - DNA, 2557 bp, Homo sapiens
agcggggcggccgccgagcatccgggctcccggcagcggcgctgcggcggctcgcgggagacgctgcgcgcggggctagcgggcggcggagcggacggcgacggggcgctctcgggctgccggcggggccgagcgccgcgcgtcccgagcatggcaggctccctgcctccctgcgtggtggactgtggcaccgggtataccaagcttggctacgcaggcaacactgagccccagttcattattccttcatgtattgccatcagagagtcagcaaaggtagttgaccaagctcaaaggagagtgttgaggggagttgatgaccttgactttttcataggagatgaagccatcgataaacctacatatgctacaaagtggccgatacgacatggaatcattgaagactgggatcttatggaaaggttcatggagcaagtggtttttaaatatcttcgagctgaacctgaggaccattattttttaatgacagaacctccactcaatacaccagaaaacagagagtatcttgcagaaattatgtttgaatcatttaacgtaccaggactctacattgcagttcaggcagtgctggccttggcggcatcttggacatctcgacaagtgggtgaacgtacgttaacggggatagtcattgacagcggagatggagtcacccatgttatcccagtggcagaaggttatgtaattggaagctgcatcaaacacatcccgattgcaggtagagatattacgtatttcattcaacagctgctaagggagagggaggtgggaatccctcctgagcagtcactggagaccgcaaaagccattaaggagaaatactgttacatttgccccgatatagtcaaggaatttgccaagtatgatgtggatccccggaagtggatcaaacagtacacgggtatcaatgcgatcaaccagaagaagtttgttatagacgttggttacgaaagattcctgggacctgaaatattctttcacccggagtttgccaacccagactttatggagtccatctcagatgttgttgatgaagtaatacagaactgccccatcgatgtgcggcgcccgctgtataagaatgtcgtactctcaggaggctccaccatgttcagggatttcggacgccgactgcagagggatttgaagagagtggtggatgctaggctgaggctcagcgaggagctcagcggcgggaggatcaagccgaagcctgtggaggtccaggtggtcacgcatcacatgcagcgctacgccgtgtggttcggaggctccatgctggcctcgactcccgagttctttcaggtctgccacaccaagaaggactatgaagagtacgggcccagcatctgccgccacaaccccgtctttggagtcatgtcctagtgtctgcctgaacgcgtcgttcgatggtgtcacgttggggaacaagtgtccttcagaacccagagaaggccgccgttctgtaaatagcgacgtcggtgttgctgcccagcagcgtgcttgcattgccggtgcatgaggcgcggcgcgggcccttcagtaaaagccatttatccgtgtgccgaccgctgtctgccagcctcctccttctcccgccctcctcaccctcgctctccctcctcctcctcctccgagctgctagctgacaaatacaattctgaaggaatccaaatgtgactttgaaaattgttagagaaaacaacattagaaaatggcgcaaaatcgttaggtcccaggagagaatgtgggggcgcaaacccttttcctcccagcctatttttgtaaataaaatgtttaaacttgaaatacaaatcgatgtttatatttcctatcattttgtattttatggtatttggtacaactggctgatactaagcacgaatagatattgatgttatggagtgctgtaatccaaagtttttaattgtgaggcatgttctgatatgtttataggcaaacaaataaaacagcaaacttttttgccacatgtttgctagaaaatgattatactttattggagtgacatgaagtttgaacactaaacagtaatgtatgagaattactacagatacatgtatcttttagttttttttgtttgaactttctggagctgttttatagaagatgatggtttgttgtcggtgagtgttggatgaaatacttccttgcaccattgtaataaaagctgttagaatatttgtaaatatctttctgctgtagtgtggtggtctgttggttttctccctgtcgctgtgcctcctttaaagaatattgacattgttttacatcattggagaatttgattaatactcagcttgtgggaggaaatgtcttttcgcgaatggtgtgggctgcctgccccgcagtgaccactccatcgctgggggtatcgtgggtctggataacccgtcagagatggtttttgaatctggggtatagtgggaaggagtgcctaatgatttctgatgttccttcctagaagttcaggattcatgactgtaagctttcagtaactactctgatgtttgctgaa

SEQ ID NO: 331998 - DNA, 2499 bp, Homo sapiens
agcggggcggccgccgagcatccgggctcccggcagcggcgctgcggcggctcgcgggagacgctgcgcgcggggctagcgggcggcggagcggacggcgacggggcgctctcgggctgccggcggggccgagcgccgcgcgtcccgagcatggcaggctccctgcctccctgcgtggtggactgtggcaccgggtataccaagcttggctacgcaggcaacactgagccccagttcattattccttcatgtattgccatcagagagtcagcaaaggtagttgaccaagctcaaaggagagtgttgaggggagttgatgaccttgactttttcataggagatgaagccatcgataaacctacatatgctacaaagtggccgatacgacatggaatcattgaagactgggatcttatggaaaggttcatggagcaagtggtttttaaatatcttcgagctgaacctgaggaccattattttttaatggggtaactatctccttcctgctgtaatcagtgaccagacagaacctccactcaatacaccagaaaacagagagtatcttgcagaaattatgtttgaatcatttaacgtaccaggactctacattgcagttcaggcagtgctggccttggcggcatcttggacatctcgacaagtgggtgaacgtacgttaacggggatagtcattgacagcggagatggagtcacccatgttatcccagtggcagaaggttatgtaattggaagctgcatcaaacacatcccgattgcaggagaaatactgttacatttgccccgatatagtcaaggaatttgccaagtatgatgtggatccccggaagtggatcaaacagtacacgggtatcaatgcgatcaaccagaagaagtttgttatagacgttggttacgaaagattcctgggacctgaaatattctttcacccggagtttgccaacccagactttatggagtccatctcagatgttgttgatgaagtaatacagaactgccccatcgatgtgcggcgcccgctgtataagaatgtcgtactctcaggaggctccaccatgttcagggatttcggacgccgactgcagagggatttgaagagagtggtggatgctaggctgaggctcagcgaggagctcagcggcgggaggatcaagccgaagcctgtggaggtccaggtggtcacgcatcacatgcagcgctacgccgtgtggttcggaggctccatgctggcctcgactcccgagttctttcaggtctgccacaccaagaaggactatgaagagtacgggcccagcatctgccgccacaaccccgtctttggagtcatgtcctagtgtctgcctgaacgcgtcgttcgatggtgtcacgttggggaacaagtgtccttcagaacccagagaaggccgccgttctgtaaatagcgacgtcggtgttgctgcccagcagcgtgcttgcattgccggtgcatgaggcgcggcgcgggcccttcagtaaaagccatttatccgtgtgccgaccgctgtctgccagcctcctccttctcccgccctcctcaccctcgctctccctcctcctcctcctccgagctgctagctgacaaatacaattctgaaggaatccaaatgtgactttgaaaattgttagagaaaacaacattagaaaatggcgcaaaatcgttaggtcccaggagagaatgtgggggcgcaaacccttttcctcccagcctatttttgtaaataaaatgtttaaacttgaaatacaaatcgatgtttatatttcctatcattttgtattttatggtatttggtacaactggctgatactaagcacgaatagatattgatgttatggagtgctgtaatccaaagtttttaattgtgaggcatgttctgatatgtttataggcaaacaaataaaacagcaaacttttttgccacatgtttgctagaaaatgattatactttattggagtgacatgaagtttgaacactaaacagtaatgtatgagaattactacagatacatgtatcttttagttttttttgtttgaactttctggagctgttttatagaagatgatggtttgttgtcggtgagtgttggatgaaatacttccttgcaccattgtaataaaagctgttagaatatttgtaaatatctttctgctgtagtgtggtggtctgttggttttctccctgtcgctgtgcctcctttaaagaatattgacattgttttacatcattggagaatttgattaatactcagcttgtgggaggaaatgtcttttcgcgaatggtgtgggctgcctgccccgcagtgaccactccatcgctgggggtatcgtgggtctggataacccgtcagagatggtttttgaatctggggtatagtgggaaggagtgcctaatgatttctgatgttccttcctagaagttcaggattcatgactgtaagctttcagtaactactctgatgtttgctgaa

SEQ ID NO: 331999 - DNA, 1623 bp, Homo sapiens
agcggggcggccgccgagcatccgggctcccggcagcggcgctgcggcggctcgcgggagacgctgcgcgcggggctagcgggcggcggagcggacggcgacggggcgctctcgggctgccggcggggccgagcgccgcgcgtcccgagcatggcaggctccctgcctccctgcgtggtggactgtggcaccgggtataccaagcttggctacgcaggcaacactgagccccagttcattattccttcatgtattgccatcagagagtcagcaaaggtagttgaccaagctcaaaggagagtgttgaggggagttgatgaccttgactttttcataggagatgaagccatcgataaacctacatatgctacaaagtggccgatacgacatggaatcattgaagactgggatcttatggaaaggttcatggagcaagtggtttttaaatatcttcgagctgaacctgaggaccattattttttaatgacagaacctccactcaatacaccagaaaacagagagtatcttgcagaaattatgtttgaatcatttaacgtaccaggactctacattgcagttcaggcagtgctggccttggcggcatcttggacatctcgacaagtgggtgaacgtacgttaacggggatagtcattgacagcggagatggagtcacccatgttatcccagtggcagaaggttatgtaattggaagctgcatcaaacacatcccgattgcaggtagagatattacgtatttcattcaacagctgctaagggagagggaggtgggaatccctcctgagcagtcactggagaccgcaaaagccattaaggagaaatactgttacatttgccccgatatagtcaaggaatttgccaagtatgatgtggatccccggaagtggatcaaacagtacacgggtatcaatgcgatcaaccagaagaagtttgttatagacgttggttacgaaagattcctgggacctgaaatattctttcacccggagtttgccaacccagactttatggagtccatctcagatgttgttgatgaagtaatacagaactgccccatcgatgtgcggcgcccgctgtataagcccgagttctttcaggtctgccacaccaagaaggactatgaagagtacgggcccagcatctgccgccacaaccccgtctttggagtcatgtcctagtgtctgcctgaacgcgtcgttcgatggtgtcacgttggggaacaagtgtccttcagaacccagagaaggccgccgttctgtaaatagcgacgtcggtgttgctgcccagcagcgtgcttgcattgccggtgcatgaggcgcggcgcgggcccttcagtaaaagccatttatccgtgtgccgaccgctgtctgccagcctcctccttctcccgccctcctcaccctcgctctccctcctcctcctcctccgagctgctagctgacaaatacaattctgaaggaatccaaatgtgactttgaaaattgttagagaaaacaacattagaaaatggcgcaaaatcgttaggtcccaggagagaatgtgggggcgcaaacccttttcctcccagcctatttttgtaaataaaatgtttaaacttgaaatac

SEQ ID NO: 332000 - DNA, 1495 bp, Homo sapiens
cggttttacccagggctccctctgctttgtgtcttgtagaatgtcgtactctcaggaggctccaccatgttcagggatttcggacgccgactgcagagggatttgaagagagtggtggatgctaggctgaggctcagcgaggagctcagcggcgggaggatcaagccgaagcctgtggaggtccaggtggtcacgcatcacatgcagcgctacgccgtgtggttcggaggctccatgctggcctcgactcccgagttctttcaggtctgccacaccaagaaggactatgaagagtacgggcccagcatctgccgccacaaccccgtctttggagtcatgtcctagtgtctgcctgaacgcgtcgttcgatggtgtcacgttggggaacaagtgtccttcagaacccagagaaggccgccgttctgtaaatagcgacgtcggtgttgctgcccagcagcgtgcttgcattgccggtgcatgaggcgcggcgcgggcccttcagtaaaagccatttatccgtgtgccgaccgctgtctgccagcctcctccttctcccgccctcctcaccctcgctctccctcctcctcctcctccgagctgctagctgacaaatacaattctgaaggaatccaaatgtgactttgaaaattgttagagaaaacaacattagaaaatggcgcaaaatcgttaggtcccaggagagaatgtgggggcgcaaacccttttcctcccagcctatttttgtaaataaaatgtttaaacttgaaatacaaatcgatgtttatatttcctatcattttgtattttatggtatttggtacaactggctgatactaagcacgaatagatattgatgttatggagtgctgtaatccaaagtttttaattgtgaggcatgttctgatatgtttataggcaaacaaataaaacagcaaacttttttgccacatgtttgctagaaaatgattatactttattggagtgacatgaagtttgaacactaaacagtaatgtatgagaattactacagatacatgtatcttttagttttttttgtttgaactttctggagctgttttatagaagatgatggtttgttgtcggtgagtgttggatgaaatacttccttgcaccattgtaataaaagctgttagaatatttgtaaatatctttctgctgtagtgtggtggtctgttggttttctccctgtcgctgtgcctcctttaaagaatattgacattgttttacatcattggagaatttgattaatactcagcttgtgggaggaaatgtcttttcgcgaatggtgtgggctgcctgccccgcagtgaccactccatcgctgggggtatcgtgggtctggataacccgtcagagatggtttttgaatctggggtatagtgggaaggagtgcctaatgatttctgatgttccttcctagaagttcaggattcatgactgtaagctttcagtaactactctgatgtttgctgaa

SEQ ID NO: 332001 - DNA, 1382 bp, Homo sapiens
agcggggcggccgccgagcatccgggctcccggcagcggcgctgcggcggctcgcgggagacgctgcgcgcggggctagcgggcggcggagcggacggcgacggggcgctctcgggctgccggcggggccgagcgccgcgcgtcccgagcatggcaggctccctgcctccctgcgtggtggactgtggcaccgggtataccaagcttggctacgcaggcaacactgagccccagttcattattccttcatgtattgccatcagagagtcagcaaaggtagttgaccaagctcaaaggagagtgttgaggggagttgatgaccttgactttttcataggagatgaagccatcgataaacctacatatgctacaaagtggccgatacgacatggaatcattgaagactgggatcttatggaaaggttcatggagcaagtggtttttaaatatcttcgagctgaacctgaggaccattattttttaatgacagaacctccactcaatacaccagaaaacagagagtatcttgcagaaattatgtttgaatcatttaacgtaccaggactctacattgcagttcaggcagtgctggccttggcggcatcttggacatctcgacaagtgggtgaacgtacgttaacggggatagtcattgacagcggagatggagtcacccatgttatcccagtggcagaaggttatgtaattggaagctgcatcaaacacatcccgattgcaggtagagatattacgtatttcattcaacagctgctaagggagagggaggtgggaatccctcctgagcagtcactggagaccgcaaaagccattaaggagaaatactgttacatttgccccgatatagtcaaggaatttgccaagtatgatgtggatccccggaagtggatcaaacagtacacgggtatcaatgcgatcaaccagaagaagtttgttatagacgttggttacgaaagattcctgggacctgaaatattctttcacccggagtttgccaacccagactttatggagtccatctcagatgttgttgatgaagtaatacagaactgccccatcgatgtgcggcgcccgctgtataagaatgtcgtactctcaggaggctccaccatgttcagggatttcggacgccgactgcagagggatttgaagagagtggtggatgctaggctgaggctcagcgaggagctcagcggcgggaggatcaagccgaagcctgtggaggtccaggtggtcacgcatcacatgcagcgctacgccgtgtggttcggaggctccatgctggcctcgactccacgagttctttcaggtctgccaaccagccgagctgcatgcctgggtataagctcgggtcggaatatgta

SEQ ID NO: 332002 - DNA, 1112 bp, Homo sapiens
agcggggcggccgccgagcatccgggctcccggcagcggcgctgcggcggctcgcgggagacgctgcgcgcggggctagcgggcggcggagcggacggcgacggggcgctctcgggctgccggcggggccgagcgccgcgcgtcccgagcatggcaggctccctgcctccctgcgtggtggactgtggcaccgggtataccaagcttggctacgcaggcaacactgagccccagttcattattccttcatgtattgccatcagagagtcagcaaaggtagttgaccaagctcaaaggagagtgttgaggggagttgatgaccttgactttttcataggagatgaagccatcgataaacctacatatgctacaaagtggccgatacgacatggaatcattgaagactgggatcttatggaaaggttcatggagcaagtggtttttaaatatcttcgagctgaacctgaggaccattattttttaatggggtaactatctccttcctgctgtaatcagtgaccagacagaacctccactcaatacaccagaaaacagagagtatcttggacatctcgacaagtgggtgaacgtacgttaacggggatagtcattgacagcggagatggagtcacccatgttatcccagtggcagaaggttatgtaattggaagctgcatcaaacacatcccgattgcaggagaaatactgttacatttgccccgatatagtcaaggaatttgccaagtatgatgtggatccccggaagtggatcaaacagtacacgggtatcaatgcgatcaaccagaagaagtttgttatagacgttggttacgaaagattcctgggacctgaaatattctttcacccggagtttgccaacccagactttatggagtccatctcagatgttgttgatgaagtaatacagaactgccccatcgatgtgcggcgcccgctgtataagactgtggctgaccatgggtaactgacaccgtggagcgggagccgcagataatggggggctgctggaaatggagtgctccgcgtgttctctgtttccggcttccttcactcggtgcttttgaggtgtgcatgtcatttgacccttcttt

SEQ ID NO: 332003 - DNA, 2501 bp, Homo sapiens
agcggggcggccgccgagcatccgggctcccggcagcggcgctgcggcggctcgcgggagacgctgcgcgcggggctagcgggcggcggagcggacggcgacggggcgctctcgggctgccggcggggccgagcgccgcgcgtcccgagcatggcaggctccctgcctccctgcgtggtggactgtggcaccgggtattgccatcagagagtcagcaaaggtagttgaccaagctcaaaggagagtgttgaggggagttgatgaccttgactttttcataggagatgaagccatcgataaacctacatatgctacaaagtggccgatacgacatggaatcattgaagactgggatcttatggaaaggttcatggagcaagtggtttttaaatatcttcgagctgaacctgaggaccattattttttaatgacagaacctccactcaatacaccagaaaacagagagtatcttgcagaaattatgtttgaatcatttaacgtaccaggactctacattgcagttcaggcagtgctggccttggcggcatcttggacatctcgacaagtgggtgaacgtacgttaacggggatagtcattgacagcggagatggagtcacccatgttatcccagtggcagaaggttatgtaattggaagctgcatcaaacacatcccgattgcaggtagagatattacgtatttcattcaacagctgctaagggagagggaggtgggaatccctcctgagcagtcactggagaccgcaaaagccattaaggagaaatactgttacatttgccccgatatagtcaaggaatttgccaagtatgatgtggatccccggaagtggatcaaacagtacacgggtatcaatgcgatcaaccagaagaagtttgttatagacgttggttacgaaagattcctgggacctgaaatattctttcacccggagtttgccaacccagactttatggagtccatctcagatgttgttgatgaagtaatacagaactgccccatcgatgtgcggcgcccgctgtataagaatgtcgtactctcaggaggctccaccatgttcagggatttcggacgccgactgcagagggatttgaagagagtggtggatgctaggctgaggctcagcgaggagctcagcggcgggaggatcaagccgaagcctgtggaggtccaggtggtcacgcatcacatgcagcgctacgccgtgtggttcggaggctccatgctggcctcgactcccgagttctttcaggtctgccacaccaagaaggactatgaagagtacgggcccagcatctgccgccacaaccccgtctttggagtcatgtcctagtgtctgcctgaacgcgtcgttcgatggtgtcacgttggggaacaagtgtccttcagaacccagagaaggccgccgttctgtaaatagcgacgtcggtgttgctgcccagcagcgtgcttgcattgccggtgcatgaggcgcggcgcgggcccttcagtaaaagccatttatccgtgtgccgaccgctgtctgccagcctcctccttctcccgccctcctcaccctcgctctccctcctcctcctcctccgagctgctagctgacaaatacaattctgaaggaatccaaatgtgactttgaaaattgttagagaaaacaacattagaaaatggcgcaaaatcgttaggtcccaggagagaatgtgggggcgcaaacccttttcctcccagcctatttttgtaaataaaatgtttaaacttgaaatacaaatcgatgtttatatttcctatcattttgtattttatggtatttggtacaactggctgatactaagcacgaatagatattgatgttatggagtgctgtaatccaaagtttttaattgtgaggcatgttctgatatgtttataggcaaacaaataaaacagcaaacttttttgccacatgtttgctagaaaatgattatactttattggagtgacatgaagtttgaacactaaacagtaatgtatgagaattactacagatacatgtatcttttagttttttttgtttgaactttctggagctgttttatagaagatgatggtttgttgtcggtgagtgttggatgaaatacttccttgcaccattgtaataaaagctgttagaatatttgtaaatatctttctgctgtagtgtggtggtctgttggttttctccctgtcgctgtgcctcctttaaagaatattgacattgttttacatcattggagaatttgattaatactcagcttgtgggaggaaatgtcttttcgcgaatggtgtgggctgcctgccccgcagtgaccactccatcgctgggggtatcgtgggtctggataacccgtcagagatggtttttgaatctggggtatagtgggaaggagtgcctaatgatttctgatgttccttcctagaagttcaggattcatgactgtaagctttcagtaactactctgatgtttgctgaa

SEQ ID NO: 332004 - DNA, 2411 bp, Homo sapiens
agcggggcggccgccgagcatccgggctcccggcagcggcgctgcggcggctcgcgggagacgctgcgcgcggggctagcgggcggcggagcggacggcgacggggcgctctcgggctgccggcggggccgagcgccgcgcgtcccgagcatggcaggctccctgcctccctgcgtggtggactgtggcaccgggtataccaagcttggctacgcaggcaacactgagccccagttcattattccttcatgtattgccatcagagagtcagcaaaggtagttgaccaagctcaaaggagagtgttgaggggagttgatgaccttgactttttcataggagatgaagccatcgataaacctacatatgctacaaagtggccgatacgacatggaatcattgaagactgggatcttatggaaaggttcatggagcaagtggtttttaaatatcttcgagctgaacctgaggaccattattttttaatgacagaacctccactcaatacaccagaaaacagagagtatcttgcagaaattatgtttgaatcatttaacgtaccaggactctacattgcagttcaggcagtgctggccttggcggcatcttggacatctcgacaagtgggtgaacgtacgttaacggggatagtcattgacagcggagatggagtcacccatgttatcccagtggcagaaggttatgtaattggaagctgcatcaaacacatcccgattgcaggtagagatattacgtatttcattcaacagctgctaagggagagggaggtgggaatccctcctgagcagtcactggagaccgcaaaagccattaaggagaaatactgttacatttgccccgatatagtcaaggaatttgccaatggagtccatctcagatgttgttgatgaagtaatacagaactgccccatcgatgtgcggcgcccgctgtataagaatgtcgtactctcaggaggctccaccatgttcagggatttcggacgccgactgcagagggatttgaagagagtggtggatgctaggctgaggctcagcgaggagctcagcggcgggaggatcaagccgaagcctgtggaggtccaggtggtcacgcatcacatgcagcgctacgccgtgtggttcggaggctccatgctggcctcgactcccgagttctttcaggtctgccacaccaagaaggactatgaagagtacgggcccagcatctgccgccacaaccccgtctttggagtcatgtcctagtgtctgcctgaacgcgtcgttcgatggtgtcacgttggggaacaagtgtccttcagaacccagagaaggccgccgttctgtaaatagcgacgtcggtgttgctgcccagcagcgtgcttgcattgccggtgcatgaggcgcggcgcgggcccttcagtaaaagccatttatccgtgtgccgaccgctgtctgccagcctcctccttctcccgccctcctcaccctcgctctccctcctcctcctcctccgagctgctagctgacaaatacaattctgaaggaatccaaatgtgactttgaaaattgttagagaaaacaacattagaaaatggcgcaaaatcgttaggtcccaggagagaatgtgggggcgcaaacccttttcctcccagcctatttttgtaaataaaatgtttaaacttgaaatacaaatcgatgtttatatttcctatcattttgtattttatggtatttggtacaactggctgatactaagcacgaatagatattgatgttatggagtgctgtaatccaaagtttttaattgtgaggcatgttctgatatgtttataggcaaacaaataaaacagcaaacttttttgccacatgtttgctagaaaatgattatactttattggagtgacatgaagtttgaacactaaacagtaatgtatgagaattactacagatacatgtatcttttagttttttttgtttgaactttctggagctgttttatagaagatgatggtttgttgtcggtgagtgttggatgaaatacttccttgcaccattgtaataaaagctgttagaatatttgtaaatatctttctgctgtagtgtggtggtctgttggttttctccctgtcgctgtgcctcctttaaagaatattgacattgttttacatcattggagaatttgattaatactcagcttgtgggaggaaatgtcttttcgcgaatggtgtgggctgcctgccccgcagtgaccactccatcgctgggggtatcgtgggtctggataacccgtcagagatggtttttgaatctggggtatagtgggaaggagtgcctaatgatttctgatgttccttcctagaagttcaggattcatgactgtaagctttcagtaactactctgatgtttgctgaa

SEQ ID NO: 332005 - DNA, 2355 bp, Homo sapiens
agcggggcggccgccgagcatccgggctcccggcagcggcgctgcggcggctcgcgggagacgctgcgcgcggggctagcgggcggcggagcggacggcgacggggcgctctcgggctgccggcggggccgagcgccgcgcgtcccgagcatggcaggctccctgcctccctgcgtggtggactgtggcaccgggtattgccatcagagagtcagcaaaggtagttgaccaagctcaaaggagagtgttgaggggagttgatgaccttgactttttcataggagatgaagccatcgataaacctacatatgctacaaagtggccgatacgacatggaatcattgaagactgggatcttatggaaaggttcatggagcaagtggtttttaaatatcttcgagctgaacctgaggaccattattttttaatgacagaacctccactcaatacaccagaaaacagagagtatcttgcagaaattatgtttgaatcatttaacgtaccaggactctacattgcagttcaggcagtgctggccttggcggcatcttggacatctcgacaagtgggtgaacgtacgttaacggggatagtcattgacagcggagatggagtcacccatgttatcccagtggcagaaggttatgtaattggaagctgcatcaaacacatcccgattgcaggtagagatattacgtatttcattcaacagctgctaagggagagggaggtgggaatccctcctgagcagtcactggagaccgcaaaagccattaaggagaaatactgttacatttgccccgatatagtcaaggaatttgccaatggagtccatctcagatgttgttgatgaagtaatacagaactgccccatcgatgtgcggcgcccgctgtataagaatgtcgtactctcaggaggctccaccatgttcagggatttcggacgccgactgcagagggatttgaagagagtggtggatgctaggctgaggctcagcgaggagctcagcggcgggaggatcaagccgaagcctgtggaggtccaggtggtcacgcatcacatgcagcgctacgccgtgtggttcggaggctccatgctggcctcgactcccgagttctttcaggtctgccacaccaagaaggactatgaagagtacgggcccagcatctgccgccacaaccccgtctttggagtcatgtcctagtgtctgcctgaacgcgtcgttcgatggtgtcacgttggggaacaagtgtccttcagaacccagagaaggccgccgttctgtaaatagcgacgtcggtgttgctgcccagcagcgtgcttgcattgccggtgcatgaggcgcggcgcgggcccttcagtaaaagccatttatccgtgtgccgaccgctgtctgccagcctcctccttctcccgccctcctcaccctcgctctccctcctcctcctcctccgagctgctagctgacaaatacaattctgaaggaatccaaatgtgactttgaaaattgttagagaaaacaacattagaaaatggcgcaaaatcgttaggtcccaggagagaatgtgggggcgcaaacccttttcctcccagcctatttttgtaaataaaatgtttaaacttgaaatacaaatcgatgtttatatttcctatcattttgtattttatggtatttggtacaactggctgatactaagcacgaatagatattgatgttatggagtgctgtaatccaaagtttttaattgtgaggcatgttctgatatgtttataggcaaacaaataaaacagcaaacttttttgccacatgtttgctagaaaatgattatactttattggagtgacatgaagtttgaacactaaacagtaatgtatgagaattactacagatacatgtatcttttagttttttttgtttgaactttctggagctgttttatagaagatgatggtttgttgtcggtgagtgttggatgaaatacttccttgcaccattgtaataaaagctgttagaatatttgtaaatatctttctgctgtagtgtggtggtctgttggttttctccctgtcgctgtgcctcctttaaagaatattgacattgttttacatcattggagaatttgattaatactcagcttgtgggaggaaatgtcttttcgcgaatggtgtgggctgcctgccccgcagtgaccactccatcgctgggggtatcgtgggtctggataacccgtcagagatggtttttgaatctggggtatagtgggaaggagtgcctaatgatttctgatgttccttcctagaagttcaggattcatgactgtaagctttcagtaactactctgatgtttgctgaa

SEQ ID NO: 332006 - DNA, 1414 bp, Homo sapiens
agcggggcggccgccgagcatccgggctcccggcagcggcgctgcggcggctcgcgggagacgctgcgcgcggggctagcgggcggcggagcggacggcgacggggcgctctcgggctgccggcggggccgagcgccgcgcgtcccgagcatggcaggctccctgcctccctgcgtggtggactgtggcaccgggtataccaagcttggctacgcaggcaacactgagccccagttcattattccttcatgtattgccatcagagagtcagcaaaggtagttgaccaagctcaaaggagagtgttgaggggagttgatgaccttgactttttcataggagatgaagccatcgataaacctacatatgctacaaagtggccgatacgacatggaatcattgaagactgggatcttatggaaaggttcatggagcaagtggtttttaaatatcttcgagctgaacctgaggaccattattttttaatgacagaacctccactcaatacaccagaaaacagagagtatcttgcagaaattatgtttgaatcatttaacgtaccaggactctacattgcagttcaggcagtgctggccttggcggcatcttggacatctcgacaagtgggtgaacgtacgttaacggggatagtcattgacagcggagatggagtcacccatgttatcccagtggcagaaggttatgtaattggaagctgcatcaaacacatcccgattgcaggtagagatattacgtatttcattcaacagctgctaagggagagggaggtgggaatccctcctgagcagtcactggagaccgcaaaagccattaaggagaaatactgttacatttgccccgatatagtcaaggaatttgccaagtatgatgtggatccccggaagtggatcaaacagtacacgggtatcaatgcgatcaaccagaagaagtttgttatagacgttggttacgaaagattcctgggacctgaaatattctttcacccggagtttgccaacccagactttatggagtccatctcagatgttgttgatgaagtaatacagaactgccccatcgatgtgcggcgcccgctgtataagaatgtcgtactctcaggaggctccaccatgttcagggatttcggacgccgactgcagagggatttgaagagagtggtggatgctaggctgaggctcagcgaggagctcagcggcgggaggatcaagccgaagcctgtggaggtccaggtggtcacgcatcacatgcagcgctacgccgtgtggttcggaggctccatgctggcctcgactgtaagtccctctctcgagggctctgtgtctccattcctgtgctctcggttgagtttgggtaaatactgtctacgaaggtgaaatagtgtgtgccctaatcgtg

SEQ ID NO: 332007 - DNA, 1154 bp, Homo sapiens
agcggggcggccgccgagcatccgggctcccggcagcggcgctgcggcggctcgcgggagacgctgcgcgcggggctagcgggcggcggagcggacggcgacggggcgctctcgggctgccggcggggccgagcgccgcgcgtcccgagcatggcaggctccctgcctccctgcgtggtggactgtggcaccgggtataccaagcttggctacgcaggcaacactgagccccagttcattattccttcatgtattgccatcagagagtcagcaaaggtagttgaccaagctcaaaggagagtgttgaggggagttgatgaccttgactttttcataggagatgaagccatcgataaacctacatatgctacaaagtggccgatacgacatggaatcattgaagactgggatcttatggaaaggttcatggagcaagtggtttttaaatatcttcgagctgaacctgaggaccattattttttaatgacagaacctccactcaatacaccagaaaacagagagtatcttgcagaaattatgtttgaatcatttaacgtaccaggactctacattgcagttcaggcagtgctggccttggcggcatcttggacatctcgacaagtgggtgaacgtacgttaacggggatagtcattgacagcggagatggagtcacccatgttatcccagtggcagaaggttatgtaattggaagctgcatcaaacacatcccgattgcaggagaaatactgttacatttgccccgatatagtcaaggaatttgccaagtatgatgtggatccccggaagtggatcaaacagtacacgggtatcaatgcgatcaaccagaagaagtttgttatagacgttggttacgaaagattcctgggacctgaaatattctttcacccggagtttgccaacccagactttatggagtccatctcagatgttgttgatgaagtaatacagaactgccccatcgatgtgcggcgcccgctgtataagactgtggctgaccatgggtaactgacaccgtggagcgggagccgcagataatggggggctgctggaaatggagtgctccgcgtgttctctgtttccggcttccttcactcggtgcttttgaggtgtgcatgtcatttgacccttcttt

SEQ ID NO: 332008 - DNA, 420 bp, Homo sapiens
gtgttctttgagtctccagcaccaacttccccttcttggtcttttgctaatttcacaggaaatgattgtttttcctccacagttcctgtgtccttctggtcactaacccattccaccattgttgtgggaattagggaactaggttagtccctgtttctatggacacatcctctctcttctagatgatgaaactctctgcaaagccaggcttagcctttagccactggggcttcctgcgctctcagggtgtctgatctcagccccacccgccagagctcatctctggctagcctgggatctgtatcagcagcagcccagtggggtccatttccatcgtatctctatgccttagttcttcccttctcacccatgtgttctccagaatatttctctttatttcatgggcttttcacatagctg

SEQ ID NO: 332009 - DNA, 227 bp, Homo sapiens
acagctgcatcatttctcattctcttctacctaaccttcgatgctgatgcctctgttccctctttggattctgtcactgccgctggatccttaggatttgactcctcataactgaacatcttgtcacttgtctatcttatcatttctactcctttttttaagctttgacctacttgtacatgaactcgtaccctaatatccattctcctatctaatcttcacatctc

SEQ ID NO: 332010 - DNA, 1899 bp, Homo sapiens
tcaatcataaaaattttttaatttttaaaaagatttaacaagttaacataaaattaaagtggtggctacaaaaaggccagagctgtgtttaaaagtttacaggagagccgaccattttcagttgactttttcaggaaaatgattcagtttgaaaaggagcaagaatcctgcaatatggcgaacataagagaatattatgagagagctttgagagagtttggatccgcagattctgatctttggatggattatatgaaagaagaattgaaccacccccttggtagacctgagaactgtggacagatctactggcgagcgatgaaaatgttgcagggagagtcagcagaggcatttgtagctaaacatgctatgcatcagactggccatttatgaagatgaagaatacagtcagctttgtgaaatagtattgcaagcaagccccgtgggcaaatttgtattgagtccatctgtaatttgctcagtgatggcagacaagatggctgtctggttttgagacacactttaattttatgttaacttgttaaatctttttaaaaattaaaaaatttttatgattgagactgggtcttgctctgttgccctggctggtcttgaactcctggactcaagtgaccttctcacctcagactcctgagtagctgggattataggtgcatgacactgctcagtttgatgtgctaatctgattccagtaaagagaattgctgatttaatgttgaggcccgatcttccacaggtcctaaatgtttcccaaaatacatggatagcatacgactgggtttttttaaaattatcccaggtcaagcatgagtatctctaatctcgacctaagagccagttaaaatgaaggagaaagtggccaggcatggtgactcaacgcctgtaatcccagcactttgggaaggctgaggcaggcggatcacctgaggtcaggagtttgagactagcctggccaacatggtgaaaccccgtctctactaaaaatacaaaaattagccaggtgtggtggtgggtgcctgtaatcccagctgcttgggaggctgaggcaggagaattgcttgaacctgggagacggaggttgcagtgagccgagatcatgccattgctactccatcctgggtaagaagagcgaaactccttctcaaggaaaaaaaaaaaggagaaagtacagttttgttggtttattctcattataaaagatacgtggtatgcatttgttctggaaaatatggaggaaatagaatagtgtggtaaaaaaaagcatcctgtcactgggagaagctttcagtgtagcttattgttacgtttcacttagtattgtttttctgtgtcattaaatagccttaaaaacatttaatgaattcgtaacattacattgtaaaaatgagccataatatattttactaatcctctggttagactgtctttttttttttgagatggagccttgctctgtcatccaggctggagtgcagtggctccatctcggctcactgcaacctccacctcccgggttcaagtggttctggctcagcctcccgagcagctgggtgggattacaggcacccgccaccgcgcccagccaatttttgtatttttagtagtgcgggggtttcatcatattggccaggctggttgcgaactcctgacctcatgatccacccgccttggcctcccaaagtgttgggattacaggcgtgaaccactaagcctggcctggactgtcatttctaatttttttaaaaattagataaatgctgttgatgaagattcttgtcaatctttgttcacatccctggccatttccttaggagattgacatccgacagtggaattactggatcaaaggatactgcttttagagaatactgatatgta

SEQ ID NO: 332011 - DNA, 542 bp, Homo sapiens
acgctcgacctgtgtttacttttcctaacgtggtggaagcccatttctcgttttcggtgatgtccagaattaatttttcattcgttgcaaggtaatccgtccgtctacttacccatcagacgttttgacagcccttcatggagccgggtcttagggctgtaaaggtgataaacccaggattcctgctcattaggagctaattgggcagagtgtggtgggggagacagacaaattaaatattttgataacagtgtactgtaagttgattgtagtaccttgtactgctgtagggatgggaacagagtgctgtgagagcccagggggagtggataaattcctaactagacttgaaggtggggaccattgaaatcagtttcatatgctactccagagcctaactacagcgcctggcacatggtagacattcagtagcgtgttaaaattatgtttaatagtttttaatggtttctgtgactgttgctttgttttgcaacgtctgaatgtagtaatgtgactcagagcttcaaagtaagcattcgtta

SEQ ID NO: 332012 - DNA, 3387 bp, Homo sapiens
ggctgggtctccgaacctgaaaccgggagcttcctgctcgtgttcgctgttgagaagctacccgcggggttgtagacttcggacctcatggcagagataattcaggaacgcatagaagatcggctcccggaattggaacagctggagcgcattggactgttcagtcatgcggagattaaggctatcattaagaaggcttccgatctagagtacaaaatccagagaagaacccttttcaaggaagactttatcaattatgttcaatatgaaattaatcttttggagctgatccagagaagaagaacacgcattggatattcatttaagaaggatgagattgagaattctattgtacaccgggtacaaggtgttttccagcgtgcctcagcaaaatggaaagacgatgttcaactttggctctcctatgtggctttttgtaagaagtgggctactaaaactcgacttagcaaggtattctctgccatgttggcgattcattccaacaaaccagctttgtggattatggcagccaaatgggaaatggaagatcgattgtcttcagaaagcgcaaggcaactatttcttcgcgcactgcgctttcatccagagtgcccaaaactttataaagaatactttaggatggagctgatgcatgctgaaaaactgaggaaggagaaggaagaatttgaaaaagccagtatggatgtggagaatcctgattattctgaagaaatccttaagggcgagttggcatggatcatctacaaaaattctgtaagcataattaaaggtgcagaatttcacgtgtcactgctttcgattgcacagctatttgactttgccaaagatctacaaaaagagatttatgatgaccttcaggctctacacacagatgatcctctcacttgggattatgtggcaaggcgagaattagagattgagtcacagacagaagagcagcctacaacgaaacaagccaaagcagtggaggtcggccggaaggaggagaggtgctgtgctgtgtatgaagaggcagtgaagactctgccaacagaggccatgtggaagtgttacatcaccttttgcttggaaagatttactaagaagtcaaatagtgggttccttagagggaagaggttggaaagaaccatgactgtattcaggaaggcacatgaactgaagcttctgtcagaatgccaatacaagcagttgagtgtttcgttgctgtgttataacttcctgagggaagctctggaagtggcagtagctggaactgaattgtttagagactctgggacaatgtggcagctgaagctgcaggtgctgatcgagtcaaagagccctgacatagccatgctttttgaagaagcctttgtgcacctgaaaccccaggtttgtctgccattgtggatttcctgggcagagtggagtgaaggtgccaaaagccaagaagacactgaggcagtctttaagaaagctctcttagctgtcataggtgccgactcagtaaccctgaagaataagtacctggattgggcttatcgaagtggtggctacaaaaaggccagagctgtgtttaaaagtttacaggagagccgaccattttcagttgactttttcaggaaaatgattcagtttgaaaaggagcaagaatcctgcaatatggcgaacataagagaatattatgagagagctttgagagagtttggatccgcagattctgatctttggatggattatatgaaagaagaattgaaccacccccttggtagacctgagaactgtggacagatctactggcgagcgatgaaaatgttgcagggagagtcagcagaggcatttgtagctaaacatgctatgcatcagactggccatttatgaagatgaagaatacagtcagctttgtgaaatagtattgcaagcaagccccgtgggcaaatttgtattgagtccatctgtaatttgctcagtgatggcagacaagatggctgtctggttttgagacacactttaattttatgttaacttgttaaatctttttaaaaattaaaaaatttttatgattgagactgggtcttgctctgttgccctggctggtcttgaactcctggactcaagtgaccttctcacctcagactcctgagtagctgggattataggtgcatgacactgctcagtttgatgtgctaatctgattccagtaaagagaattgctgatttaatgttgaggcccgatcttccacaggtcctaaatgtttcccaaaatacatggatagcatacgactgggtttttttaaaattatcccaggtcaagcatgagtatctctaatctcgacctaagagccagttaaaatgaaggagaaagtggccaggcatggtgactcaacgcctgtaatcccagcactttgggaaggctgaggcaggcggatcacctgaggtcaggagtttgagactagcctggccaacatggtgaaaccccgtctctactaaaaatacaaaaattagccaggtgtggtggtgggtgcctgtaatcccagctgcttgggaggctgaggcaggagaattgcttgaacctgggagacggaggttgcagtgagccgagatcatgccattgctactccatcctgggtaagaagagcgaaactccttctcaaggaaaaaaaaaaaggagaaagtacagttttgttggtttattctcattataaaagatacgtggtatgcatttgttctggaaaatatggaggaaatagaatagtgtggtaaaaaaaagcatcctgtcactgggagaagctttcagtgtagcttattgttacgtttcacttagtattgtttttctgtgtcattaaatagccttaaaaacatttaatgaattcgtaacattacattgtaaaaatgagccataatatattttactaatcctctggttagactgtctttttttttttgagatggagccttgctctgtcatccaggctggagtgcagtggctccatctcggctcactgcaacctccacctcccgggttcaagtggttctggctcagcctcccgagcagctgggtgggattacaggcacccgccaccgcgcccagccaatttttgtatttttagtagtgcgggggtttcatcatattggccaggctggttgcgaactcctgacctcatgatccacccgccttggcctcccaaagtgttgggattacaggcgtgaaccactaagcctggcctggactgtcatttctaatttttttaaaaattagataaatgctgttgatgaagattcttgtcaatctttgttcacatccctggccatttccttaggagattgacatccgacagtggaattactggatcaaaggatactgcttttagagaatactgatatgta

SEQ ID NO: 332013 - DNA, 2171 bp, Homo sapiens
ggctgggtctccgaacctgaaaccgggagcttcctgctcgtgttcgctgttgagaagctacccgcggggttgtagacttcggacctcatggcagagataattcaggaacgcatagaagatcggctcccggaattggaacagctggagcgcattggactgttcagtcatgcggagattaaggctatcattaagaaggcttccgatctagagtacaaaatccagagaagaacccttttcaaggaagactttatcaattatgttcaatatgaaattaatcttttggagctgatccagagaagaagaacacgcattggatattcatttaagaaggatgagattgagaattctattgtacaccgggtacaaggtgttttccagcgtgcctcagcaaaatggaaagacgatgttcaactttggctctcctatgtggctttttgtaagaagtgggctactaaaactcgacttagcaaggtattctctgccatgttggcgattcattccaacaaaccagctttgtggattatggcagccaaatgggaaatggaagatcgattgtcttcagaaagcgcaaggcaactatttcttcgcgcactgcgctttcatccagagtgcccaaaactttataaagaatactttaggatggagctgatgcatgctgaaaaactgaggaaggagaaggaagaatttgaaaaagccagtatggatgtggagaatcctgattattctgaagaaatccttaagggcgagttggcatggatcatctacaaaaattctgtaagcataattaaaggtgcagaatttcacgtgtcactgctttcgattgcacagctatttgactttgccaaagatctacaaaaagagatttatgatgaccttcaggctctacacacagatgatcctctcacttgggattatgtggcaaggcgagaattagagattgagtcacagacagaagagcagcctacaacgaaacaagccaaagcagtggaggtcggccggaaggaggagaggtgctgtgctgtgtatgaagaggcagtgaagactctgccaacagaggccatgtggaagtgttacatcaccttttgcttggaaagatttactaagaagtcaaatagtgggttccttagagggaagaggttggaaagaaccatgactgtattcaggaaggcacatgaactgaagcttctgtcagaatgccaatacaagcagttgagtgtttcgttgctgtgttataacttcctgagggaagctctggaagtggcagtagctggaactgaattgtttagagactctgggacaatgtggcagctgaagctgcaggtgctgatcgagtcaaagagccctgacatagccatgctttttgaagaagcctttgtgcacctgaaaccccaggtttgtctgccattgtggatttcctgggcagagtggagtgaaggtgccaaaagccaagaagacactgaggcagtctttaagaaagctctcttagctgtcataggtgccgactcagtaaccctgaagaataagtacctggattgggcttatcgaagtggtggctacaaaaaggccagagctgtgtttaaaagtttacaggagagccgaccattttcagttgactttttcaggaaaatgattcagtttgaaaaggagcaagaatcctgcaatatggcgaacataagagaatattatgagagagctttgagagagtttggatccgcagattctgatctttggatggattatatgaaagaagaattgaaccacccccttggtagacctgagaactgtggacagatctactggcgagcgatgaaaatgttgcagggagagtcagcagaggcatttgtagctaaacatgctatgcatcagactggccatttatgaagatgaagaatacagtcagctttgtgaaatagtattgcaagcaagccccgtgggcaaatttgtattgagtccatctgtaatttgctcagtgatggcagacaagatggctgtctggttttgagacacactttaattttatgttaacttgttaaatctttttaaaaattaaaaaatttttatgattgaaaacaacaacccccaaccccaaaccccaaccaactccccctccccccctcaacccaccccccggaaaaaaataaaatacatgggcctcctttggcctcacgggg

SEQ ID NO: 332014 - DNA, 2143 bp, Homo sapiens
ggctgggtctccgaacctgaaaccgggagcttcctgctcgtgttcgctgttgagaagctacccgcggggttgtagacttcggacctcatggcagagataattcaggaacgcatagaagatcggctcccggaattggaacagctggagcgcattggactgttcagtcatgcggagattaaggctatcattaagaaggcttccgatctagagtacaaaatccagagaagaacccttttcaaggaagactttatcaattatgttcaatatgaaattaatcttttggagctgatccagagaagaagaacacgcattggatattcatttaagaaggatgagattgagaattctattgtacaccgggtacaaggtgttttccagcgtgcctcagcaaaatggaaagacgatgttcaactttggctctcctatgtggctttttgtaagaagtgggctactaaaactcgacttagcaaggtattctctgccatgttggcgattcattccaacaaaccagctttgtggattatggcagccaaatgggaaatggaagatcgattgtcttcagaaagcgcaaggcaactatttcttcgcgcactgcgctttcatccagagtgcccaaaactttataaagaatactttaggatggagctgatgcatgctgaaaaactgaggaaggagaaggaagaatttgaaaaagccagtatggatgtggagaatcctgattattctgaagaaatccttaagggcgagttggcatggatcatctacaaaaattctgtaagcataattaaaggtgcagaatttcacgtgtcactgctttcgattgcacagctatttgactttgccaaagatctacaaaaagagatttatgatgaccttcaggctctacacacagatgatcctctcacttgggattatgtggcaaggcgagaattagagattgagtcacagacagaagagcagcctacaacgaaacaagccaaagcagtggaggtcggccggaaggaggagaggtgctgtgctgtgtatgaagaggcagtgaagactctgccaacagaggccatgtggaagtgttacatcaccttttgcttggaaagatttactaagaagtcaaatagtgggttccttagagggaagaggttggaaagaaccatgactgtattcaggaaggcacatgaactgaagcttctgtcagaatgccaatacaagcagttgagtgtttcgttgctgtgttataacttcctgagggaagctctggaagtggcagtagctggaactgaattgtttagagactctgggacaatgtggcagctgaagctgcaggtgctgatcgagtcaaagagccctgacatagccatgctttttgaagaagcctttgtgcacctgaaaccccaggtttgtctgccattgtggatttcctgggcagagtggagtgaaggtgccaaaagccaagaagacactgaggcagtctttaagaaagctctcttagctgtcataggtgccgactcagtaaccctgaagaataagtacctggattgggcttatcgaagtggtggctacaaaaaggccagagctgtgtttaaaagtttacaggagagccgaccattttcagttgactttttcaggaaaatgattcagtttgaaaaggagcaagaatcctgcaatatggcgaacataagagaatattatgagagagctttgagagagtttggatccgcagattctgatctttggatggattatatgaaagaagaattgaaccacccccttggtagacctgagaactgtggacagatctactggcgagcgatgaaaatgttgcagggagagtcagcagaggcatttgtagctaaacatgctatgcatcagactggccatttatgaagatgaagaatacagtcagctttgtgaaatagtattgcaagcaagccccgtgggcaaatttgtattgagtccatctgtaatttgctcagtgatggcagacaagatggctgtctggttttgagacacactttaattttatgttaacttgttaaatctttttaaaaattaaaaaatttttatgattgccaaaccacagctccaccatcacaccacacgacaccaaacaaacttgcccctctcggcctcagcgcgggacttttgg

SEQ ID NO: 332015 - DNA, 2127 bp, Homo sapiens
ggctgggtctccgaacctgaaaccgggagcttcctgctcgtgttcgctgttgagaagctacccgcggggttgtagacttcggacctcatggcagagataattcaggaacgcatagaagatcggctcccggaattggaacagctggagcgcattggactgttcagtcatgcggagattaaggctatcattaagaaggcttccgatctagagtacaaaatccagagaagaacccttttcaaggaagactttatcaattatgttcaatatgaaattaatcttttggagctgatccagagaagaagaacacgcattggatattcatttaagaaggatgagattgagaattctattgtacaccgggtacaaggtgttttccagcgtgcctcagcaaaatggaaagacgatgttcaactttggctctcctatgtggctttttgtaagaagtgggctactaaaactcgacttagcaaggtattctctgccatgttggcgattcattccaacaaaccagctttgtggattatggcagccaaatgggaaatggaagatcgattgtcttcagaaagcgcaaggcaactatttcttcgcgcactgcgctttcatccagagtgcccaaaactttataaagaatactttaggatggagctgatgcatgctgaaaaactgaggaaggagaaggaagaatttgaaaaagccagtatggatgtggagaatcctgattattctgaagaaatccttaagggcgagttggcatggatcatctacaaaaattctgtaagcataattaaaggtgcagaatttcacgtgtcactgctttcgattgcacagctatttgactttgccaaagatctacaaaaagagatttatgatgaccttcaggctctacacacagatgatcctctcacttgggattatgtggcaaggcgagaattagagattgagtcacagacagaagagcagcctacaacgaaacaagccaaagcagtggaggtcggccggaaggaggagaggtgctgtgctgtgtatgaagaggcagtgaagactctgccaacagaggccatgtggaagtgttacatcaccttttgcttggaaagatttactaagaagtcaaatagtgggttccttagagggaagaggttggaaagaaccatgactgtattcaggaaggcacatgaactgaagcttctgtcagaatgccaatacaagcagttgagtgtttcgttgctgtgttataacttcctgagggaagctctggaagtggcagtagctggaactgaattgtttagagactctgggacaatgtggcagctgaagctgcaggtgctgatcgagtcaaagagccctgacatagccatgctttttgaagaagcctttgtgcacctgaaaccccaggtttgtctgccattgtggatttcctgggcagagtggagtgaaggtgccaaaagccaagaagacactgaggcagtctttaagaaagctctcttagctgtcataggtgccgactcagtaaccctgaagaataagtacctggattgggcttatcgaagtggtggctacaaaaaggccagagctgtgtttaaaagtttacaggagagccgaccattttcagttgactttttcaggaaaatgattcagtttgaaaaggagcaaacggagtctctctctgtcgcccaggctggactcttggctcactgcaacctctgcttcccaggaatcctgcaatatggcgaacataagagaatattatgagagagctttgagagagtttggatccgcagattctgatctttggatggattatatgaaagaagaattgaaccacccccttggtagacctgagaactgtggacagatctactggcgagcgatgaaaatgttgcagggagagtcagcagaggcatttgtagctaaacatgctatgcatcagactggccatttatgaagatgaagaatacagtcagctttgtgaaatagtattgcaagcaagccccgtgggcaaatttgtattgagtccatctgtaatttgctcagtgatggcagacaagatggctgtctggttttgagacacactttaattttatgttaacttgttaaatctttttaaaaattaaaaaatttttatgattg

SEQ ID NO: 332016 - DNA, 2668 bp, Homo sapiens
taagaagtgcccaccaccatgcccagctaatttttgtatttttagtagagacagggttttgccatgttggccaggctggtcttgaactcctggcctcaagtgatccgcctgcctccgtctttaaagtgctgggattacaaatgtgcgccaccatgcctcgcttttgctgctcatttgtacgtacctctgggacatgaatgaagatcagatagttcagcctagattaattagttcttgtgttgtgggtcttagacagcagagacatgacctgggtagctgtgggtctaactgtgtgggctgttaattacttacttaactaaaagatgattgatgataactacatgaaatatttcccaatagaaaggaactaaaattcacagaagagtgttgctctgagtgacttggtcagaaggctggctgtgttctggagtgccattcctgctgggcaatgagaattctgtcacaatgaggactgtttgggaatgaatccctattttacatgttgattatcttaggaggaacctgcctttttaactagttttcagagcataggactaaactgtcattttatagcataaaaaaattgatacataatattttacatatttatagggtacatgcgatgttttgttatatgctgttctctaactaacattttttaaactgggagtaggtttgtctgccattgtggatttcctgggcagagtggagtgaaggtgccaaaagccaagaagacactgaggcagtctttaagaaagctctcttagctgtcataggtgccgactcagtaaccctgaagaataagtacctggattgggcttatcgaagtggtggctacaaaaaggccagagctgtgtttaaaagtttacaggagagccgaccattttcagttgactttttcaggaaaatgattcagtttgaaaaggagcaagaatcctgcaatatggcgaacataagagaatattatgagagagctttgagagagtttggatccgcagattctgatctttggatggattatatgaaagaagaattgaaccacccccttggtagacctgagaactgtggacagatctactggcgagcgatgaaaatgttgcagggagagtcagcagaggcatttgtagctaaacatgctatgcatcagactggccatttatgaagatgaagaatacagtcagctttgtgaaatagtattgcaagcaagccccgtgggcaaatttgtattgagtccatctgtaatttgctcagtgatggcagacaagatggctgtctggttttgagacacactttaattttatgttaacttgttaaatctttttaaaaattaaaaaatttttatgattgagactgggtcttgctctgttgccctggctggtcttgaactcctggactcaagtgaccttctcacctcagactcctgagtagctgggattataggtgcatgacactgctcagtttgatgtgctaatctgattccagtaaagagaattgctgatttaatgttgaggcccgatcttccacaggtcctaaatgtttcccaaaatacatggatagcatacgactgggtttttttaaaattatcccaggtcaagcatgagtatctctaatctcgacctaagagccagttaaaatgaaggagaaagtggccaggcatggtgactcaacgcctgtaatcccagcactttgggaaggctgaggcaggcggatcacctgaggtcaggagtttgagactagcctggccaacatggtgaaaccccgtctctactaaaaatacaaaaattagccaggtgtggtggtgggtgcctgtaatcccagctgcttgggaggctgaggcaggagaattgcttgaacctgggagacggaggttgcagtgagccgagatcatgccattgctactccatcctgggtaagaagagcgaaactccttctcaaggaaaaaaaaaaaggagaaagtacagttttgttggtttattctcattataaaagatacgtggtatgcatttgttctggaaaatatggaggaaatagaatagtgtggtaaaaaaaagcatcctgtcactgggagaagctttcagtgtagcttattgttacgtttcacttagtattgtttttctgtgtcattaaatagccttaaaaacatttaatgaattcgtaacattacattgtaaaaatgagccataatatattttactaatcctctggttagactgtctttttttttttgagatggagccttgctctgtcatccaggctggagtgcagtggctccatctcggctcactgcaacctccacctcccgggttcaagtggttctggctcagcctcccgagcagctgggtgggattacaggcacccgccaccgcgcccagccaatttttgtatttttagtagtgcgggggtttcatcatattggccaggctggttgcgaactcctgacctcatgatccacccgccttggcctcccaaagtgttgggattacaggcgtgaaccactaagcctggcctggactgtcatttctaatttttttaaaaattagataaatgctgttgatgaagattcttgtcaatctttgttcacatccctggccatttccttaggagattgacatccgacagtggaattactggatcaaaggatactgcttttagagaatactgatatgta

SEQ ID NO: 332017 - DNA, 2653 bp, Homo sapiens
agacggagtgttgctccttgtcgcccaggctggagtgcactggcacgatcttggctcactgcaacctccgcctcccgggttcaagtgattctcctgcctccgtctttaaagtgctgggattacaaatgtgcgccaccatgcctcgcttttgctgctcatttgtacgtacctctgggacatgaatgaagatcagatagttcagcctagattaattagttcttgtgttgtgggtcttagacagcagagacatgacctgggtagctgtgggtctaactgtgtgggctgttaattacttacttaactaaaagatgattgatgataactacatgaaatatttcccaatagaaaggaactaaaattcacagaagagtgttgctctgagtgacttggtcagaaggctggctgtgttctggagtgccattcctgctgggcaatgagaattctgtcacaatgaggactgtttgggaatgaatccctattttacatgttgattatcttaggaggaacctgcctttttaactagttttcagagcataggactaaactgtcattttatagcataaaaaaattgatacataatattttacatatttatagggtacatgcgatgttttgttatatgctgttctctaactaacattttttaaactgggagtaggtttgtctgccattgtggatttcctgggcagagtggagtgaaggtgccaaaagccaagaagacactgaggcagtctttaagaaagctctcttagctgtcataggtgccgactcagtaaccctgaagaataagtacctggattgggcttatcgaagtggtggctacaaaaaggccagagctgtgtttaaaagtttacaggagagccgaccattttcagttgactttttcaggaaaatgattcagtttgaaaaggagcaagaatcctgcaatatggcgaacataagagaatattatgagagagctttgagagagtttggatccgcagattctgatctttggatggattatatgaaagaagaattgaaccacccccttggtagacctgagaactgtggacagatctactggcgagcgatgaaaatgttgcagggagagtcagcagaggcatttgtagctaaacatgctatgcatcagactggccatttatgaagatgaagaatacagtcagctttgtgaaatagtattgcaagcaagccccgtgggcaaatttgtattgagtccatctgtaatttgctcagtgatggcagacaagatggctgtctggttttgagacacactttaattttatgttaacttgttaaatctttttaaaaattaaaaaatttttatgattgagactgggtcttgctctgttgccctggctggtcttgaactcctggactcaagtgaccttctcacctcagactcctgagtagctgggattataggtgcatgacactgctcagtttgatgtgctaatctgattccagtaaagagaattgctgatttaatgttgaggcccgatcttccacaggtcctaaatgtttcccaaaatacatggatagcatacgactgggtttttttaaaattatcccaggtcaagcatgagtatctctaatctcgacctaagagccagttaaaatgaaggagaaagtggccaggcatggtgactcaacgcctgtaatcccagcactttgggaaggctgaggcaggcggatcacctgaggtcaggagtttgagactagcctggccaacatggtgaaaccccgtctctactaaaaatacaaaaattagccaggtgtggtggtgggtgcctgtaatcccagctgcttgggaggctgaggcaggagaattgcttgaacctgggagacggaggttgcagtgagccgagatcatgccattgctactccatcctgggtaagaagagcgaaactccttctcaaggaaaaaaaaaaaggagaaagtacagttttgttggtttattctcattataaaagatacgtggtatgcatttgttctggaaaatatggaggaaatagaatagtgtggtaaaaaaaagcatcctgtcactgggagaagctttcagtgtagcttattgttacgtttcacttagtattgtttttctgtgtcattaaatagccttaaaaacatttaatgaattcgtaacattacattgtaaaaatgagccataatatattttactaatcctctggttagactgtctttttttttttgagatggagccttgctctgtcatccaggctggagtgcagtggctccatctcggctcactgcaacctccacctcccgggttcaagtggttctggctcagcctcccgagcagctgggtgggattacaggcacccgccaccgcgcccagccaatttttgtatttttagtagtgcgggggtttcatcatattggccaggctggttgcgaactcctgacctcatgatccacccgccttggcctcccaaagtgttgggattacaggcgtgaaccactaagcctggcctggactgtcatttctaatttttttaaaaattagataaatgctgttgatgaagattcttgtcaatctttgttcacatccctggccatttccttaggagattgacatccgacagtggaattactggatcaaaggatactgcttttagagaatactgatatgta

SEQ ID NO: 332018 - DNA, 1993 bp, Homo sapiens
ggctgggtctccgaacctgaaaccgggagcttcctgctcgtgttcgctgttgagaagctacccgcggggttgtagacttcggacctcatggcagagataattcaggaacgcatagaagatcggctcccggaattggaacagctggagcgcattggactgttcagtcatgcggagattaaggctatcattaagaaggcttccgatctagagtacaaaatccagagaagaacccttttcaaggaagactttatcaattatgttcaatatgaaattaatcttttggagctgatccagagaagaagaacacgcattggatattcatttaagaaggatgagattgagaattctattgtacaccgggtacaaggtgttttccagcgtgcctcagcaaaatggaaagacgatgttcaactttggctctcctatgtggctttttgtaagaagtgggctactaaaactcgacttagcaaggtattctctgccatgttggcgattcattccaacaaaccagctttgtggattatggcagccaaatgggaaatggaagatcgattgtcttcagaaagcgcaaggcaactatttcttcgcgcactgcgctttcatccagagtgcccaaaactttataaagaatactttaggatggagctgatgcatgctgaaaaactgaggaaggagaaggaagaatttgaaaaagccagtatggatgtggagaatcctgattattctgaagaaatccttaagggcgagttggcatggatcatctacaaaaattctgtaagcataattaaaggtgcagaatttcacgtgtcactgctttcgattgcacagctatttgactttgccaaagatctacaaaaagagatttatgatgaccttcaggctctacacacagatgatcctctcacttgggattatgtggcaaggcgagaattagagattgagtcacagacagaagagcagcctacaacgaaacaagccaaagcagtggaggtcggccggaaggaggagaggtgctgtgctgtgtatgaagaggcagtgaagactctgccaacagaggccatgtggaagtgttacatcaccttttgcttggaaagatttactaagaagtcaaatagtgggttccttagagggaagaggttggaaagaaccatgactgtattcaggaaggcacatgaactgaagcttctgtcagaatgccaatacaagcagttgagtgtttcgttgctgtgttataacttcctgagggaagctctggaagtggcagtagctggaactgaattgtttagagactctgggacaatgtggcagctgaagctgcaggtgctgatcgagtcaaagagccctgacatagccatgctttttgaagaagcctttgtgcacctgaaaccccaggtttgtctgccattgtggatttcctgggcagagtggagtgaaggtgccaaaagccaagaagacactgaggcagtctttaagaaagctctcttagctgtcataggtgccgactcagtaaccctgaagaataagtacctggattgggcttatcgaagtggtggctacaaaaaggccagagctgtgtttaaaagtttacaggagagccgaccattttcagttgactttttcaggaaaatgattcagtttgaaaaggagcaaatctttggatggattatatgaaagaagaattgaaccacccccttggtagacctgagaactgtggacagatctactggcgagcgatgaaaatgttgcagggagagtcagcagaggcatttgtagctaaacatgctatgcatcagactggccatttatgaagatgaagaatacagtcagctttgtgaaatagtattgcaagcaagccccgtgggcaaatttgtattgagtccatctgtaatttgctcagtgatggcagacaagatggctgtctggttttgagacacactttaattttatgttaacttgttaaatctttttaaaaattaaaaaatttttatgattg

SEQ ID NO: 332019 - DNA, 576 bp, Homo sapiens
gctggttttgaactcctgacctcaagtgatcaatccgccttggcctcccaataatctttgtaattttaggttaggtggggtttcaccatgttggccaggctggtttcaatctcctgacctcaagtgatccgcccgcttcggcttcacaaagtggtgggattacaggtgtgagccaccgcatccaacctgaaatttgcttgtttttagcaaaattaattaatgcaaaggtgtattatatgtaaaggtcaaatttgggcagcttactacattgcttttcttgcaggacgatgttcaactttggctctcctatgtggctttttgtaagaagtgggtgagtaaagccatgcatgtcttgcttcctctgaccgtctttttgttaatctgccctttaagcttcatgccagatgttttttcctgaagtgtagggttaacatgaaaaaagaacccaagaaggcggaacatcaatataacattggatatctgaatgactatggtttccaattcaattgaaaagaatataatttttatgtgtgtttgttcaatacagttgactttttaaaaagatatttaaagtgt

SEQ ID NO: 332020 - DNA, 564 bp, Homo sapiens
ttgaagtaaaggtgtaggatgactgtttttttccttatcttttaataactttgatgtgatgaatgttgaactaagtgatctgatcaacacaatctttctgacttttccagaggccatgtggaagtgttacatcaccttttgcttggaaagatttactaagaagtcaaatagtgggttccttagagggaaggtgaggttgttacatggttacagtggttgactagatagtgactgccttctgaaagaacagaagcacagatcttttggtgtctggcacagtttctgagaacttttatgtttagccactctctctctccttgtgggtgacgtgacattctaaaggtctgagtctggtttgccgccaggttaggaggggctctcgtgtaactgggctctgttcggtgcagctgcccattgcatctattcataagtgaaaccaccatgcaggagcaagtcagcttctttgaattttaagaaatgcgcaaaactgcttttgttcatgtcagaggccagaggcccctgctgggatctttgtaatgaactgagggatttttctgttttcag

SEQ ID NO: 332021 - DNA, 2066 bp, Homo sapiens
ggctgggtctccgaacctgaaaccgggagcttcctgctcgtgttcgctgttgagaagctacccgcggggttgtagacttcggacctcatggcagagataattcaggaacgcatagaagatcggctcccggaattggaacagctggagcgcattggactgttcagtcatgcggagattaaggctatcattaagaaggcttccgatctagagtacaaaatccagagaagaacccttttcaaggaagactttatcaattatgttcaatatgaaattaatcttttggagctgatccagagaagaagaacacgcattggatattcatttaagaaggatgagattgagaattctattgtacaccgggtacaaggtgttttccagcgtgcctcagcaaaatggaaagacgatgttcaactttggctctcctatgtggctttttgtaagaagtgggctactaaaactcgacttagcaaggtattctctgccatgttggcgattcattccaacaaaccagctttgtggattatggcagccaaatgggaaatggaagatcgattgtcttcagaaagcgcaaggcaactatttcttcgcgcactgcgctttcatccagagtgcccaaaactttataaagaatactttaggatggagctgatgcatgctgaaaaactgaggaaggagaaggaagaatttgaaaaagccagtatggatgtggagaatcctgattattctgaagaaatccttaagggcgagttggcatggatcatctacaaaaattctgtaagcataattaaaggtgcagaatttcacgtgtcactgctttcgattgcacagctatttgactttgccaaagatctacaaaaagagatttatgatgaccttcaggctctacacacagatgatcctctcacttgggattatgtggcaaggcgagaattagagattgagtcacagacagaagagcagcctacaacgaaacaagccaaagcagtggaggtcggccggaaggaggagaggtgctgtgctgtgtatgaagaggcagtgaagactctgccaacagaggccatgtggaagtgttacatcaccttttgcttggaaagatttactaagaagtcaaatagtgggttccttagagggaagaggttggaaagaaccatgactgtattcaggaaggcacatgaactgaagcttctgtcagaatgccaatacaagcagttgagtgtttcgttgctgtgttataacttcctgagggaagctctggaagtggcagtagctggaactgaattgtttagagactctgggacaatgtggcagctgaagctgcaggtgctgatcgagtcaaagagccctgacatagccatgctttttgaagaagcctttgtgcacctgaaaccccaggtttgtctgccattgtggatttcctgggcagagtggagtgaaggtgccaaaagccaagaagacactgaggcagtctttaagaaagctctcttagctgtcataggtgccgactcagtaaccctgaagaataagtacctggattgggcttatcgaagtggtggctacaaaaaggccagagctgtgtttaaaagtttacaggagagccgaccattttcagttgactttttcaggaaaatgattcagtttgaaaaggagcaagaatcctgcaatatggcgaacataagagaatattatgagagagctttgagagagtttggatccgcagattctgatctttggatggattatatgaaagaagaattgaaccacccccttggtagacctgagaactgtggacagatctactggcgagcgatgaaaatgttgcagggagagtcagcagaggcatttgtagctaaacatgctatgcatcagactggccatttatgaagatgaagaatacagtcagctttgtgaaatagtattgcaagcaagccccgtgggcaaatttgtattgagtccatctgtaatttgctcagtgatggcagacaagatggctgtctggttttgagacacactttaattttatgttaacttgttaaatctttttaaaaattaaaaaatttttatgattg

SEQ ID NO: 332022 - DNA, 923 bp, Homo sapiens
acgctcgacctgtgtttacttttcctaacgtggtggaagcccatttctcgttttcggtgatgtccagaattaatttttcattcgttgcaaggtaatccgtccgtctacttacccatcagacgttttgacagcccttcatggagccgggtcttagggctgtaaagggctatcattaagaaggcttccgatctagagtacaaaatccagagaagaacccttttcaaggaagactttatcaattatgttcaatatgaaattaatcttttggagctgatccagagaagaagaacacgcattggatattcatttaagaaggatgagattgagaattctattgtacaccgggtacaaggtgttttccagcgtgcctcagcaaaatggaaagacgatgttcaactttggctctcctatgtggctttttgtaagaagtgggctactaaaactcgacttagcaaggtattctctgccatgttggcgattcattccaacaaaccagctttgtggattatggcagccaaatgggaaatggaagatcgattgtcttcagaaagcgcaaggcaactatttcttcgcgcactgcgctttcatccagagtgcccaaaactttataaagaatactttaggatggagctgatgcatgctgaaaaactgaggaaggagaaggaagaatttgaaaaagccagtatggatgtggagaatcctgattattctgaagaaatccttaagggcgagttggcatggatcatctacaaaaattctgtaagcataattaaagggtcttactctgtcacccacgcaggagtgcagtggtacaattatggctcactgtagcctcgacttcatgggctcaggtgattctcccatttcagcctcctgagtagctgggcatggacctctatgcctggctagtttttgtacttgta

SEQ ID NO: 332023 - DNA, 1918 bp, Homo sapiens
ggctgggtctccgaacctgaaaccgggagcttcctgctcgtgttcgctgttgagaagctacccgcggggttgtagacttcggacctcatggcagagataattcaggaacgcatagaagatcggctcccggaattggaacagctggagcgcattggactgttcagtcatgcggagattaaggctatcattaagaaggcttccgatctagagtacaaaatccagagaagaacccttttcaaggaagactttatcaattatgttcaatatgaaattaatcttttggagctgatccagagaagaagaacacgcattggatattcatttaagaaggatgagattgagaattctattgtacaccgggtacaaggtgttttccagcgtgcctcagcaaaatggaaaatcgattgtcttcagaaagcgcaaggcaactatttcttcgcgcactgcgctttcatccagagtgcccaaaactttataaagaatactttaggatggagctgatgcatgctgaaaaactgaggaaggagaaggaagaatttgaaaaagccagtatggatgtggagaatcctgattattctgaagaaatccttaagggcgagttggcatggatcatctacaaaaattctgtaagcataattaaaggtgcagaatttcacgtgtcactgctttcgattgcacagctatttgactttgccaaagatctacaaaaagagatttatgatgaccttcaggctctacacacagatgatcctctcacttgggattatgtggcaaggcgagaattagagattgagtcacagacagaagagcagcctacaacgaaacaagccaaagcagtggaggtcggccggaaggaggagaggtgctgtgctgtgtatgaagaggcagtgaagactctgccaacagaggccatgtggaagtgttacatcaccttttgcttggaaagatttactaagaagtcaaatagtgggttccttagagggaagaggttggaaagaaccatgactgtattcaggaaggcacatgaactgaagcttctgtcagaatgccaatacaagcagttgagtgtttcgttgctgtgttataacttcctgagggaagctctggaagtggcagtagctggaactgaattgtttagagactctgggacaatgtggcagctgaagctgcaggtgctgatcgagtcaaagagccctgacatagccatgctttttgaagaagcctttgtgcacctgaaaccccaggtttgtctgccattgtggatttcctgggcagagtggagtgaaggtgccaaaagccaagaagacactgaggcagtctttaagaaagctctcttagctgtcataggtgccgactcagtaaccctgaagaataagtacctggattgggcttatcgaagtggtggctacaaaaaggccagagctgtgtttaaaagtttacaggagagccgaccattttcagttgactttttcaggaaaatgattcagtttgaaaaggagcaagaatcctgcaatatggcgaacataagagaatattatgagagagctttgagagagtttggatccgcagattctgatctttggatggattatatgaaagaagaattgaaccacccccttggtagacctgagaactgtggacagatctactggcgagcgatgaaaatgttgcagggagagtcagcagaggcatttgtagctaaacatgctatgcatcagactggccatttatgaagatgaagaatacagtcagctttgtgaaatagtattgcaagcaagccccgtgggcaaatttgtattgagtccatctgtaatttgctcagtgatggcagacaagatggctgtctggttttgagacacactttaattttatgttaacttgttaaatctttttaaaaattaaaaaatttttatgattg

SEQ ID NO: 332024 - DNA, 1406 bp, Homo sapiens
  misc_feature (57)..(57): n is a, c, g, or t
  misc_feature (75)..(75): n is a, c, g, or t
  misc_feature (141)..(141): n is a, c, g, or t
  misc_feature (183)..(183): n is a, c, g, or t
  misc_feature (356)..(356): n is a, c, g, or t
  misc_feature (389)..(389): n is a, c, g, or t
  misc_feature (422)..(422): n is a, c, g, or t
  misc_feature (454)..(454): n is a, c, g, or t
cgattctagaggatccccgtcagatgctccagctcaccagcaatggatccaaaccantgacaaaatctctgatgntgccagaagaataattcagaaagtcaagtattaatctaatcaaggaggcacagagaaggatgaagntacaacttaaactaaatcaaaaacatgatacaggatgtgaangaaaaattcttcagtgaaacagagatcataaataaaaaacaatcacaacttctggaaatcaaggacacacttagaggaaataaaaaatgcactagaaaatctcagcagcagaactgaacacgcagaagaaagaacttcagagctcgaagacaaggcttttgaattaacccaantgcatcaaatgacaaagaaagaattttttaaanttgaacaaagcctccaagaagcttgggactatngcttaaatgtccaaacctaacgaactaattgngtgttccccaaagaacgaagaggttggaaagaaccatgactgtattcaggaaggcacatgaactgaagcttctgtcagaatgccaatacaagcagttgagtgtttcgttgctgtgttataacttcctgagggaagctctggaagtggcagtagctggaactgaattgtttagagactctgggacaatgtggcagctgaagctgcaggtgctgatcgagtcaaagagccctgacatagccatgctttttgaagaagcctttgtgcacctgaaaccccaggtttgtctgccattgtggatttcctgggcagagtggagtgaaggtgccaaaagccaagaagacactgaggcagtctttaagaaagctctcttagctgtcataggtgccgactcagtaaccctgaagaataagtacctggattgggcttatcgaagtggtggctacaaaaaggccagagctgtgtttaaaagtttacaggagagccgaccattttcagttgactttttcaggaaaatgattcagtttgaaaaggagcaagaatcctgcaatatggcgaacataagagaatattatgagagagctttgagagagtttggatccgcagattctgatctttggatggattatatgaaagaagaattgaaccacccccttggtagacctgagaactgtggacagatctactggcgagcgatgaaaatgttgcagggagagtcagcagaggcatttgtagctaaacatgctatgcatcagactggccatttatgaagatgaagaatacagtcagctttgtgaaatagtattgcaagcaagccccgtgggcaaatttgtattgagtccatctgtaatttgctcagtgatggcagacaagatggctgtctggttttgagacacactttaattttatgttaacttgttaaatctttttaaaaattaaaaaatttttatgattg

SEQ ID NO: 332025 - DNA, 3448 bp, Homo sapiens
ggctgggtctccgaacctgaaaccgggagcttcctgctcgtgttcgctgttgagaagctacccgcggggttgtagacttcggacctcatggcagagataattcaggaacgcatagaagatcggctcccggaattggaacagctggagcgcattggactgttcagtcatgcggagattaaggctatcattaagaaggcttccgatctagagtacaaaatccagagaagaacccttttcaaggaagactttatcaattatgttcaatatgaaattaatcttttggagctgatccagagaagaagaacacgcattggatattcatttaagaaggatgagattgagaattctattgtacaccgggtacaaggtgttttccagcgtgcctcagcaaaatggaaagacgatgttcaactttggctctcctatgtggctttttgtaagaagtgggctactaaaactcgacttagcaaggtattctctgccatgttggcgattcattccaacaaaccagctttgtggattatggcagccaaatgggaaatggaagatcgattgtcttcagaaagcgcaaggcaactatttcttcgcgcactgcgctttcatccagagtgcccaaaactttataaagaatactttaggatggagctgatgcatgctgaaaaactgaggaaggagaaggaagaatttgaaaaagccagtatggatgtggagaatcctgattattctgaagaaatccttaagggcgagttggcatggatcatctacaaaaattctgtaagcataattaaaggtgcagaatttcacgtgtcactgctttcgattgcacagctatttgactttgccaaagatctacaaaaagagatttatgatgaccttcaggctctacacacagatgatcctctcacttgggattatgtggcaaggcgagaattagagattgagtcacagacagaagagcagcctacaacgaaacaagccaaagcagtggaggtcggccggaaggaggagaggtgctgtgctgtgtatgaagaggcagtgaagactctgccaacagaggccatgtggaagtgttacatcaccttttgcttggaaagatttactaagaagtcaaatagtgggttccttagagggaagaggttggaaagaaccatgactgtattcaggaaggcacatgaactgaagcttctgtcagaatgccaatacaagcagttgagtgtttcgttgctgtgttataacttcctgagggaagctctggaagtggcagtagctggaactgaattgtttagagactctgggacaatgtggcagctgaagctgcaggtgctgatcgagtcaaagagccctgacatagccatgctttttgaagaagcctttgtgcacctgaaaccccaggtttgtctgccattgtggatttcctgggcagagtggagtgaaggtgccaaaagccaagaagacactgaggcagtctttaagaaagctctcttagctgtcataggtgccgactcagtaaccctgaagaataagtacctggattgggcttatcgaagtggtggctacaaaaaggccagagctgtgtttaaaagtttacaggagagccgaccattttcagttgactttttcaggaaaatgattcagtttgaaaaggagcaaacggagtctctctctgtcgcccaggctggactcttggctcactgcaacctctgcttcccaggaatcctgcaatatggcgaacataagagaatattatgagagagctttgagagagtttggatccgcagattctgatctttggatggattatatgaaagaagaattgaaccacccccttggtagacctgagaactgtggacagatctactggcgagcgatgaaaatgttgcagggagagtcagcagaggcatttgtagctaaacatgctatgcatcagactggccatttatgaagatgaagaatacagtcagctttgtgaaatagtattgcaagcaagccccgtgggcaaatttgtattgagtccatctgtaatttgctcagtgatggcagacaagatggctgtctggttttgagacacactttaattttatgttaacttgttaaatctttttaaaaattaaaaaatttttatgattgagactgggtcttgctctgttgccctggctggtcttgaactcctggactcaagtgaccttctcacctcagactcctgagtagctgggattataggtgcatgacactgctcagtttgatgtgctaatctgattccagtaaagagaattgctgatttaatgttgaggcccgatcttccacaggtcctaaatgtttcccaaaatacatggatagcatacgactgggtttttttaaaattatcccaggtcaagcatgagtatctctaatctcgacctaagagccagttaaaatgaaggagaaagtggccaggcatggtgactcaacgcctgtaatcccagcactttgggaaggctgaggcaggcggatcacctgaggtcaggagtttgagactagcctggccaacatggtgaaaccccgtctctactaaaaatacaaaaattagccaggtgtggtggtgggtgcctgtaatcccagctgcttgggaggctgaggcaggagaattgcttgaacctgggagacggaggttgcagtgagccgagatcatgccattgctactccatcctgggtaagaagagcgaaactccttctcaaggaaaaaaaaaaaggagaaagtacagttttgttggtttattctcattataaaagatacgtggtatgcatttgttctggaaaatatggaggaaatagaatagtgtggtaaaaaaaagcatcctgtcactgggagaagctttcagtgtagcttattgttacgtttcacttagtattgtttttctgtgtcattaaatagccttaaaaacatttaatgaattcgtaacattacattgtaaaaatgagccataatatattttactaatcctctggttagactgtctttttttttttgagatggagccttgctctgtcatccaggctggagtgcagtggctccatctcggctcactgcaacctccacctcccgggttcaagtggttctggctcagcctcccgagcagctgggtgggattacaggcacccgccaccgcgcccagccaatttttgtatttttagtagtgcgggggtttcatcatattggccaggctggttgcgaactcctgacctcatgatccacccgccttggcctcccaaagtgttgggattacaggcgtgaaccactaagcctggcctggactgtcatttctaatttttttaaaaattagataaatgctgttgatgaagattcttgtcaatctttgttcacatccctggccatttccttaggagattgacatccgacagtggaattactggatcaaaggatactgcttttagagaatactgatatgta

SEQ ID NO: 332026 - DNA, 531 bp, Homo sapiens
gtgacagcacaaaacctgagaccgtagagcctatcccttctcatctggccttgcctgaggaagtctcactccaggaacagctggcacagggagtcccaagatactcctatttggggcaggccatggatcaagatgggccatctgaaatgcaggaatactttttgagaccagggacagacccacagagtgagaaactccatgggaaaatgagccttgaacacgaaggtttggcgacagctgatggtatttgttcaatgatgatacagaaccaagtctcaccagaagatgctctctatggatttgactcatatggaccagttacagattccttgattcatgaaggggaaaattcctataaattcgaggaaatgtttaatgagaattgcttccttgttcagcatgagcagattctccctcgtgtgaagccctatgattgcccagaatgtgggaaagccttcggcaagagcaaacacctccttcagcatcacatcatccatactggggagaagccctataaatgcctggagtgtg

SEQ ID NO: 332027 - DNA, 364 bp, Homo sapiens
accaattcttggggtataggttatggaggcaattaatcctccataattaccaggaggcaatttatcctacataattgatcaggggtctgtggctagtccagacccctgatcctagacagggctatgctttacaaatataatattcccctccattaaacattattttaaaaacaagaactctggttagagtaaacagactttgttggtttactatgaaaatttatgctgaagttcggagtggagctgcactgatgaaagtgagtagggggctggagtggtttctcttctgtcccaagtagtcctggatgcagccatctggtaccctcagctctgaggggtccagagcaaaaactactgcacactt

SEQ ID NO: 332028 - DNA, 358 bp, Homo sapiens
gtgcggttgaggtgagaagggatcttgcagaacgcttccaggacccagattcgtatgcacgccctgcccagctggtcagcctcagtttccccatctgtcagtctggacagtgacgctcccagcgtccggcgaagccccgctcttggcccttggtccctccgcctgatcacaagagggtgccgcgacggccggggacgggtctggcgtgggcagggacctctccgaccctcattgaggaaagaatggcggaacccgaaaaccgggccctggcgtccctcctgcaaggtggggaggagagctggacggcaggatttgggaagggcttggggagcagggccccctgagggtggcgggggag

SEQ ID NO: 332029 - DNA, 2328 bp, Homo sapiens
ctaggccgggccaacggagcccgcctttacctccccactcggcgtccagtctcttagcaacgactccggcttcctaggaactgctcctttctcaaccattcctgcccacaacaccccagcttgctgccagcaaagcccctccacacccctcaaactccagacccttcacatcaatttactgttttcttcgacctcaccccagcaattttctctgaatcaaccccctttcctcctctcctaagtctctgagtttctctctcctcctgccatcctgagttctgccatccttaggggccgccaagacctctcttttcgttcctctcccgcctcagaccagcagccttttattttagatcatgtctggagggaagtcagcccagggtccagaggaagggggcgtctgcatcactgaagcccttatcactaagcggaacttgactttccctgaagatggggaactgtcagagaagatgcactcagcaatgttgtggaatgaatgaatgggtggatggaacaagtgcttttttctccatgaacgactcaaaaggaaggtttcacactcttgatgaactgcagactgtccgcctggaccgggaggggattactactatcaggaacttagaaggcctccagaatcttcacagtctctatctgcaaggggtaacttctttctccacccttcccctccccttgacccctgtggacctaatctgtctcatctgaaaggagccaaccaggtcatcctgcccattccctggtgttcaggcaggcagaccttcatttaaaccattcccagacgaatgacatagggtcctgaattgaaaaactaattccctcaaaatagatcctgaacatgacctgtgctccttccactgttctttaggcacttctcttgatctagaagttctttttggcatctactctaaatctttcacgttaaatagctccagcccatttcctgttttgaagaagaggaaactatgaagattcctgtacatcattcagatcctacttgaaggctgtttggtggtggtggtggtggttggttgatcttcagccttcccctggttgagtattcccagctcgcttcaactttccccatagaaactttaaccgtcaagttcctgtatgctcattgttctctctgtgtatgcaagccaccaccaaggccctttccgttttcctggtggcttcttagtttccttttctgattcccaggtcactctttggttgtggaatcagaagagtatacgtagtcaggtttagataccccaggtttacacccttaaccatccacatggggaaagaaaatcatctttcttaaggtagtggcaacctgttcaaggagtggggtgatcattcccaaagtgccagatctccagctgcagagtagacatggtcttggggctttgtccccgtaaagggcccctgacgcatctgatctcagcttggtttccccacttcggtttcttcttgcagaataagatccagcaaattgagaacctggcttgcatcccctccttgcgcttcctgtctctggcaggaaaccaaatcaggcaggtggaaaacctcctcgacctcccatgcctccagtttctggacctttctgagaacctgatagaaacattgaagctggatgagttcccccagagccttctcatcctcaacctgtctggaaacagctgcaccaaccaggatggctaccgcgagctggtgacagaagccctgccacttctcctggacctggacgggcagcctgtggtggagcgctggatttcggatgaggaggatgaagcctcaagcgatgaggagttcccagagctgagtggcccattctgctcagaacgaggcttcctcaaggagctggagcaggagctgagcaggcacagggagcaccggcaacagacggccctgacagagcacctgctgaggatggagatgcagcccaccctcaccgacctgcccctgctacctggggtgcccatggctggggacagcagcccttctgccactcctgcgcaaggggaggagacagtccctgaggccgtctcctcaccccaggcctcctctcccaccaagaaaccatgcagtctgattcccaggggccaccaaagctctttctggggaaggaagggggcacgagcagccacagcccccaaggcctctgtggctgaggcccccagcacaaccaaaactacggccaagagaagcaagaaatgattctctgtcaacctttctctactagtggagaggagtggggcctgcccctcttctcagacctctgacctgtgacagaagcccatccccagtaaagtgtctctaggccct

SEQ ID NO: 332030 - DNA, 508 bp, Homo sapiens
  misc_feature (74)..(74): n is a, c, g, or t
acgactgatcacacgcgagacttctcatgaaagctatcgtggcaacactatatactgtccgcctgctcgtcgantacgttttaggggattactactatcaggaacttagaaggcctccagaatcttcacagtctctatctgcaagggctccagcccatttcctgttttgaagaagaggaaactatgaagattcctgtacatcattcagatcctacttgaaggctgtttggtggtggtcggcggcggcggaaagggcgcaatccccccacacgagtaatgctcaaacagatgctgcacaactgacggaggcataaaaatacatgcggagaccacagacaggcgtcccactgaaaaacgggggaagtggatcactcacacgcgaagttgtgtctcaagggcggttgaacttctcatccggatgtaacacaatcgggcgtggccaccccgcgcgggcgacaacaactaacctgagctgtcgactatacggaacctctaataattcagggcg

SEQ ID NO: 332031 - DNA, 1614 bp, Homo sapiens
ctaggccgggccaacggagcccgcctttacctccccactcggcgtccagtctcttagcaacgactccggcttcctaggaactgctcctttctcaaccattcctgcccacaacaccccagcttgctgccagcaaagcccctccacacccctcaaactccagacccttcacatcaatttactgttttcttcgacctcaccccagcaattttctctgaatcaaccccctttcctcctctcctaagtctctgagtttctctctcctcctgccatcctgagttctgccatccttaggggccgccaagacctctcttttcgttcctctcccgcctcagaccagcagccttttattttagatcatgtctggagggaagtcagcccagggtccagaggaagggggcgtctgcatcactgaagcccttatcactaagcggaacttgactttccctgaagatggggaactgtcagagaagatgcactcagcaatgttgtggaatgaatgaatgggtggatggaacaagtgcttttttctccatgaacgactcaaaaggaaggtttcacactcttgatgaactgcagactgtccgcctggaccgggaggggattactactatcaggaacttagaaggcctccagaatcttcacagtctctatctgcaagggaataagatccagcaaattgagaacctggcttgcatcccctccttgcgcttcctgtctctggcaggaaaccaaatcaggcaggtggaaaacctcctcgacctcccatgcctccagtttctggacctttctgagaacctgatagaaacattgaagctggatgagttcccccagagccttctcatcctcaacctgtctggaaacagctgcaccaaccaggatggctaccgcgagctggtgacagaagccctgccacttctcctggacctggacgggcagcctgtggtggagcgctggatttcggatgaggaggatgaagcctcaagcgatgaggagttcccagagctgagtggcccattctgctcagaacgaggcttcctcaaggagctggagcaggagctgagcaggcacagggagcaccggcaacagacggccctgacagagcacctgctgaggatggagatgcagcccaccctcaccgacctgcccctgctacctggggtgcccatggctggggacagcagcccttctgccactcctgcgcaaggggaggagacagtccctgaggccgtctcctcaccccaggcctcctctcccaccaagaaaccatgcagtctgattcccaggggccaccaaagctctttctggggaaggaagggggcacgagcagccacagcccccaaggcctctgtggctgaggcccccagcacaaccaaaactacggccaagagaagcaagaaatgattctctgtcaacctttctctactagtggagaggagtggggcctgcccctcttctcagacctctgacctgtgacagaagcccatccccagtaaagtgtctctaggccctgagtatgcttttcatgtcacttggggtatctcaggggaagaaaccagtgaaagctccaggaaacaaaatacagagctcagtgagccacctgattctaaaaagcga

SEQ ID NO: 332032 - DNA, 1380 bp, Homo sapiens
ctaggccgggccaacggagcccgcctttacctccccactcggcgtccagtctcttagcaacgactccggcttcctaggaactgctcctttctcaaccattcctgcccacaacaccccagcttgctgccagcaaagcccctccacacccctcaaactccagacccttcacatcaatttactgttttcttcgacctcaccccagcaattttctctgaatcaaccccctttcctcctctcctaagtctctgagtttctctctcctcctgccatcctgagttctgccatccttaggggccgccaagacctctcttttcgttcctctcccgcctcagaccagcagccttttattttagatcatgtctggagggaagtcagcccagggtccagaggaagggggcgtctgcatcactgaagcccttatcactaagcggaacttgactttccctgaagatggggaactgtcagagaagatgtttcacactcttgatgaactgcagactgtccgcctggaccgggaggggattactactatcaggaacttagaaggcctccagaatcttcacagtctctatctgcaagggaataagatccagcaaattgagaacctggcttgcatcccctccttgcgcttcctgtctctggcaggaaaccaaatcaggcaggtggaaaacctcctcgacctcccatgcctccagtttctggacctttctgagaacctgatagaaacattgaagctggatgagttcccccagagccttctcatcctcaacctgtctggaaacagctgcaccaaccaggatggctaccgcgagctggtgacagaagccctgccacttctcctggacctggacgggcagcctgtggtggagcgctggatttcggatgaggaggatgaagcctcaagcgatgaggagttcccagagctgagtggcccattctgctcagaacgaggcttcctcaaggagctggagcaggagctgagcaggcacagggagcaccggcaacagacggccctgacagagcacctgctgaggatggagatgcagcccaccctcaccgacctgcccctgctacctggggtgcccatggctggggacagcagcccttctgccactcctgcgcaaggggaggagacagtccctgaggccgtctcctcaccccaggcctcctctcccaccaagaaaccatgcagtctgattcccaggggcctgcccctcttctcagacctctgacctgtgacagaagcccatccccagtaaagtgtctctaggccctgagtatgcttttcatgtcacttggggtatctcaggggaagaaaccagtgaaagctccaggaaacaaaatacagagctcagtgagccacctgattctaaaaagcga

SEQ ID NO: 332033 - DNA, 189 bp, Homo sapiens
taagcggaacttgactttccctgaagatggggaactgtcagagaagatgtgagtgcatgggggagaaaaggggtgctagaaggctgaaacactcaggatgaccaggtccctgacgtgtactgatttgtcaactgatctttgtttctctccttactccacacattcaatcagtggtaatgcccagctgat

SEQ ID NO: 332034 - DNA, 1535 bp, Homo sapiens
ctaggccgggccaacggagcccgcctttacctccccactcggcgtccagtctcttagcaacgactccggcttcctaggaactgctcctttctcaaccattcctgcccacaacaccccagcttgctgccagcaaagcccctccacacccctcaaactccagacccttcacatcaatttactgttttcttcgacctcaccccagcaattttctctgaatcaaccccctttcctcctctcctaagtctctgagtttctctctcctcctgccatcctgagttctgccatccttaggggccgccaagacctctcttttcgttcctctcccgcctcagaccagcagccttttattttagatcatgtctggagggaagtcagcccagggtccagaggaagggggcgtctgcatcactgaagcccttatcactaagcggaacttgactttccctgaagatggggaactgtcagagaagatgtttcacactcttgatgaactgcagactgtccgcctggaccgggaggggattactactatcaggaacttagaaggcctccagaatcttcacagtctctatctgcaagggaataagatccagcaaattgagaacctggcttgcatcccctccttgcgcttcctgtctctggcaggaaaccaaatcaggcaggtggaaaacctcctcgacctcccatgcctccagtttctggacctttctgagaacctgatagaaacattgaagctggatgagttcccccagagccttctcatcctcaacctgtctggaaacagctgcaccaaccaggatggctaccgcgagctggtgacagaagccctgccacttctcctggacctggacgggcagcctgtggtggagcgctggatttcggatgaggaggatgaagcctcaagcgatgaggagttcccagagctgagtggcccattctgctcagaacgaggcttcctcaaggagctggagcaggagctgagcaggcacagggagcaccggcaacagacggccctgacagagcacctgctgaggatggagatgcagcccaccctcaccgacctgcccctgctacctggggtgcccatggctggggacagcagcccttctgccactcctgcgcaaggggaggagacagtccctgaggccgtctcctcaccccaggcctcctctcccaccaagaaaccatgcagtctgattcccaggggccaccaaagctctttctggggaaggaagggggcacgagcagccacagcccccaaggcctctgtggctgaggcccccagcacaaccaaaactacggccaagagaagcaagaaatgattctctgtcaacctttctctactagtggagaggagtggggcctgcccctcttctcagacctctgacctgtgacagaagcccatccccagtaaagtgtctctaggccctgagtatgcttttcatgtcacttggggtatctcaggggaagaaaccagtgaaagctccaggaaacaaaatacagagctcagtgagccacctgattctaaaaagcga

SEQ ID NO: 332035 - DNA, 1658 bp, Homo sapiens
ctaggccgggccaacggagcccgcctttacctccccactcggcgtccagtctcttagcaacgactccggcttcctaggaactgctcctttctcaaccattcctgcccacaacaccccagcttgctgccagcaaagcccctccacacccctcaaactccagacccttcacatcaatttactgttttcttcgacctcaccccagcaattttctctgaatcaaccccctttcctcctctcctaagtctctgagtttctctctcctcctgccatcctgagttctgccatccttaggggccgccaagacctctcttttcgttcctctcccgcctcagaccagcagccttttattttagatcatgtctggagggaagtcagcccagggtccagaggaagggggcgtctgcatcactgaagcccttatcactaagcggaacttgactttccctgaagatggggaactgtcagagaagatgtttcacactcttgatgaactgcagactgtccgcctggaccgggaggggattactactatcaggaacttagaaggcctccagaatcttcacagtctctatctgcaagggctccagcccatttcctgttttgaagaagaggaaactatgaagattcctgtacatcattcagatcctacttgaaggctgtttggtggtggtggtggtggttggttgatcttcagccttcccctgaataagatccagcaaattgagaacctggcttgcatcccctccttgcgcttcctgtctctggcaggaaaccaaatcaggcaggtggaaaacctcctcgacctcccatgcctccagtttctggacctttctgagaacctgatagaaacattgaagctggatgagttcccccagagccttctcatcctcaacctgtctggaaacagctgcaccaaccaggatggctaccgcgagctggtgacagaagccctgccacttctcctggacctggacgggcagcctgtggtggagcgctggatttcggatgaggaggatgaagcctcaagcgatgaggagttcccagagctgagtggcccattctgctcagaacgaggcttcctcaaggagctggagcaggagctgagcaggcacagggagcaccggcaacagacggccctgacagagcacctgctgaggatggagatgcagcccaccctcaccgacctgcccctgctacctggggtgcccatggctggggacagcagcccttctgccactcctgcgcaaggggaggagacagtccctgaggccgtctcctcaccccaggcctcctctcccaccaagaaaccatgcagtctgattcccaggggccaccaaagctctttctggggaaggaagggggcacgagcagccacagcccccaaggcctctgtggctgaggcccccagcacaaccaaaactacggccaagagaagcaagaaatgattctctgtcaacctttctctactagtggagaggagtggggcctgcccctcttctcagacctctgacctgtgacagaagcccatccccagtaaagtgtctctaggccctgagtatgcttttcatgtcacttggggtatctcaggggaagaaaccagtgaaagctccaggaaacaaaatacagagctcagtgagccacctgattctaaaaagcga

SEQ ID NO: 332036 - DNA, 224 bp, Homo sapiens
ttctttttttctaattcatttttaaagtatagtttgggcagatgtagtgttcatagtaggtagttgttattttttcatcactttcaatatatcatcctgccatcttctggcttgtgagattttttgctgagacatctgttgatcattttataagagtggccttgtatgtgccaagtcatctttttctttctgacttcaagattctctttgtcacttttgaattt

SEQ ID NO: 332037 - DNA, 323 bp, Homo sapiens
cctgcccccttgtcttgtatgcaataaataccagcgagcccagcctttctgggccactaccggtctcctcaacttgatggtagttgtctcccaagcccagctgttttctctttatctttttgtcttgtgtctttacttactacaatctcttgtctctgcacacggggtgaatacccgctaagccccatagtgctggaccctataagttctatatatatgcattgaagggggcctgaccctccacacctgtgggtatttctcatcaggtgggatgagagactcagaaaagaaagaagacacagagacaaagtatagagaaagaa

SEQ ID NO: 332038 - DNA, 261 bp, Homo sapiens
aaaatatacaacacttgtgccttgtcatcaaagcttctcagggacctagaaatgaaaatccttttcagctccaatttcccttcctttctcagagatgactgagatattttggtgattatctccagctttttcaatttatgcaaaatcgattttctgctcacttgatttctagctccccttgcacagacaacttccgttagatgatcaagcacccaccggtagaaaactagagtgaaaggtagagttaaaccctttcctctc

SEQ ID NO: 332039 - DNA, 239 bp, Homo sapiens
tgatgtctctggctatatcagcatgtggttgaaacaggttagttacttctggaatcttcacagaggaaaaaaaaaaagaaagaaacaggttagcaactattacttgagactgaattaatgctctctgtaagggctgagtgttccctccaagctcaccatctattctgaatcaatcaagaaaaaaaatggagggaaataaaaccacaaatgaaaaacatgattttttttttctttttttg

SEQ ID NO: 332040 - DNA, 135 bp, Homo sapiens
ctcgcccagtcgctgccctctcctttcccgcagcccgcggggcctgggctctccctgccagctcctcctgtgtccacttcagccttcccggttccccaggcagcctgtcctgccggtcactccgtctcccacctg

SEQ ID NO: 332041 - DNA, 431 bp, Homo sapiens
ctcctttatttcatcttctgtttctctttccttcgctctttcctctccaggcgcactggccttctaatgtattccttacatacattcttaaatacaatttcattgctgcttgtggactttgcacttggccatttcttctgtctgggatgcccttctatcaaatctctgtaccaccaactccttatcattcagaactcgctcaaatgttgcctcctcaagagggcctctcctgaccatcctacccaatgttgctcctgccccaggactctttgtcctatacccctcctgttctaacatcttcctaattcttatttcaatctgaaaacaaatgacttatatgttatatgttcccttttttattggcttctccctactaaaacttcaagagagcaaggatcctcttttttttttttttcttctgagacagagtc

SEQ ID NO: 332042 - DNA, 1108 bp, Homo sapiens
gcacttgctgtgacccccacctggaggcttctctgcagcaggagcaggagctgttacccttctaatccccacaatgaccccagcctaataatacaataatccccaagtagaaccaggggcccaaggccccctcgtcagctgggctcccacctccaagctgacgccctcaaccactctgctggggtgagcaaacccaggccccacagctggctagcgggatatccgtgtccacgattggcgccatgtgttttaagttgcagcgtcaaaaacatgaagagattgctttagcaaatatttacccagtcctgactctgcacatggcatcgttctaggagcccaaagatgttaacttgtttaataatcaagccctgtgaaggagtttatagcatctgtggattttggtacccacggaggtgctggaaccaatcgttgaggattccaaggacaactctatgatgcaggcacacctgtcctagctgctcaagggtcgtgggatgcaggtggcacggtgcacgccaagatggctgtgtccacagaggagctggaggccacggttcaggaagtcctggggagactgaagagccaccagtttttccagtccacatgggacactgttgccttcattgttttcctcaccttcatgggcaccgtgctgctcctgctgctgctggtcgtcgcccactgctgctgctgcagctcccccgggccccgcagggaaagccccaggaaggaaagacccaagggagtggataacttggccctggaaccctgaccctgtgtctcctgcccggtggcagtaacaaagccttctgtctgcccagaaaaaaaaaaaaaaaaaaaaaaaaaaaaaaagggggggcgggcccaaaagtttcccccggggggccccaaagattatacgcgttccccgcgttttttggttcacaacggggggccccccataatgggggagccgaattataatacacctagggcacctggcgcgcgccgtgttgtacaacgcgtcgtgcaccggggaacaccgtgcctcaccgtgggggactccgtgcgagagggaccccttatactccgggggggggccaccttagttggggcgaacaccttacag

SEQ ID NO: 332043 - DNA, 959 bp, Homo sapiens
gcacttgctgtgacccccacctggaggcttctctgcagcaggagcaggagctgttacccttctaatccccacaatgaccccagcctaataatacaataatccccaagtagaaccaggggcccaaggccccctcgtcagctgggctcccacctccaagctgacgccctcaaccactctgctggggagcccaaagatgttaacttgtttaataatcaagccctgtgaaggagtttatagcatctgtggattttggtacccacggaggtgctggaaccaatcgttgaggattccaaggacaactctatgatgcaggcacacctgtcctagctgctcaagggtcgtgggatgcaggtggcacggtgcacgccaagatggctgtgtccacagaggagctggaggccacggttcaggaagtcctggggagactgaagagccaccagtttttccagtccacatgggacactgttgccttcattgttttcctcaccttcatgggcaccgtgctgctcctgctgctgctggtcgtcgcccactgctgctgctgcagctcccccgggccccgcagggaaagccccaggaaggaaagacccaagggagtggataacttggccctggaaccctgaccctgtgtctcctgcccggtggcagtaacaaagccttctgtctgcccagaaaaaaaaaaaaaaaaaaaaaaaaaaaaaaagggggggcgggcccaaaagtttcccccggggggccccaaagattatacgcgttccccgcgttttttggttcacaacggggggccccccataatgggggagccgaattataatacacctagggcacctggcgcgcgccgtgttgtacaacgcgtcgtgcaccggggaacaccgtgcctcaccgtgggggactccgtgcgagagggaccccttatactccgggggggggccaccttagttggggcgaacaccttacag

SEQ ID NO: 332044 - DNA, 643 bp, Homo sapiens
aggatcctgatgcagcctctgggggaccggggcaggtggcacggtgcacgccaagatggctgtgtccacagaggagctggaggccacggttcaggaagtcctggggagactgaagagccaccagtttttccagtccacatgggacactgttgccttcattgttttcctcaccttcatgggcaccgtgctgctcctgctgctgctggtcgtcgcccactgctgctgctgcagctcccccgggccccgcagggaaagccccaggaaggaaagacccaagggagtggataacttggccctggaaccctgaccctgtgtctcctgcccggtggcagtaacaaagccttctgtctgcccagaaaaaaaaaaaaaaaaaaaaaaaaaaaaaaagggggggcgggcccaaaagtttcccccggggggccccaaagattatacgcgttccccgcgttttttggttcacaacggggggccccccataatgggggagccgaattataatacacctagggcacctggcgcgcgccgtgttgtacaacgcgtcgtgcaccggggaacaccgtgcctcaccgtgggggactccgtgcgagagggaccccttatactccgggggggggccaccttagttggggcgaacaccttacag

SEQ ID NO: 332045 - DNA, 682 bp, Homo sapiens
gtggagccggaagcaggaagcagcctgtgctccccaggacctgcctggttgggggaattggaggcttctaggaggtggcacggtgcacgccaagatggctgtgtccacagaggagctggaggccacggttcaggaagtcctggggagactgaagagccaccagtttttccagtccacatgggacactgttgccttcattgttttcctcaccttcatgggcaccgtgctgctcctgctgctgctggtcgtcgcccactgctgctgctgcagctcccccgggccccgcagggaaagccccaggaaggaaagacccaagggagtggataacttggccctggaaccctgaccctgtgtctcctgcccggtggcagtaacaaagccttctgtctgcccagaaaaaaaaaaaaaaaaaaaaaaaaaaaaaaagggggggcgggcccaaaagtttcccccggggggccccaaagattatacgcgttccccgcgttttttggttcacaacggggggccccccataatgggggagccgaattataatacacctagggcacctggcgcgcgccgtgttgtacaacgcgtcgtgcaccggggaacaccgtgcctcaccgtgggggactccgtgcgagagggaccccttatactccgggggggggccaccttagttggggcgaacaccttacag

SEQ ID NO: 332046 - DNA, 267 bp, Homo sapiens
tttagggagccactattcaacccactatgactgcccacccctgtttcttcttggagttgcatgagaactttgggggtcaatccactcactgcaggctgggcactgagctgacagcagctgcctctactctgcctatagcagtgccctgagtgttgtggtcaagtggtctcgatcctttagacctttaggcaatgggaagaccttatataaagagctcacagagcagctctgggattagctacttttgaacgtcagagtggtaattcc

SEQ ID NO: 332047 - DNA, 331 bp, Homo sapiens
tttatgtcagttcctggaattattacaggtgatgcacgatttttgctcctttagctaagcaaggtccaggttcttgtctcatgaccaggaaaaattaggcacgtggacaccagagagtgagtgcagtagaatttattaagtgaaaggaaagccttcagcaaagagaaggatcctgaaaaaatggtttccggttgcccccttcccagttgaataccctggcttgtatctaaaaaactgatgaggctgggttccttatttgtatatggcgtgaattcctggtggctccaccccatccttccagtgcgcatgcaggcccttagactgagctgct

SEQ ID NO: 332048 - DNA, 329 bp, Homo sapiens
gatttgaacaatagatctttagctaccattttagcaagaaatctcccaattcaaaatacatccctacagcccatctgcctaaattgatcagcactttatctggcctggaatacaattcaactttcagattttcacgatgtaatatatttgccaactgcagattgtagaaactgcagccagattggctatacctcacactgggtctttagcatagaggagctagttaagaacaacaaagcaaccatcatgtttttacagctgtagcttcaatcgaggaaaattacctcagtaaaaaggctgtctgcaatgaccaaccaggaggtacaagg

SEQ ID NO: 332049 - DNA, 533 bp, Homo sapiens
tcttaacatgtaggatattttctttctttccacttaatgttctgctttattttgtatgtatttctttcctttgaaagtcacaatctttcaatctttttctgttcaaatcctttccctacctttgaggttgtgcacttcacactgtacatataaggcaaagtgtatacattaaactccagataaggaaaatacaacctaacatgtatttaccatttactatgtaccaagtatttaccacttacaatgtactcttctaaatactattttatatgtgtattttattttaattctcatagccactttgtatcatagggacttttatttgtattctttattttttttttttaaaaaaaagggatacatgtgcagaacctgcaggtttgttacttaggtctatgtgtgccatggtggtttgctgcacctattgatccatcctctaagtttcctcccctcacaccctacccccaacaggccctgttgtgtgttgttcccctctctgtgtccatgtgttctcattgttcaactctcatagg

SEQ ID NO: 332050 - DNA, 539 bp, Homo sapiens
tagatgcctcctaggaggtggtaccacacttagtgagtcccaccttttaaaaactgcagagtagggcgggcgcagtggcttacgcctgtaatcccagcactttgggaggccaaggcaggcagatcacgaggtcaggagtttgagaccagcctggccaacatagtgaaactccgtctctactaaaaatacaaaaaaattagctgggcatggtggcaggtgcctgtaatcccagctacttcagaggccgaggcaaggagaatcacttgaacctgggaggcagagattgcagtgagccgagatcgcgccactgcactccagcccggcaacagtgcaagactctgtctcaaacaaaataaaacaaaaaagctgcagagtattctatgttaggtaagttcatctatatatgatgattaatatttatttattgttcaatgatatactatagttcagggagcttcttgcacagacagagacaacattgtatagtagttcagaacatggactgtgagcctagattacctggattaaatcctggctct

SEQ ID NO: 332051 - DNA, 507 bp, Homo sapiens
actaagaatgcatgtgcacagaggaaggaccacgtgaggacacagcaaaaaggtggacatctacaagccaagcagagaggcctcaggagaaaccaaccctgcccacagcttgatcttggccttccaggctccagaattgtgagaaataatttccattgtttaagctacacagcctgtggtattttgctatggcagcctaagcagatgaatacattcatcaaaattaaaacattctgcttattaaagaaaataaatacacaaacccacagactgataaaaatatttgtaatacatacatattacatatccaaatatgtgtacaattcatacacattaacaataaaagacaaacagctcaatttttaaaacaggcaaaaaattgaacagacttttttacaaaagaaaatatatgaatggccaatgtgtgtgtgacagtgtgcctaacatcattagtcaccaatttaacgcaaattaaaaccacagtgagatatcatttcacacccacga

SEQ ID NO: 332052 - DNA, 222 bp, Homo sapiens
ctgggcattgacagatgagtcacactgtgcctcatgatgcagtgtgcagaactggtccagccagggtcaagtggatggctctcaggccagtccacaccctcctctgggggaactagggcaagtctgctggctgcctcagtccttccctgtgaatgcagcccattattcctgaatcacatccttgtctgccattggtgattttgggtgcttcgtgggctttgg

SEQ ID NO: 332053 - DNA, 582 bp, Homo sapiens
aacgggtgatgcggttggcacgggcgggcaggatggcacaagcaggtcagggtggcacgtgtgggtagggtagcacgggtaggcagggtggcttgggccacaccaggcctggagagttaacggcggtgccaggggagggtgcagaaggggcctggtcccaacaccgcccacacctctctcagggccatagccccaacgcctccccaaccaaaccaactgggcttccctcagggccatcctcactctccttcaacacccgtgagaactggtaccacctggggccgcccagagagacaactcaaggttaacgtttggctcggcaaagagccaccaagaaatttctggcttcacagggaaaaaaacgaacatttccttgtgggagataccacatggaatgtgtggccggaggggcttctggaaacgatggtcagtgacgcaggtggcaccttgtgggttaccacgacccagtgcgggggagagcagtgggctccggccactgcagctgacaatggaggacccgggggtccagacactcccggcacagagctcttacccacaactaccaacatccagcgaccacca

SEQ ID NO: 332054 - DNA, 391 bp, Homo sapiens
cccccatcctgcggggtctgcactaactccggggagtgtcaggatggaattgtgggatacccagttggtatccagatgtccgaaaatcggtgtagaaactccacatgcacatttggttagaggtgtttgaccataactactattcaagaaaaagatctactcattagaaataaaaatcataaaattatacattctacaaaaacaaatcaaccttatctacctcccaatcctaccaaactacagaatgttagaacagaaggtctgaccatggactcaagagctgacgttaggaatgtcagcaccatcctgctctccaaggactcctcatcttcaacagactcctcatcttcaaaggaaagggtggaaactgcaacttgtgccatgatccctg

SEQ ID NO: 332055 - DNA, 403 bp, Homo sapiens
tatcctaggcctagtggatggaggggcaggcacagaagatgtcgtatcatctagctaccttagctaccttttgacccttactgggagacaggatacaaaatttttcttgttgtctaagtatcaagtgagtcagactactaatggtaggtagacaaacattatggtctggaatgttcaagggaaattgatgacagtggtacatcctaagggcctttctgtaagcagaagaaaggatttctaggagtggtggtgctgtgcacgtgtgttagtcacagaggactaggtgagaccgctagaatgaactgggaaaaggtagagttcatttggacccttgagggacctcagttccatgctgagttaggtactaatgttttagcagggaagtggtataggaagatggtgc

SEQ ID NO: 332056 - DNA, 662 bp, Homo sapiens
tttttatttctgggtttcttacagctcctggtctctccagtccaacaggaggcctctcatccacagaagcagtcctactgcccagcagacctctttcagagccttccagacatggctgacccctggcaagcaaggggctttttgagctgagaggcacttggctgggacttcaggaattcatggacagggctggcagatactgcatatgtttgagctgtagatgggattgagaacagaaagttgaaatggagacttattaaagttaccgtggagaactgctcaaaaattcattttgaattaaggaaacttaaattcattttaagtttccttagatctaaatgcaactgcacattacactcaaatatgttccttccttctcacacacaggactcccttgtgaaactcaaggggaagttcaagttgtccatcttcatctatgaagtagtcactttatcactgtctttacagattgcacagtctggggttttgtggtttctcttgtctcactctccagccaggaagaacttgtcatttgagtttttaaaatgtatcatttcttccccacctcaaaccacttgtatcccagtttctcatttaaagggagaaatggttatatagtcctctctttgcacctgattgaattataaatgatagaaacaaga

SEQ ID NO: 332057 - DNA, 171 bp, Homo sapiens
atgaaccacattacagcaaaattacttttttgactgaaatgcatgaagtctcaccacccacattaaaagtgatttatcatgtcattaatccagtcacactatatttcagggactgactatgaatgctttaaagcttaatctttctccctcactcatacacacaaagcttta

SEQ ID NO: 332058 - DNA, 3058 bp, Homo sapiens
agtcactgtcccggaacctggggcagcggagtcccgtgcgccctgtggtgacagctcaggagggtgtgtgcgctcagcaggggccagcatggaccagtctgtggcaatccaggagacgctggctgagggggaatactgcgtcatcgcggtgcaaggtgtgctgtgtgagggggacagccggcagagccgcctcctgggactcgtgcgctaccgcctggagcatggcggccaggaacacgctctcttcctctatacgcaccggaggatggccattaccggggacgatgtctctctggaccagatagtgccagtctcgcgggattttacgctggaagaagtgtccccagatggtgaactctacatccttggctcagatgtgaccgtccagctggacacagcagagcttagcctcgtattccaactgccctttggttcacaaaccaggatgttcctccacgaagttgccagggcctgtccaggcttcgattctgcgacccgggatcctgaattcctgtggctgtctcggtataggtgcgcagagctggagctggagatgccaacgccgcgcggttgtaactcggccctagttacctggccagggtacgcgacaattggcggaggtggttctaactttgatggtttgagaccaaatgggaagggagtgcctatggaccaaagctccaggggtcaagataaaccagaaagcttgcaaccaagacagaataaatccaagtccgaaattactgacatggttcgctcctccactatcacagtgtcggacaaggctcatattttatccatgcagaagtttggactgcgagatacaattgtgaaatcacatctactacagaaagaagaggattacacctatatccagaacttcaggttttttgcgggaacatacaatgtaaatgggcagtcccccaaagaatgcctccggctgtggctgagcaatggtatccaggccccagatgtctattgtgtagggttccaggagcttgatctgagtaaggaagcttttttctttcacgataccccaaaggaggaagagtggttcaaagctgtgtcagagggtcttcatccagatgccaaatatgcaaaggtgaagcttatccgactggttgggattatgctgctgttatatgtcaaacaggagcatgcagcttatatctcagaagtggaagccgagactgtggggacaggaatcatggggaggatgggcaacaagggaggcgtggcgatcaggttccagttccacaacaccagcatctgcgttgtgaattctcacttggcagcccacattgaagagtatgagaggaggaaccaggactataaggacatttgttctcgaatgcagttttgtcagcctgacccaagccttccccctctcaccatcagcaaccatgatgtgatcttgtggctgggggacctcaactacaggatagaagagctggatgtggaaaaagtgaaaaagctcatcgaagagaaggattttcaaatgctgtatgcatatgatcagctgaaaattcaggtggccgcaaagactgtctttgaaggcttcacagagggtgagctcacattccagcctacttacaagtatgatacgggctctgacgactgggataccagtgagaagtgccgtgctcctgcctggtgtgatcggattctctggaaagggaagaacatcactcagctgagttaccagagccacatggccctgaagaccagtgaccacaagcctgtcagctcagtgtttgacatcggggtgagggtcgtaaatgacgagctttaccggaagacactggaggaaattgttcgctccctggataagatggaaaatgccaacattccttctgtgtccctgtccaagcgagagttctgttttcagaatgtgaagtacatgcaattgaaagtagaatcctttacaattcataatggacaagtaccctgtcattttgaattcatcaacaagcctgatgaagagtcttactgtaagcagtggctgaatgccaaccccagcagaggcttcctcctgccagattctgatgttgagattgacttggagctcttcgtaaataagacgacagctacaaagctcaactcgggtgaagacaaaattgaggacattctggttctgcacttggacaggggaaaggattactttttgtctgtgtctgggaactacctgcccagctgttttgggtctcccattcatacactgtgttacatgagagagccaatcttggacctaccacttgaaaccattagtgagctgactctgatgccagtatggactggagatgatgggagccagttggatagccccatggaaatccccaaagagctctggatgatggttgattacctgtaccgaaatgctgtccagcaggaagatctgtttcagcaaccaggcctgaggtcagaatttgaacatatcagggactgcttggatactggaatgattgataacctctctgccagcaatcattctgtagccgaagccctgctgcttttcctggagagccttccagagcctgtcatctgttacagcacctaccataactgcttggagtgttctggcaactacacagcaagcaaacaggtcatttctactctccccatattccacaaaaatgtcttccactacttgatggcgtttttgcgagaactgctgaaaaattcagcaaaaaatcatttggatgagaatattctagctagcatatttggcagcttattgcttcgaaacccagctggtcaccaaaagcttgatatgacagagaagaagaaggctcaagaatttattcaccagttcctctgcaacccactctgagcctatctctcctcctattttacttgaggctgccaattaccagccccacctgtttcagctcaagagatgccttaagataattatgtgaggccacttggtagcaagaatggcagctatttcctgagcctagtaccccaattaagcccaccattggttagcacactcagcgctgtgagtcgtgaagacacgggagaaaatccaccataataaaactgacattcaattttc

SEQ ID NO: 332059 - DNA, 2515 bp, Homo sapiens
gcggcgggatgaggagcttgaggaagcaggcagggaaatgtctgccgccgccagctctcgggagcgcaacactgcaggtggttctaactttgatggtttgagaccaaatgggaagggagtgcctatggaccaaagctccaggggtcaagataaaccagaaagcttgcaaccaagacagaataaatccaagtccgaaattactgacatggttcgctcctccactatcacagtgtcggacaaggctcatattttatccatgcagaagtttggactgcgagatacaattgtgaaatcacatctactacagaaagaagaggattacacctatatccagaacttcaggttttttgcgggaacatacaatgtaaatgggcagtcccccaaagaatgcctccggctgtggctgagcaatggtatccaggccccagatgtctattgtgtagggttccaggagcttgatctgagtaaggaagcttttttctttcacgataccccaaaggaggaagagtggttcaaagctgtgtcagagggtcttcatccagatgccaaatatgcaaaggtgaagcttatccgactggttgggattatgctgctgttatatgtcaaacaggagcatgcagcttatatctcagaagtggaagccgagactgtggggacaggaatcatggggaggatgggcaacaagggaggcgtggcgatcaggttccagttccacaacaccagcatctgcgttgtgaattctcacttggcagcccacattgaagagtatgagaggaggaaccaggactataaggacatttgttctcgaatgcagttttgtcagcctgacccaagccttccccctctcaccatcagcaaccatgatgtgatcttgtggctgggggacctcaactacaggatagaagagctggatgtggaaaaagtgaaaaagctcatcgaagagaaggattttcaaatgctgtatgcatatgatcagctgaaaattcaggtggccgcaaagactgtctttgaaggcttcacagagggtgagctcacattccagcctacttacaagtatgatacgggctctgacgactgggataccagtgagaagtgccgtgctcctgcctggtgtgatcggattctctggaaagggaagaacatcactcagctgagttaccagagccacatggccctgaagaccagtgaccacaagcctgtcagctcagtgtttgacatcggggtgagggtcgtaaatgacgagctttaccggaagacactggaggaaattgttcgctccctggataagatggaaaatgccaacattccttctgtgtccctgtccaagcgagagttctgttttcagaatgtgaagtacatgcaattgaaagtagaatcctttacaattcataatggacaagtaccctgtcattttgaattcatcaacaagcctgatgaagagtcttactgtaagcagtggctgaatgccaaccccagcagaggcttcctcctgccagattctgatgttgagattgacttggagctcttcgtaaataagacgacagctacaaagctcaactcgggtgaagacaaaattgaggacattctggttctgcacttggacaggggaaaggattactttttgtctgtgtctgggaactacctgcccagctgttttgggtctcccattcatacactgtgttacatgagagagccaatcttggacctaccacttgaaaccattagtgagctgactctgatgccagtatggactggagatgatgggagccagttggatagccccatggaaatccccaaagagctctggatgatggttgattacctgtaccgaaatgctgtccagcaggaagatctgtttcagcaaccaggcctgaggtcagaatttgaacatatcagggactgcttggatactggaatgattgataacctctctgccagcaatcattctgtagccgaagccctgctgcttttcctggagagccttccagagcctgtcatctgttacagcacctaccataactgcttggagtgttctggcaactacacagcaagcaaacaggtcatttctactctccccatattccacaaaaatgtcttccactacttgatggcgtttttgcgagaactgctgaaaaattcagcaaaaaatcatttggatgagaatattctagctagcatatttggcagcttattgcttcgaaacccagctggtcaccaaaagcttgatatgacagagaagaagaaggctcaagaatttattcaccagttcctctgcaacccactctgagcctatctctcctcctattttacttgaggctgccaattaccagccccacctgtttcagctcaagagatgccttaagataattatgtgaggccacttggtagcaagaatggcagctatttcctgagcctagtaccccaattaagcccaccattggttagcacactcagcgctgtgagtcgtgaagacacgggagaaaatccaccataataaaactgacattcaattttc

SEQ ID NO: 332060 - DNA, 969 bp, Homo sapiens
agtactcattgatcagggcctgatcaacccttctaattatgctcctgccaaaattgacttctcataaagtgttctctctacttacttcactatttcccttctcctgccctttttttatactttctttgctctcaccccagttattaacctctgtaagtcccattttgtcttacattcaagacccaactaaaatgtcttatttctttcagtcttataggaacatgtagttaaaagtttgacttctaaattcatgttgcatttgacccgtacctctcttttgatacttatgccaagtggtaagcaaccagttttctgtgcacagtctttctcgtgcacttaggatcgtgtatacagttcttggactatagtaggcacttgagaaatgattcagtgaacaaaagacaaatcccggttcttcctctttcaggtcatttctactctccccatattccacaaaaatgtcttccactacttgatggcgtttttgcgagaactgctgaaaaattcagcaaaaaatcatttggatgagaatattctagctagcatatttggcagcttattgcttcgaaacccagctggtcaccaaaagcttgatatgacagagaagaagaaggctcaagaatttattcaccagttcctctgcaacccactctgagcctatctctcctcctattttacttgaggctgccaattaccagccccacctgtttcagctcaagagatgccttaagataattatgtgaggccacttggtagcaagaatggcagctatttcctgagcctagtaccccaattaacccgggtgagagagggagaccccgtctctaaaaataaaatgtaaaatcactgaaaaaatgagtgttcggtgaaacaagtgggattttctgggccagcaagtcttccaaactgtatatgatgcatcctgtctccatgtgtaatatattttaatgataaatgtatttttaacag

SEQ ID NO: 332061 - DNA, 725 bp, Homo sapiens
agtactcattgatcagggcctgatcaacccttctaattatgctcctgccaaaattgacttctcataaagtgttctctctacttacttcactatttcccttctcctgccctttttttatactttctttgctctcaccccagttattaacctctgtaagtcccattttgtcttacattcaagacccaactaaaatgtcttatttctttcagtcttataggaacatgtagttaaaagtttgacttctaaattcatgttgcatttgacccgtacctctcttttgatacttatgccaagtggtaagcaaccagttttctgtgcacagtctttctcgtgcacttaggatcgtgtatacagttcttggactatagtaggcacttgagaaatgattcagtgaacaaaagacaaatcccggttcttcctctttcaggtcatttctactctccccatattccacaaaaatgtcttccactacttgatggcgtttttgcgagaactgctgaaaaattcagcaaaaaatcatttggatgagaatattctaggtaagcagccaaatgtctatggaaagcatttctgcaaactgagagactcgtaatgagaaatgaggttgaggagggtcccaggtcccttgcagtagaactaaaatatcaagctctgggcaaagattttttaaagcagaaagttttgcgtttggacactcctccccacgatcctaacacaagagtaag

SEQ ID NO: 332062 - DNA, 627 bp, Homo sapiens
ccttaccacctccatgcctctagaactttgccaaacaccacatgcttgccattctagccaggctgtcttgactgtcgtgatgaagaactgggagccgttggtgtctttgcctgcgttggcatgctcgcccagccaggcccgtagtgcttcagtttgaagttctcatcggggaagcgctcaccgtagatgctctttcctcctgtgccatctcccggtgagtaatatgccacaaagaaacatctagaactttgtagcagacaagccagtcaaacaagatattcctatgcctaccttcctagggacttagaaactcttcagcttcctagagcttgcttagtgtatcagctgtatattgctgtgctacaaaccatcctgaaattttagtagtttttaacaccgagttattgctcctcatgattctgtgggtttcccatgtgggtcttctgcttgtctcacctagccccatttgtgtggttataatcagatggcagctgtgatggccggagggctccagatggcctctctcacatgtcttggtgttagcttttctctgggtttcactcaccacatggactcatcattcagaaggctagctcagtcttctgtaggtagtggcaagaacatgag

SEQ ID NO: 332063 - DNA, 600 bp, Homo sapiens
ttcaaatgtttttgtttgttgttttcatattcccagttggactataaactctttgttcttgtgtctcctgcatgccaagcacatttggatgcttgttggttggctgataccttttctttccttttcctaaccctttatgccttaccctcttccctcctgccttctttcccctttcctcttggcctgcccccggccaacattatttttaaaatttctctgcagattctgatgttgagattgacttggagctcttcgtaaataagacgacagctacaaagctcaactcgggtgaagacaaaattgaggacattctggttctgcacttggacaggggaaaggattactttttgtctgtgtctgggaactacctgcccagctgttttgggtctcccattcatacactgtgttacatgagagagccaatcttggacctaccacttgaaaccattagtgagctgactctgatgccagtatggactggagatgatgggagccagttggatagccccatggaaatccccaaagagctctggatgatggttgattacctgtaccgaaatgctgtccagcaggtaggttgtgtttaagcattcagacctg

SEQ ID NO: 332064 - DNA, 4446 bp, Homo sapiens
agtcactgtcccggaacctggggcagcggagtcccgtgcgccctgtggtgacagctcaggagggtgtgtgcgctcagcaggggccagcatggaccagtctgtggcaatccaggagacgctggctgagggggaatactgcgtcatcgcggtgcaaggtgtgctgtgtgagggggacagccggcagagccgcctcctgggactcgtgcgctaccgcctggagcatggcggccaggaacacgctctcttcctctatacgcaccggaggatggccattaccggggacgatgtctctctggaccagatagtgccagtctcgcgggattttacgctggaagaagtgtccccagatggtgaactctacatccttggctcagatgtgaccgtccagctggacacagcagagcttagcctcgtattccaactgccctttggttcacaaaccaggatgttcctccacgaagttgccagggcctgtccaggcttcgattctgcgacccgggatcctgaattcctgtggctgtctcggtataggtgcgcagagctggagctggagatgccaacgccgcgcggttgtaactcggccctagttacctggccagggtacgcgacaattggcggaggtggttctaactttgatggtttgagaccaaatgggaagggagtgcctatggaccaaagctccaggggtcaagataaaccagaaagcttgcaaccaagacagaataaatccaagtccgaaattactgacatggttcgctcctccactatcacagtgtcggacaaggctcatattttatccatgcagaagtttggactgcgagatacaattgtgaaatcacatctactacagaaagaagaggattacacctatatccagaacttcaggttttttgcgggaacatacaatgtaaatgggcagtcccccaaagaatgcctccggctgtggctgagcaatggtatccaggccccagatgtctattgtgtagggttccaggagcttgatctgagtaaggaagcttttttctttcacgataccccaaaggaggaagagtggttcaaagctgtgtcagagggtcttcatccagatgccaaatatgcaaaggtgaagcttatccgactggttgggattatgctgctgttatatgtcaaacaggagcatgcagcttatatctcagaagtggaagccgagactgtggggacaggaatcatggggaggatgggcaacaagggaggcgtggcgatcaggttccagttccacaacaccagcatctgcgttgtgaattctcacttggcagcccacattgaagagtatgagaggaggaaccaggactataaggacatttgttctcgaatgcagttttgtcagcctgacccaagccttccccctctcaccatcagcaaccatgatgtgatcttgtggctgggggacctcaactacaggatagaagagctggatgtggaaaaagtgaaaaagctcatcgaagagaaggattttcaaatgctgtatgcatatgatcagctgaaaattcaggtggccgcaaagactgtctttgaaggcttcacagagggtgagctcacattccagcctacttacaagtatgatacgggctctgacgactgggataccagtgagaagtgccgtgctcctgcctggtgtgatcggattctctggaaagggaagaacatcactcagctgagttaccagagccacatggccctgaagaccagtgaccacaagcctgtcagctcagtgtttgacatcggggtgagggtcgtaaatgacgagctttaccggaagacactggaggaaattgttcgctccctggataagatggaaaatgccaacattccttctgtgtccctgtccaagcgagagttctgttttcagaatgtgaagtacatgcaattgaaagtagaatcctttacaattcataatggacaagtaccctgtcattttgaattcatcaacaagcctgatgaagagtcttactgtaagcagtggctgaatgccaaccccagcagaggcttcctcctgccagattctgatgttgagattgacttggagctcttcgtaaataagacgacagctacaaagctcaactcgggtgaagacaaaattgaggacattctggttctgcacttggacaggggaaaggattactttttgtctgtgtctgggaactacctgcccagctgttttgggtctcccattcatacactgtgttacatgagagagccaatcttggacctaccacttgaaaccattagtgagctgactctgatgccagtatggactggagatgatgggagccagttggatagccccatggaaatccccaaagagctctggatgatggttgattacctgtaccgaaatgctgtccagcaggaagatctgtttcagcaaccaggcctgaggtcagaatttgaacatatcagggactgcttggatactggaatgattgataacctctctgccagcaatcattctgtagccgaagccctgctgcttttcctggagagccttccagagcctgtcatctgttacagcacctaccataactgcttggagtgttctggcaactacacagcaagcaaacaggtcatttctactctccccatattccacaaaaatgtcttccactacttgatggcgtttttgcgagaactgctgaaaaattcagcaaaaaatcatttggatgagaatattctagctagcatatttggcagcttattgcttcgaaacccagctggtcaccaaaagcttgatatgacagagaagaagaaggctcaagaatttattcaccagttcctctgcaacccactctgagcctatctctcctcctattttacttgaggctgccaattaccagccccacctgtttcagctcaagagatgccttaagataattatgtgaggccacttggtagcaagaatggcagctatttcctgagcctagtaccccaattaagcccaccattggttagcacactcagcgctgtgagtcgtgaagacacgggagaaaatccaccataataaaactgacattcaattttcaactttagttatttaacacagatttttttattttttatttttttttattttgagacggagttttgctctgtcgcgcagggtggagtgcggtggcacgatctcggctcactgcaacctctgcctcctgggtgcaagcaattatcctgcctcagcctcccgagtagctgggactacaggcacacactgccacgcccagctaattttttgcattttagtagagacggggtttcaccgtgttgcccaggctgttctaaaactcctgaactcaggtaatctgcctgcctcggcctccccaagtgctaggattacagatgtgagccaccacgcccggccttttttttttttttttcttttttgagatggagtttcactcttgttgcccaggctggagtgcgttggcgtggtcttggctcactgcaacctctgcctccttggttcaagcaattctcctgcctcagcctctcgagtagctgggattataggcgtccgccaccatgcctggctaatttttttgtgtgtttttagtatagacacggtttcaccatgttggccaggctggtctcgaatgcctggcctcaggtgatccacctgccttggcctcccaaagtgctgggattacaggcatgaaccaccacgcctggcctaaaatgtttttaaataactgtacttgtactcactcaccctacctccagggcatagtcagtctgggctgagatccccatgatcagatatttgatggaaagtcctgaaaggccaatgagttggatggcaagaatgcaggcagaagctgctggataaaataggctacagccacctcagatgctttcagtgctctgtctgaggatgtgtatatgcatatgcaaactcgacccccgttcctgcccagataatggctcaataactctgaggctggttgctcagcctctgagggcaatacaggcatttaaaaaattaaaatgaccaggcacagtggctcacgcctgtaatctcggcactttgggagactgaggtgggagcatcacttgagaccaggggtttgggaccaggctgggcaacacagggagaccccctctctacaaaaacatttttaaaaaattagctgggcgtggtgatgcgtgcctgtggtcccagttacttgggaggctgacgtgggtggctcacttgagcacaggagtttgaggctgcagtgacctatgaccacatcactgtacgccagcccgggtgagagagggagaccccgtctctaaaaataaaatgtaaaatcactgaaaaaatgagtgttcggtgaaacaagtgggattttctgggccagcaagtcttccaaactgtatatgatgcatcctgtctccatgtgtaatatattttaatgataaatgtatttttaacag

SEQ ID NO: 332065 - DNA, 2271 bp, Homo sapiens
agtactcattgatcagggcctgatcaacccttctaattatgctcctgccaaaattgacttctcataaagtgttctctctacttacttcactatttcccttctcctgccctttttttatactttctttgctctcaccccagttattaacctctgtaagtcccattttgtcttacattcaagacccaactaaaatgtcttatttctttcagtcttataggaacatgtagttaaaagtttgacttctaaattcatgttgcatttgacccgtacctctcttttgatacttatgccaagtggtaagcaaccagttttctgtgcacagtctttctcgtgcacttaggatcgtgtatacagttcttggactatagtaggcacttgagaaatgattcagtgaacaaaagacaaatcccggttcttcctctttcaggtcatttctactctccccatattccacaaaaatgtcttccactacttgatggcgtttttgcgagaactgctgaaaaattcagcaaaaaatcatttggatgagaatattctagctagcatatttggcagcttattgcttcgaaacccagctggtcaccaaaagcttgatatgacagagaagaagaaggctcaagaatttattcaccagttcctctgcaacccactctgagcctatctctcctcctattttacttgaggctgccaattaccagccccacctgtttcagctcaagagatgccttaagataattatgtgaggccacttggtagcaagaatggcagctatttcctgagcctagtaccccaattaagcccaccattggttagcacactcagcgctgtgagtcgtgaagacacgggagaaaatccaccataataaaactgacattcaattttcaactttagttatttaacacagatttttttattttttatttttttttattttgagacggagttttgctctgtcgcgcagggtggagtgcggtggcacgatctcggctcactgcaacctctgcctcctgggtgcaagcaattatcctgcctcagcctcccgagtagctgggactacaggcacacactgccacgcccagctaattttttgcattttagtagagacggggtttcaccgtgttgcccaggctgttctaaaactcctgaactcaggtaatctgcctgcctcggcctccccaagtgctaggattacagatgtgagccaccacgcccggccttttttttttttttttcttttttgagatggagtttcactcttgttgcccaggctggagtgcgttggcgtggtcttggctcactgcaacctctgcctccttggttcaagcaattctcctgcctcagcctctcgagtagctgggattataggcgtccgccaccatgcctggctaatttttttgtgtgtttttagtatagacacggtttcaccatgttggccaggctggtctcgaatgcctggcctcaggtgatccacctgccttggcctcccaaagtgctgggattacaggcatgaaccaccacgcctggcctaaaatgtttttaaataactgtacttgtactcactcaccctacctccagggcatagtcagtctgggctgagatccccatgatcagatatttgatggaaagtcctgaaaggccaatgagttggatggcaagaatgcaggcagaagctgctggataaaataggctacagccacctcagatgctttcagtgctctgtctgaggatgtgtatatgcatatgcaaactcgacccccgttcctgcccagataatggctcaataactctgaggctggttgctcagcctctgagggcaatacaggcatttaaaaaattaaaatgaccaggcacagtggctcacgcctgtaatctcggcactttgggagactgaggtgggagcatcacttgagaccaggggtttgggaccaggctgggcaacacagggagaccccctctctacaaaaacatttttaaaaaattagctgggcgtggtgatgcgtgcctgtggtcccagttacttgggaggctgacgtgggtggctcacttgagcacaggagtttgaggctgcagtgacctatgaccacatcactgtacgccagcccgggtgagagagggagaccccgtctctaaaaataaaatgtaaaatcactgaaaaaatgagtgttcggtgaaacaagtgggattttctgggccagcaagtcttccaaactgtatatgatgcatcctgtctccatgtgtaatatattttaatgataaatgtatttttaacag

SEQ ID NO: 332066 - DNA, 3116 bp, Homo sapiens
gcggcgggatgaggagcttgaggaagcaggcagggaaatgtctgccgccgccagctctcgggagcgcaacactgcaggtggttctaactttgatggtttgagaccaaatgggaagggagtgcctatggaccaaagctccaggggtcaagataaaccagaaagcttgcaaccaagacagaataaatccaagtccgaaattactgacatggttcgctcctccactatcacagtgtcggacaaggctcatattttatccatgcagaagtttggactgcgagatacaattgtgaaatcacatctactacagaaagaagaggattacacctatatccagaacttcaggttttttgcgggaacatacaatgtaaatgggcagtcccccaaagaatgcctccggctgtggctgagcaatggtatccaggccccagatgtctattgtgtagggttccaggagcttgatctgagtaaggaagcttttttctttcacgataccccaaaggaggaagagtggttcaaagctgtgtcagagggtcttcatccagatgccaaatatgcaaaggtgaagcttatccgactggttgggattatgctgctgttatatgtcaaacaggagcatgcagcttatatctcagaagtggaagccgagactgtggggacaggaatcatggggaggatgggcaacaagggaggcgtggcgatcaggttccagttccacaacaccagcatctgcgttgtgaattctcacttggcagcccacattgaagagtatgagaggaggaaccaggactataaggacatttgttctcgaatgcagttttgtcagcctgacccaagccttccccctctcaccatcagcaaccatgatgtgatcttgtggctgggggacctcaactacaggatagaagagctggatgtggaaaaagtgaaaaagctcatcgaagagaaggattttcaaatgctgtatgcatatgatcagctgaaaattcaggtggccgcaaagactgtctttgaaggcttcacagagggtgagctcacattccagcctacttacaagtatgatacgggctctgacgactgggataccagtgagaagtgccgtgctcctgcctggtgtgatcggattctctggaaagggaagaacatcactcagctgagttaccagagccacatggccctgaagaccagtgaccacaagcctgtcagctcagtgtttgacatcggggtgagggtcgtaaatgacgagctttaccggaagacactggaggaaattgttcgctccctggataagatggaaaatgccaacattccttctgtgtccctgtccaagcgagagttctgttttcagaatgtgaagtacatgcaattgaaagtagaatcctttacaattcataatggacaagtaccctgtcattttgaattcatcaacaagcctgatgaagagtcttactgtaagcagtggctgaatgccaaccccagcagaggcttcctcctgccagattctgatgttgagattgacttggagctcttcgtaaataagacgacagctacaaagctcaactcgggtgaagacaaaattgaggacattctggttctgcacttggacaggggaaaggattactttttgtctgtgtctgggaactacctgcccagctgttttgggtctcccattcatacactgtgttacatgagagagccaatcttggacctaccacttgaaaccattagtgagctgactctgatgccagtatggactggagatgatgggagccagttggatagccccatggaaatccccaaagagctctggatgatggttgattacctgtaccgaaatgctgtccagcaggaagatctgtttcagcaaccaggcctgaggtcagaatttgaacatatcagggactgcttggatactggaatgattgataacctctctgccagcaatcattctgtagccgaagccctgctgcttttcctggagagccttccagagcctgtcatctgttacagcacctaccataactgcttggagtgttctggcaactacacagcaagcaaacaggtcatttctactctccccatattccacaaaaatgtcttccactacttgatggcgtttttgcgagaactgctgaaaaattcagcaaaaaatcatttggatgagaatattctagctagcatatttggcagcttattgcttcgaaacccagctggtcaccaaaagcttgatatgacagagaagaagaaggctcaagaatttattcaccagttcctctgcaacccactctgagcctatctctcctcctattttacttgaggctgccaattaccagccccacctgtttcagctcaagagatgccttaagataattatgtgaggccacttggtagcaagaatggcagctatttcctgagcctagtaccccaattaagcccaccattggttagcacactcagcgctgtgagtcgtgaagacacgggagaaaatccaccataataaaactgacattcaattttcaactttagttatttaacacagatttttttattttttatttttttttattttgagacggagttttgctctgtcgcgcagggtggagtgcggtggcacgatctcggctcactgcaacctctgcctcctgggtgcaagcaattatcctgcctcagcctcccgagtagctgggactacaggcacacactgccacgcccagctaattttttgcattttagtagagacggggtttcaccgtgttgcccaggctgttctaaaactcctgaactcaggtaatctgcctgcctcggcctccccaagtgctaggattacagatgtgagccaccacgcccggccttttttttttttttttcttttttgagatggagtttcactcttgttgcccaggctggagtgcgttggctgacctatgaccacatcactgtacgccagcccgggtgagagagggagaccccgtctctaaaaataaaatgtaaaatcactgaaaaaatgagtgttcggtgaaacaagtgggattttctgggccagcaagtcttccaaactgtatatgatgcatcctgtctccatgtgtaatatattttaatgataaatgtatttttaacag

SEQ ID NO: 332067 - DNA, 2931 bp, Homo sapiens
gcggcgggatgaggagcttgaggaagcaggcagggaaatgtctgccgccgccagctctcgggagcgcaacactgcaggtggttctaactttgatggtttgagaccaaatgggaagggagtgcctatggaccaaagctccaggggtcaagataaaccagaaagcttgcaaccaagacagaataaatccaagtccgaaattactgacatggttcgctcctccactatcacagtgtcggacaaggctcatattttatccatgcagaagtttggactgcgagatacaattgtgaaatcacatctactacagaaagaagaggattacacctatatccagaacttcaggttttttgcgggaacatacaatgtaaatgggcagtcccccaaagaatgcctccggctgtggctgagcaatggtatccaggccccagatgtctattgtgtagggttccaggagcttgatctgagtaaggaagcttttttctttcacgataccccaaaggaggaagagtggttcaaagctgtgtcagagggtcttcatccagatgccaaatatgcaaaggtgaagcttatccgactggttgggattatgctgctgttatatgtcaaacaggagcatgcagcttatatctcagaagtggaagccgagactgtggggacaggaatcatggggaggatgggcaacaagggaggcgtggcgatcaggttccagttccacaacaccagcatctgcgttgtgaattctcacttggcagcccacattgaagagtatgagaggaggaaccaggactataaggacatttgttctcgaatgcagttttgtcagcctgacccaagccttccccctctcaccatcagcaaccatgatgtgatcttgtggctgggggacctcaactacaggatagaagagctggatgtggaaaaagtgaaaaagctcatcgaagagaaggattttcaaatgctgtatgcatatgatcagctgaaaattcaggtggccgcaaagactgtctttgaaggcttcacagagggtgagctcacattccagcctacttacaagtatgatacgggctctgacgactgggataccagtgagaagtgccgtgctcctgcctggtgtgatcggattctctggaaagggaagaacatcactcagctgagttaccagagccacatggccctgaagaccagtgaccacaagcctgtcagctcagtgtttgacatcggggtgagggtcgtaaatgacgagctttaccggaagacactggaggaaattgttcgctccctggataagatggaaaatgccaacattccttctgtgtccctgtccaagcgagagttctgttttcagaatgtgaagtacatgcaattgaaagtagaatcctttacaattcataatggacaagtaccctgtcattttgaattcatcaacaagcctgatgaagagtcttactgtaagcagtggctgaatgccaaccccagcagaggcttcctcctgccagattctgatgttgagattgacttggagctcttcgtaaataagacgacagctacaaagctcaactcgggtgaagacaaaattgaggacattctggttctgcacttggacaggggaaaggattactttttgtctgtgtctgggaactacctgcccagctgttttgggtctcccattcatacactgtgttacatgagagagccaatcttggacctaccacttgaaaccattagtgagctgactctgatgccagtatggactggagatgatgggagccagttggatagccccatggaaatccccaaagagctctggatgatggttgattacctgtaccgaaatgctgtccagcaggaagatctgtttcagcaaccaggcctgaggtcagaatttgaacatatcagggactgcttggatactggaatgattgataacctctctgccagcaatcattctgtagccgaagccctgctgcttttcctggagagccttccagagcctgtcatctgttacagcacctaccataactgcttggagtgttctggcaactacacagcaagcaaacaggtcatttctactctccccatattccacaaaaatgtcttccactacttgatggcgtttttgcgagaactgctgaaaaattcagcaaaaaatcatttggatgagaatattctagctagcatatttggcagcttattgcttcgaaacccagctggtcaccaaaagcttgatatgacagagaagaagaaggctcaagaatttattcaccagttcctctgcaacccactctgagcctatctctcctcctattttacttgaggctgccaattaccagccccacctgtttcagctcaagagatgccttaagataattatgtgaggccacttggtagcaagaatggcagctatttcctgagcctagtaccccaattaagcccaccattggttagcacactcagcgctgtgagtcgtgaagacacgggagaaaatccaccataataaaactgacattcaattttcaactttagttatttaacacagatttttttattttttatttttttttattttgagacggagttttgctctgtcgcgcagggtggagtgcggtggcacgatctcggctcactgcaacctctgcctcctgggtgcaagcaattatcctgcctcagctcccagttacttgggaggctgacgtgggtggctcacttgagcacaggagtttgaggctgcagtgacctatgaccacatcactgtacgccagcccgggtgagagagggagaccccgtctctaaaaataaaatgtaaaatcactgaaaaaatgagtgttcggtgaaacaagtgggattttctgggccagcaagtcttccaaactgtatatgatgcatcctgtctccatgtgtaatatattttaatgataaatgtatttttaacag

SEQ ID NO: 332068 - DNA, 2940 bp, Homo sapiens
gcggcgggatgaggagcttgaggaagcaggcagggaaatgtctgccgccgccagctctcgggagcgcaacactgcaggtggttctaactttgatggtttgagaccaaatgggaagggagtgcctatggaccaaagctccaggggtcaagataaaccagaaagcttgcaaccaagacagaataaatccaagtccgaaattactgacatggttcgctcctccactatcacagtgtcggacaaggctcatattttatccatgcagaagtttggactgcgagatacaattgtgaaatcacatctactacagaaagaagaggattacacctatatccagaacttcaggttttttgcgggaacatacaatgtaaatgggcagtcccccaaagaatgcctccggctgtggctgagcaatggtatccaggccccagatgtctattgtgtagggttccaggagcttgatctgagtaaggaagcttttttctttcacgataccccaaaggaggaagagtggttcaaagctgtgtcagagggtcttcatccagatgccaaatatgcaaaggtgaagcttatccgactggttgggattatgctgctgttatatgtcaaacaggagcatgcagcttatatctcagaagtggaagccgagactgtggggacaggaatcatggggaggatgggcaacaagggaggcgtggcgatcaggttccagttccacaacaccagcatctgcgttgtgaattctcacttggcagcccacattgaagagtatgagaggaggaaccaggactataaggacatttgttctcgaatgcagttttgtcagcctgacccaagccttccccctctcaccatcagcaaccatgatgtgatcttgtggctgggggacctcaactacaggatagaagagctggatgtggaaaaagtgaaaaagctcatcgaagagaaggattttcaaatgctgtatgcatatgatcagctgaaaattcaggtggccgcaaagactgtctttgaaggcttcacagagggtgagctcacattccagcctacttacaagtatgatacgggctctgacgactgggataccagtgagaagtgccgtgctcctgcctggtgtgatcggattctctggaaagggaagaacatcactcagctgagttaccagagccacatggccctgaagaccagtgaccacaagcctgtcagctcagtgtttgacatcggggtgagggtcgtaaatgacgagctttaccggaagacactggaggaaattgttcgctccctggataagatggaaaatgccaacattccttctgtgtccctgtccaagcgagagttctgttttcagaatgtgaagtacatgcaattgaaagtagaatcctttacaattcataatggacaagtaccctgtcattttgaattcatcaacaagcctgatgaagagtcttactgtaagcagtggctgaatgccaaccccagcagaggcttcctcctgccagattctgatgttgagattgacttggagctcttcgtaaataagacgacagctacaaagctcaactcgggtgaagacaaaattgaggacattctggttctgcacttggacaggggaaaggattactttttgtctgtgtctgggaactacctgcccagctgttttgggtctcccattcatacactgtgttacatgagagagccaatcttggacctaccacttgaaaccattagtgagctgactctgatgccagtatggactggagatgatgggagccagttggatagccccatggaaatccccaaagagctctggatgatggttgattacctgtaccgaaatgctgtccagcaggaagatctgtttcagcaaccaggcctgaggtcagaatttgaacatatcagggactgcttggatactggaatgattgataacctctctgccagcaatcattctgtagccgaagccctgctgcttttcctggagagccttccagagcctgtcatctgttacagcacctaccataactgcttggagtgttctggcaactacacagcaagcaaacaggtcatttctactctccccatattccacaaaaatgtcttccactacttgatggcgtttttgcgagaactgctgaaaaattcagcaaaaaatcatttggatgagaatattctagctagcatatttggcagcttattgcttcgaaacccagctggtcaccaaaagcttgatatgacagagaagaagaaggctcaagaatttattcaccagttcctctgcaacccactctgagcctatctctcctcctattttacttgaggctgccaattaccagccccacctgtttcagctcaagagatgccttaagataattatgtgaggccacttggtagcaagaatggcagctatttcctgagcctagtaccccaattaagcccaccattggttagcacactcagcgctgtgagtcgtgaagacacgggagaaaatccaccataataaaactgacattcaattttcaactttagttatttaacacagatttttttattttttatttttttttattttgagacggagttttgctctgtcgcgcagagatcgtgccactgcaatccagcctgggcgacagagcgagactctgtctcacaaacagaaaaaaggtctcggggtcaccggtacaccacacgcaaaattctaaaccttaaccacctttatttttgccagaaaaacaacacacagcagaggggcgcgacggcacaaaaaggaactccccccagagggggcgccaacccattaacggggtacccaacctttcgtcggggaacacaaggggggcccccaataaatcgagaaacacgaatctaaacgaaacggacgggcccggccggcttaacacacgcgtcgcgagcgccaaacggaagcgcggcgcccgggacaacgat

SEQ ID NO: 332069 - DNA, 993 bp, Homo sapiens
gcggcgggatgaggagcttgaggaagcaggcagggaaatgtctgccgccgccagctctcgggagcgcaacactgcaggtggttctaactttgatggtttgagaccaaatgggaagggagtgcctatggaccaaagctccaggggtcaagataaaccagaaagcttgcaaccaagacagaataaatccaagtccgaaattactgacatggttcgctcctccactatcacagtgtcggacaaggctcatattttatccatgcagaagtttggactgcgagatacaattgtgaaatcacatctactacagaaagaagaggattacacctatatccagaacttcaggttttttgcgggaacatacaatgtaaatgggcagtcccccaaagaatgcctccggctgtggctgagcaatggtatccaggccccagatgtctattgtgtagggttccaggagcttgatctgagtaaggaagcttttttctttcacgataccccaaaggaggaagagtggttcaaagctgtgtcagagggtcttcatccagatgccaaatatgcaaaggtgaagcttatccgactggttgggattatgctgctgttatatgtcaaacaggagcatgcagcttatatctcagaagtggaagccgagactgtggggacaggaatcatggggaggatgggcaacaagggaggcgtggcgatcaggttccagttccacaacaccagcatctgcgttgtgaattctcacttggcagcccacattgaagagtatgagaggaggaaccaggactataaggacatttgttctcgaatgcagttttgtcagcctgacccaagccttccccctctcaccatcagcaaccatgagtgagtctgggcttccaccccatgcggttcaccatgagtacatagagttgtgggctctgtcttttcatggggagatgcctggtggtggtttcctattgctgcaatggtggtagctcccacctcttggtt

SEQ ID NO: 332070 - DNA, 501 bp, Homo sapiens
taaggaagcttttttctttcacgataccccaaaggaggaagagtggttcaaagctgtgtcagagggtcttcatccagatgccaaatatgcaaaggtaagagaggagtcagggacctcttaattttatgttgccatgcagggaaattccaagatcatttttcaccttttccatgacctttatcttaagccagtcttaattatcccgcaattttcatttccagatcttccagaaggggtgcctccgggtgggaaagatgcagggtctcgccactcgtaggttagcacatagcatgcttggtgaattgaacagatgattacctgtgttctagtgtggagaaggagacacgtgaatactctcagccagcttccagactatgtttcctttggggtatttattcctgtttgcaatttctatttaatgccatgtctctcttttccaggtgaagcttatccgactggttgggattatgctgctgttatatgtcaaacaggagcatgcag

SEQ ID NO: 332071 - DNA, 409 bp, Homo sapiens
agccaccgtgcccggccagaaagtttgtaggtttaagtgactgacacaattaagtttgaattggatttctttggggatcctttccatagggcaacaagggaggcgtggcgatcaggttccagttccacaacaccagcatctgcgttgtgaattctcacttggcagcccacattgaagagtatgagaggaggaaccaggactataaggacatttgttctcgaatgcagttttgtcagcctgacccaagccttccccctctcaccatcagcaaccatgagtgagtctgggcttccaccccatgcggttcaccatgagtacatagagttgtgggctctgtcttttcatggggagatgcctggtggtggtttcctattgctgcaatggtggtagctcccacctcttggttata

SEQ ID NO: 332072 - DNA, 591 bp, Homo sapiens
gactccctatagggaatttggccctcagggccaaaaattcggcccgaggtggagagccttccagagcctgtcatctgttacagcacctaccataactgcttggagtgttctggcaactacacagcaagcaaacaggtcatttctactctccccatattccacaaaaatgtcttccactacttgatggcgtttttgcgagaactgctgaaaaattcagcaaaaaatcatttggatgagaatattctagctagcatatttggcagcttattgcttcgaaacccagctggtcaccaaaagcttgatatgacagagaagaagaaggctcaagaatttattcaccagttcctctgcaacccactctgagcctatctctcctcctattttacttgaggctgccaattaccagccccacctgtttcagctcaagagatgccttaagataattatgtgaggccacttggtagcaagaatggcagctatttcctgagcctagtaccccaattaagcccaccattggttagcacactcagcgctgtgagtcgtgaagacacgggagaaaatccaccataataaaactgacattcaattttc

SEQ ID NO: 332073 - DNA, 3903 bp, Homo sapiens
gcggcgggatgaggagcttgaggaagcaggcagggaaatgtctgccgccgccagctctcgggagcgcaacactgcaggtggttctaactttgatggtttgagaccaaatgggaagggagtgcctatggaccaaagctccaggggtcaagataaaccagaaagcttgcaaccaagacagaataaatccaagtccgaaattactgacatggttcgctcctccactatcacagtgtcggacaaggctcatattttatccatgcagaagtttggactgcgagatacaattgtgaaatcacatctactacagaaagaagaggattacacctatatccagaacttcaggttttttgcgggaacatacaatgtaaatgggcagtcccccaaagaatgcctccggctgtggctgagcaatggtatccaggccccagatgtctattgtgtagggttccaggagcttgatctgagtaaggaagcttttttctttcacgataccccaaaggaggaagagtggttcaaagctgtgtcagagggtcttcatccagatgccaaatatgcaaaggtgaagcttatccgactggttgggattatgctgctgttatatgtcaaacaggagcatgcagcttatatctcagaagtggaagccgagactgtggggacaggaatcatggggaggatgggcaacaagggaggcgtggcgatcaggttccagttccacaacaccagcatctgcgttgtgaattctcacttggcagcccacattgaagagtatgagaggaggaaccaggactataaggacatttgttctcgaatgcagttttgtcagcctgacccaagccttccccctctcaccatcagcaaccatgatgtgatcttgtggctgggggacctcaactacaggatagaagagctggatgtggaaaaagtgaaaaagctcatcgaagagaaggattttcaaatgctgtatgcatatgatcagctgaaaattcaggtggccgcaaagactgtctttgaaggcttcacagagggtgagctcacattccagcctacttacaagtatgatacgggctctgacgactgggataccagtgagaagtgccgtgctcctgcctggtgtgatcggattctctggaaagggaagaacatcactcagctgagttaccagagccacatggccctgaagaccagtgaccacaagcctgtcagctcagtgtttgacatcggggtgagggtcgtaaatgacgagctttaccggaagacactggaggaaattgttcgctccctggataagatggaaaatgccaacattccttctgtgtccctgtccaagcgagagttctgttttcagaatgtgaagtacatgcaattgaaagtagaatcctttacaattcataatggacaagtaccctgtcattttgaattcatcaacaagcctgatgaagagtcttactgtaagcagtggctgaatgccaaccccagcagaggcttcctcctgccagattctgatgttgagattgacttggagctcttcgtaaataagacgacagctacaaagctcaactcgggtgaagacaaaattgaggacattctggttctgcacttggacaggggaaaggattactttttgtctgtgtctgggaactacctgcccagctgttttgggtctcccattcatacactgtgttacatgagagagccaatcttggacctaccacttgaaaccattagtgagctgactctgatgccagtatggactggagatgatgggagccagttggatagccccatggaaatccccaaagagctctggatgatggttgattacctgtaccgaaatgctgtccagcaggaagatctgtttcagcaaccaggcctgaggtcagaatttgaacatatcagggactgcttggatactggaatgattgataacctctctgccagcaatcattctgtagccgaagccctgctgcttttcctggagagccttccagagcctgtcatctgttacagcacctaccataactgcttggagtgttctggcaactacacagcaagcaaacaggtcatttctactctccccatattccacaaaaatgtcttccactacttgatggcgtttttgcgagaactgctgaaaaattcagcaaaaaatcatttggatgagaatattctagctagcatatttggcagcttattgcttcgaaacccagctggtcaccaaaagcttgatatgacagagaagaagaaggctcaagaatttattcaccagttcctctgcaacccactctgagcctatctctcctcctattttacttgaggctgccaattaccagccccacctgtttcagctcaagagatgccttaagataattatgtgaggccacttggtagcaagaatggcagctatttcctgagcctagtaccccaattaagcccaccattggttagcacactcagcgctgtgagtcgtgaagacacgggagaaaatccaccataataaaactgacattcaattttcaactttagttatttaacacagatttttttattttttatttttttttattttgagacggagttttgctctgtcgcgcagggtggagtgcggtggcacgatctcggctcactgcaacctctgcctcctgggtgcaagcaattatcctgcctcagcctcccgagtagctgggactacaggcacacactgccacgcccagctaattttttgcattttagtagagacggggtttcaccgtgttgcccaggctgttctaaaactcctgaactcaggtaatctgcctgcctcggcctccccaagtgctaggattacagatgtgagccaccacgcccggccttttttttttttttttcttttttgagatggagtttcactcttgttgcccaggctggagtgcgttggcgtggtcttggctcactgcaacctctgcctccttggttcaagcaattctcctgcctcagcctctcgagtagctgggattataggcgtccgccaccatgcctggctaatttttttgtgtgtttttagtatagacacggtttcaccatgttggccaggctggtctcgaatgcctggcctcaggtgatccacctgccttggcctcccaaagtgctgggattacaggcatgaaccaccacgcctggcctaaaatgtttttaaataactgtacttgtactcactcaccctacctccagggcatagtcagtctgggctgagatccccatgatcagatatttgatggaaagtcctgaaaggccaatgagttggatggcaagaatgcaggcagaagctgctggataaaataggctacagccacctcagatgctttcagtgctctgtctgaggatgtgtatatgcatatgcaaactcgacccccgttcctgcccagataatggctcaataactctgaggctggttgctcagcctctgagggcaatacaggcatttaaaaaattaaaatgaccaggcacagtggctcacgcctgtaatctcggcactttgggagactgaggtgggagcatcacttgagaccaggggtttgggaccaggctgggcaacacagggagaccccctctctacaaaaacatttttaaaaaattagctgggcgtggtgatgcgtgcctgtggtcccagttacttgggaggctgacgtgggtggctcacttgagcacaggagtttgaggctgcagtgacctatgaccacatcactgtacgccagcccgggtgagagagggagaccccgtctctaaaaataaaatgtaaaatcactgaaaaaatgagtgttcggtgaaacaagtgggattttctgggccagcaagtcttccaaactgtatatgatgcatcctgtctccatgtgtaatatattttaatgataaatgtatttttaacag

SEQ ID NO: 332074 - DNA, 4044 bp, Homo sapiens
gcggcgggatgaggagcttgaggaagcaggcagggaaatgtctgccgccgccagctctcgggagcgcaacactgcaggtggttctaactttgatggtttgagaccaaatgggaagggagtgcctatggaccaaagctccaggggtcaagataaaccagaaagcttgcaaccaagacagaataaatccaagtccgaaattactgacatggttcgctcctccactatcacagtgtcggacaaggctcatattttatccatgcagaagtttggactgcgagatacaattgtgaaatcacatctactacagaaagaagaggattacacctatatccagaacttcaggttttttgcgggaacatacaatgtaaatgggcagtcccccaaagaatgcctccggctgtggctgagcaatggtatccaggccccagatgtctattgtgtagggttccaggagcttgatctgagtaaggaagcttttttctttcacgataccccaaaggaggaagagtggttcaaagctgtgtcagagggtcttcatccagatgccaaatatgcaaaggtgaagcttatccgactggttgggattatgctgctgttatatgtcaaacaggagcatgcagcttatatctcagaagtggaagccgagactgtggggacaggaatcatggggaggatgggcaacaagggaggcgtggcgatcaggttccagttccacaacaccagcatctgcgttgtgaattctcacttggcagcccacattgaagagtatgagaggaggaaccaggactataaggacatttgttctcgaatgcagttttgtcagcctgacccaagccttccccctctcaccatcagcaaccatgatgtgatcttgtggctgggggacctcaactacaggatagaagagctggatgtggaaaaagtgaaaaagctcatcgaagagaaggattttcaaatgctgtatgcatatgatcagctgaaaattcaggtggccgcaaagactgtctttgaaggcttcacagagggtgagctcacattccagcctacttacaagtatgatacgggctctgacgactgggataccagtgagaagtgccgtgctcctgcctggtgtgatcggattctctggaaagggaagaacatcactcagctgagttaccagagccacatggccctgaagaccagtgaccacaagcctgtcagctcagtgtttgacatcggggtgagggtcgtaaatgacgagctttaccggaagacactggaggaaattgttcgctccctggataagatggaaaatgccaacattccttctgtgtccctgtccaagcgagagttctgttttcagaatgtgaagtacatgcaattgaaagtagaatcctttacaattcataatggacaagtaccctgtcattttgaattcatcaacaagcctgatgaagagtcttactgtaagcagtggctgaatgccaaccccagcagaggcttcctcctgccagattctgatgttgagattgacttggagctcttcgtaaataagacgacagctacaaagctcaactcgggtgaagacaaaattgaggacattctggttctgcacttggacaggggaaaggattactttttgtctgtgtctgggaactacctgcccagctgttttgggtctcccattcatacactgtgttacatgagagagccaatcttggacctaccacttgaaaccattagtgagctgttctggagactgagaagtccaagatcaaggcactgccagctttggtgtctggttatcatcctaaactaaatttgctgccatctaaaagattcctatggagacaattctaatacaagggaactaatttggagcagacctatgactctgatgccagtatggactggagatgatgggagccagttggatagccccatggaaatccccaaagagctctggatgatggttgattacctgtaccgaaatgctgtccagcaggaagatctgtttcagcaaccaggcctgaggtcagaatttgaacatatcagggactgcttggatactggaatgattgataacctctctgccagcaatcattctgtagccgaagccctgctgcttttcctggagagccttccagagcctgtcatctgttacagcacctaccataactgcttggagtgttctggcaactacacagcaagcaaacaggtcatttctactctccccatattccacaaaaatgtcttccactacttgatggcgtttttgcgagaactgctgaaaaattcagcaaaaaatcatttggatgagaatattctagctagcatatttggcagcttattgcttcgaaacccagctggtcaccaaaagcttgatatgacagagaagaagaaggctcaagaatttattcaccagttcctctgcaacccactctgagcctatctctcctcctattttacttgaggctgccaattaccagccccacctgtttcagctcaagagatgccttaagataattatgtgaggccacttggtagcaagaatggcagctatttcctgagcctagtaccccaattaagcccaccattggttagcacactcagcgctgtgagtcgtgaagacacgggagaaaatccaccataataaaactgacattcaattttcaactttagttatttaacacagatttttttattttttatttttttttattttgagacggagttttgctctgtcgcgcagggtggagtgcggtggcacgatctcggctcactgcaacctctgcctcctgggtgcaagcaattatcctgcctcagcctcccgagtagctgggactacaggcacacactgccacgcccagctaattttttgcattttagtagagacggggtttcaccgtgttgcccaggctgttctaaaactcctgaactcaggtaatctgcctgcctcggcctccccaagtgctaggattacagatgtgagccaccacgcccggccttttttttttttttttcttttttgagatggagtttcactcttgttgcccaggctggagtgcgttggcgtggtcttggctcactgcaacctctgcctccttggttcaagcaattctcctgcctcagcctctcgagtagctgggattataggcgtccgccaccatgcctggctaatttttttgtgtgtttttagtatagacacggtttcaccatgttggccaggctggtctcgaatgcctggcctcaggtgatccacctgccttggcctcccaaagtgctgggattacaggcatgaaccaccacgcctggcctaaaatgtttttaaataactgtacttgtactcactcaccctacctccagggcatagtcagtctgggctgagatccccatgatcagatatttgatggaaagtcctgaaaggccaatgagttggatggcaagaatgcaggcagaagctgctggataaaataggctacagccacctcagatgctttcagtgctctgtctgaggatgtgtatatgcatatgcaaactcgacccccgttcctgcccagataatggctcaataactctgaggctggttgctcagcctctgagggcaatacaggcatttaaaaaattaaaatgaccaggcacagtggctcacgcctgtaatctcggcactttgggagactgaggtgggagcatcacttgagaccaggggtttgggaccaggctgggcaacacagggagaccccctctctacaaaaacatttttaaaaaattagctgggcgtggtgatgcgtgcctgtggtcccagttacttgggaggctgacgtgggtggctcacttgagcacaggagtttgaggctgcagtgacctatgaccacatcactgtacgccagcccgggtgagagagggagaccccgtctctaaaaataaaatgtaaaatcactgaaaaaatgagtgttcggtgaaacaagtgggattttctgggccagcaagtcttccaaactgtatatgatgcatcctgtctccatgtgtaatatattttaatgataaatgtatttttaacag

SEQ ID NO: 332075 - DNA, 2601 bp, Homo sapiens
gcggcgggatgaggagcttgaggaagcaggcagggaaatgtctgccgccgccagctctcgggagcgcaacactgcaggtggttctaactttgatggtttgagaccaaatgggaagggagtgcctatggaccaaagctccaggggtcaagataaaccagaaagcttgcaaccaagacagaataaatccaagtccgaaattactgacatggttcgctcctccactatcacagtgtcggacaaggctcatattttatccatgcagaagtttggactgcgagatacaattgtgaaatcacatctactacagaaagaagaggattacacctatatccagaacttcaggttttttgcgggaacatacaatgtaaatgggcagtcccccaaagaatgcctccggctgtggctgagcaatggtatccaggccccagatgtctattgtgtagggttccaggagcttgatctgagtaaggaagcttttttctttcacgataccccaaaggaggaagagtggttcaaagctgtgtcagagggtcttcatccagatgccaaatatgcaaaggtgaagcttatccgactggttgggattatgctgctgttatatgtcaaacaggagcatgcagcttatatctcagaagtggaagccgagactgtggggacaggaatcatggggaggatgggcaacaagggaggcgtggcgatcaggttccagttccacaacaccagcatctgcgttgtgaattctcacttggcagcccacattgaagagtatgagaggaggaaccaggactataaggacatttgttctcgaatgcagttttgtcagcctgacccaagccttccccctctcaccatcagcaaccatgatgtgatcttgtggctgggggacctcaactacaggatagaagagctggatgtggaaaaagtgaaaaagctcatcgaagagaaggattttcaaatgctgtatgcatatgatcagctgaaaattcaggtggccgcaaagactgtctttgaaggcttcacagagggtgagctcacattccagcctacttacaagtatgatacgggctctgacgactgggataccagtgagaagtgccgtgctcctgcctggtgtgatcggattctctggaaagggaagaacatcactcagctgagttaccagagccacatggccctgaagaccagtgaccacaagcctgtcagctcagtgtttgacatcggggtgagggtcgtaaatgacgagctttaccggaagacactggaggaaattgttcgctccctggataagatggaaaatgccaacattccttctgtgtccctgtccaagcgagagttctgttttcagaatgtgaagtacatgcaattgaaagtagaatcctttacaattcataatggacaagtaccctgtcattttgaattcatcaacaagcctgatgaagagtcttactgtaagcagtggctgaatgccaaccccagcagaggcttcctcctgccagattctgatgttgagattgacttggagctcttcgtaaataagacgacagctacaaagctcaactcgggtgaagacaaaattgaggacattctggttctgcacttggacaggggaaaggattactttttgtctgtgtctgggaactacctgcccagctgttttgggtctcccattcatacactgtgttacatgagagagccaatcttggacctaccacttgaaaccattagtgagctgactctgatgccagtatggactggagatgatgggagccagttggatagccccatggaaatccccaaagagctctggatgatggttgattacctgtaccgaaatgctgtccagcaggaagatctgtttcagcaaccaggcctgaggtcagaatttgaacatatcagggactgcttggatactggaatgattgataacctctctgccagcaatcattctgtagccgaagccctgctgcttttcctggagagccttccagagcctgtcatctgttacagcacctaccataactgcttggagtgttctggcaactacacagcaagcaaacaggtcatttctactctccccatattccacaaaaatgtcttccactacttgatggcgtttttgcgagaactgctgaaaaattcagcaaaaaatcatttggatgagaatattctagctagcatatttggcagcttattgcttcgaaacccagctggtcaccaaaagcttgatatgacagagaagaagaaggctcaagaatttattcaccagttcctctgcaacccactctgagcctatctctcctcctattttacttgaggctgccaattaccagccccacctgtttcagctcaagagatgccttaagataattatgtgaggccacttggtagcaagaatggcagctatttcctgagcctagtaccccaattaacccgggtgagagagggagaccccgtctctaaaaataaaatgtaaaatcactgaaaaaatgagtgttcggtgaaacaagtgggattttctgggccagcaagtcttccaaactgtatatgatgcatcctgtctccatgtgtaatatattttaatgataaatgtatttttaacag

SEQ ID NO: 332076 - DNA, 1246 bp, Homo sapiens
agggtctggcgagccggcgccggccgagctgcgggagccgcggagagcaccagctgacgccgcgggagctgctccggccgcaccatgcgggagctggccattgagatcggggtgcgagccctgctcttcggagtcttcgtttttacagagtttttggatccgttccagagagtcatccagccagaagagatctggctctataaaaatcctttggtgcaatcagataacatacctacccgcctcatgtttgcaatttctttcctcacacccctggctgttatttgtgtggtgaaaattatccggcgaacagacaagactgaaattaaggaagccttcttagcggtgtccttggctcttgctttgaatggagtctgcacaaacactattaaattaatagtgggaagacctcgccccgatttcttttaccgctgctttccagatggagtgatgaactcggaaatgcattgcacaggtgaccccgatctggtgtccgagggccgcaaaagcttccccagcatccattcctcctttgccttttcgggccttggcttcacgacgttctacttggcgggcaagctgcactgcttcaccgagagtgggcggggaaagagctggcggctctgtgctgccatcctgcccttgtactgcgccatgatgattgccctgtcccgcatgtgcgactacaagcatcactggcaagattcctttgtgggtggagtcatcggcctcatttttgcatacatttgctacagacagcactatcctcctctggccaacacagcttgccataaaccctacgttagtctgcgagtcccagcctcactgaagaaagaggagaggcccacagctgacagtgcacccagcttgcctctggaggggatcaccgaaggcccggtatgaccagtgtcctgggaggatggacactaagccctgggcacatctgccaccctgacatcataacacaatagaaatggttttctgtagtgtatttttcatcagttgtttctcaaagtcatcgtacttctgcttctgtttcactgatggtgttcctgctactttaaatgtctacttccaacatccttgaatttgcaagtgaaggacaacaatctctgagagacgtgtggaagaggctgtgaaggtggggtttggggagcttggccgattcgtctatctgaaatgtttgctgtaacagccaccttcctatgttttcatggttgtaaaacataataaaacctcccacgtggaa

SEQ ID NO: 332077 - DNA, 1279 bp, Homo sapiens
agggtctggcgagccggcgccggccgagctgcgggagccgcggagagcaccagctgacgccgcgggagctgctccggccgcaccatgcgggagctggccattgagatcggggtgcgagccctgctcttcggagtcttcgtttttacagagtttttggatccgttccagagagtcatccagccagaagagatctggctctataaaaatcctttggtgcaatcagataacatacctacccgcctcatgtttgcaatttctttcctcacacccctggctgttatttgtgtggtgaaaattatccggcgaacagacaagactgaaattaaggaagccttcttagcggtgtccttggctcttgctttgaatggagtctgcacaaacactattaaattaatagtgggaagacctcgccccgatttcttttaccgctgctttccagatggagtgatgaactcggaaatgcattgcacaggtgaccccgatctggtgtccgagggccgcaaaagcttccccagcatccattcctcctttgccttttcgggccttggcttcacgacgttctacttggcgggcaagctgcactgcttcaccgagagtgggcggggaaagagctggcggctctgtgctgccatcctgcccttgtactgcgccatgatgattgccctgtcccgcatgtgcgactacaagcatcactggcaagattcctttgtgggtggagtcatcggcctcatttttgcatacatttgctacagacagcactatcctcctctggccaacacagcttgccataaaccctacgttagtctgcgagtcccagcctcactgaagaaagaggagaggcccacagctgacagtgcacccagcttgcctctggaggggatcaccgaaggcccggtatgaccagtgtcctgggaggatggacactaagccctgggcacatctgccaccctgacatcataacacaatagaaatggttttctgtagtgtatttttcatcagttgtttctcaaagtcatcgtacttctgcttctgtttcactgatggtgttcctgctactttaaatgtctacttccaacatccttgaatttgcaagtgaaggacaacaatctctgagagacgtgtggaagaggctgtgaaggtggggtttggggagcttggccgattcgtctatctgaaatgtttgctgtaacagccaccttcctatgttttcatggttgtaaaacataataaaacctcccacgtggaaggaagacttggtgttggccacccagcgcaacaa

SEQ ID NO: 332078 - DNA, 939 bp, Homo sapiens
agggtctggcgagccggcgccggccgagctgcgggagccgcggagagcaccagctgacgccgcgggagctgctccggccgcaccatgcgggagctggccattgagatcggggtgcgagccctgctcttcggagtcttcgtttttacagagtttttggatccgttccagagagtcatccagccagaagagatctggctctataaaaatcctttggtgcaatcagataacatacctacccgcctcatgtttgcaatttctttcctcacacccctggctgttatttgtgtggtgaaaattatccggcgaacagacaagactgaaattaaggaagccttcttagcggtgtccttggctcttgctttgaatggagtctgcacaaacactattaaattaatagtgggaagacctcgccccgatttcttttaccgctgctttccagatggagtgatgaactcggaaatgcattgcacaggtgaccccgatctggtgtccgagggccgcaaaagcttccccagcatccattcctcctttgccttttcgggccttggcttcacgacgttctacttggcgggcaagctgcactgcttcaccgagagtgggcggggaaagagctggcggctctgtgctgccatcctgcccttgtactgcgccatgatgattgccctgtcccgcatgtgcgactacaagcatcactggcaagcagtgggaaggagtcagccaagcaggagaatggctgcgcctatttgctcttgagagaacatcaccagctgctgtgtcccaagtccagttccagagcagcgtactgggcccctggtctacatgcactgaaacttatgctgccatcacggacatgtctaaaataaaagagcttttcttttatttgtacttcttttcctgctttgctattgtggattaataaaattacatgcatgaaattac

SEQ ID NO: 332079 - DNA, 1581 bp, Homo sapiens
  misc_feature (1248)..(1248): n is a, c, g, or t
agggtctggcgagccggcgccggccgagctgcgggagccgcggagagcaccagctgacgccgcgggagctgctccggccgcaccatgcgggagctggccattgagatcggggtgcgagccctgctcttcggagtcttcgtttttacagagtttttggatccgttccagagagtcatccagccagaagagatctggctctataaaaatcctttggtgcaatcagataacatacctacccgcctcatgtttgcaatttctttcctcacacccctggctgttatttgtgtggtgaaaattatccggcgaacagacaagactgaaattaaggaagccttcttagcggtgtccttggctcttgctttgaatggagtctgcacaaacactattaaattaatagtgggaagacctcgccccgatttcttttaccgctgctttccagatggagtgatgaactcggaaatgcattgcacaggtgaccccgatctggtgtccgagggccgcaaaagcttccccagcatccattcctcctttgccttttcgggccttggcttcacgacgttctacttggcgggcaagctgcactgcttcaccgagagtgggcggggaaagagctggcggctctgtgctgccatcctgcccttgtactgcgccatgatgattgccctgtcccgcatgtgcgactacaagcatcactggcaagattcctttgtgggtggagtcatcggcctcatttttgcatacatttgctacagacagcactatcctcctctggccaacacagcttgccataaaccctacgttagtctgcgagtcccagcctcactgaagaaagaggagaggcccacagctgacagtgcacccagcttgcctctggaggggatcaccgaaggcccggtatgaccagtgtcctgggaggatggacactaagccctgggcacatctgccaccctgacatcataacacaatagaaatggttttctgtagtgtatttttcatcagttgtttctcaaagtcatcgtacttctgcttctgtttcactgatggtgttcctgctactttaaatgtctacttccaacatccttgaatttgcaagtgaaggacaacaatctctgagagacgtgtggaagaggctgtgaaggtggggtttggggagcttggccgattcgtctatctgaaatgtttgctgtaacagccaccttcctatgttttcatggttgtaaaacataataaaacctcccacgtggaaanaaaaacaacaaccaaaaaaaaaaaaaaaacaaaaagaaaaaaaaaatcgctgaggaggcgcgctcgcagcacgaccgcgagaaaaaagagtcttacaacaccccaacttagcggtgcgagcggcgatgcggggatcccccagcatggataacagcaccaacggtggtcaaaagacgtggttcctcagaagcaaacccggggcagacacaaacaacaaggggcgtcggaattcgcaaccccatatacaaaaaaggccgtgggggaacagcacagcgtgtctgagaaacacaactcccagagcggacgggcgaggcacaaccgaggggactcaaa

SEQ ID NO: 332080 - DNA, 1271 bp, Homo sapiens
agggtctggcgagccggcgccggccgagctgcgggagccgcggagagcaccagctgacgccgcgggagctgctccggccgcaccatgcgggagctggccattgagatcggggtgcgagccctgctcttcggagtcttcgtttttacagagtttttggatccgttccagagagtcatccagccagaagagatctggctctataaaaatcctttggtgcaatcagataacatacctacccgcctcatgtttgcaatttctttcctcacacccctggctgttatttgtgtggtgaaaattatccggcgaacagacaagactgaaattaaggaagccttcttagcggtgtccttggctcttgctttgaatggagtctgcacaaacactattaaattaatagtgggaagacctcgccccgatttcttttaccgctgctttccagatggagtgatgaactcggaaatgcattgcacaggtgaccccgatctggtgtccgagggccgcaaaagcttccccagcatccattcctcctttgccttttcgggccttggcttcacgacgttctacttggcgggcaagctgcactgcttcaccgagagtgggcggggaaagagctggcggctctgtgctgccatcctgcccttgtactgcgccatgatgattgccctgtcccgcatgtgcgactacaagcatcactggcaagattcctttgtgggtggagtcatcggcctcatttttgcatacatttgctacagacagcactatcctcctctggccaacacagcttgccataaaccctacgttagtctgcgagtcccagcctcactgaagaaagaggagaggcccacagctgacagtgcacccagcttgcctctggaggggatcaccccccgcccccccccaccctccccccgccatgatgccccccctcccccgagcgcccctacgtccatctcttatctctccctcctatctgccgtccctttctgctctgttcctcctcctcctccccatcccttctgtccttcttaacatcgccaaattttggcacacctctcatctccctctaccccctctccacttatacccacgccccccatccaccgcccgccgcacctcgcctcccctgtcctatctcatcccccccccccacctccccccacccacccatctaacatccccctctcccctccgctcactcctcactacgttatcgtcccctctgccccgttcccccctccgcggcacccgaccccttcacatccattactccc

SEQ ID NO: 332081 - DNA, 208 bp, Homo sapiens
caagcatcgggagcccagtggaactcgagcctctgccatcctggtttggttctgatagagttccatgaaccatccctgtcctaagtacaaagccccagaagtgagatcagataaagctttaggcgtgctcagaaccaaaagggagcgagggagagaaaagagctcccagatcccttgtgtgcctcctctttgaacaaaaacctcagaa

SEQ ID NO: 332082 - DNA, 263 bp, Homo sapiens
cgcgttctgcgtctgtctccgtgagtgggcagcacactgcatggttttttggtcattttattccttgaaactccataatatgttctttttaaagatgaatggcatttgaggccttagagaaaatacagatgatgaacttgtcttcaagaagtcatgtgtatgaatctctcaccttctaaaactaaagatttaagggcacctttgtattacagaggaacatcttgacttttaatgggtttcgtgccacgcagaacgcgcctaat

SEQ ID NO: 332083 - DNA, 602 bp, Homo sapiens
tttttcccaccattctgatcgatcccccacagaaaacaaattcacctattgtgaggtttaattgtatgtgtcaatctggttaggttatagttactcaatcaaacactaattgaggtattgccatgaaggtagtttatagatgtggttagcagttgtctgtgactgtaagtctacagctgcctttcagtgaaggagattattcttgataatgttggtgagcctcatccaatcaactggaaggccttcaaagcaaaactgaggtttccctgagaaagaaaaaattctgcctcaagactgcagtgtcagctcctgcctgagagtttccagcctgcaggcctgtcctggagatttcagacttgcagccttcacaaccacgtgaaccaattgcttgaaataaatctctttccattctcattactacttgtgctctgcctagaaggggctgaaagaaccaggggaggccagcctggctgaggacacctttcgtgtccctgcaccaccctggagtcctgcatgcctcacctggctccactctcgtctggagctgtgcctggctggagcagaagatgccagtacccttccttcttccccaatcttttttt

SEQ ID NO: 332084 - DNA, 244 bp, Homo sapiens
ggcccacctcctcccttttaaccttatcctaaccaccgctatattaggctcagaccccaaaagcctttcctaccttctctcagcttgtagattctcatgcccagatctgccagaaacgtctccccactgcctgctgtcactcttaactcctagaggcctgggtctctagccccagaaccacttcctctgcccagtctctgccctttcccagggggtagaactccttccctctgggccctggtac

SEQ ID NO: 332085 - DNA, 337 bp, Homo sapiens
gatgacctcataaataattttggaaccattgccaagtctccaagattgagcagtttggtttttagcctgcctacctggtggcacagaaagtgactgtgatcacacatcacaatgctgatgaacagtatgcctgagagtcttcctccactgtatgtgctgaccacagtgagcccaccagcagggataccaaagtgatcctccaccttaaggaagaccagatagagtacttagaagagagacaaatcaaagaagtagtgaagaagtactcatagttcataagctatcccatcactctttatttgggggaaggaatgagagaaggaaaccggtgacaatg

SEQ ID NO: 332086 - DNA, 195 bp, Homo sapiens
cccaactgggctcagatcccagaaaagcagaggcctgtccaggcctgagctggggctgggaggactcccaggtggtagtcagttccccattcctggggcttatcccagaaaccaaatcaacacagtccatctgggtgttcccggaggcgtgtttaagaaggcggcccggcctggttggggttattggggggggtc

SEQ ID NO: 332087 - DNA, 459 bp, Homo sapiens
tccttagttactgctacatacatgaccacatgaccagaatgcagatcaaagtgtctctgagccctacagagctctctggtgtgatggtctggcctcctgcctctgcctggcaccccctctgcccacccatccctgtcccatagctgtgcagtgcccaactctacagggaacacactatgaaagggcttagttatggggcagtgggggtttcatggctaagcctttaaggttcctccaccctagcaagtgtggggaaggagaaaactaccctaggatgttgagtaccaatgtggagaatacaagactgcagaggctcccatcccaggaggtggcgatgacattacatttccgggtttggaacaggaaggctcatggtgtgggcggcatgagagctagtccatgagtcaggcagagaatgtttacacgtggtggtaagaaaagcagcattccaggaatact

SEQ ID NO: 332088 - DNA, 468 bp, Homo sapiens
tctctagtcaggctaatcaagcaaaaaagaaagaagacaaactactaacatcagaaatgaaaggcaggccttcagtactgtttctatgaaaattaaaagataattgagggatagtatgagcaactctagtccaacaaatttgataacttagatgaaatggacaaattccttaaaagatcccttcctatagaagatacattgataaattgaattggtctgtatctattaaataaattgattcaataattaataaccttccaaaacagaaagcactggtccaaatggtttcactggtgaattttactaactacttaaagaagaaatgatgtgaattctctataatttcttccagaaaacagaagtagagggaatacttcctcattccatgaaaacagcaccattctaatatcaaaaccaaagacattacaagaaaactacagaccaccctctttcctgaatatagataca

SEQ ID NO: 332089 - DNA, 784 bp, Homo sapiens
  misc_feature (767)..(767): n is a, c, g, or t
  misc_feature (772)..(773): n is a, c, g, or t
  misc_feature (775)..(775): n is a, c, g, or t
  misc_feature (779)..(779): n is a, c, g, or t
  misc_feature (783)..(783): n is a, c, g, or t
ttctgtatctcaggatttctgactctaaaacccacgctctgttctgtcatctgtagcaccaccttgctctcaccagtcatcagaagggcaccaaggactaaaatggtccagggaggctgcttctgccctgagtgaggaggtgcccttctggccctgctgcatcacactcaaggatcatttagagggcacatgtgtccagtggctctccctattgtaaatatttcagtaaagagttaaaacaagagacattgttatgtgtggggaaatgtatagtgttctgcttttctcctgattgggttatcttgcctctgctaagtttggtttgtcccgtctctatctcagtggccactggagagagggtgtctgctgttcttccctgattccacctgtaaatacaaacgttatctcttctccctggctttgctctgtgcatttgaggtgggaatgtactcggtttggcgaaatagtctttcatgtccctaaacctgaagcctctattgactgtaaatggtagagaaaaggaaagtacccccaaggtgtgaactctagttagggaaaaaaatatttttgggcttgacagtgactcttagttaactcaattactggaataatagagtcagaaatatttctttgtttttcagggaggtagaggcaggagcgtaagatgtggaagctagaaatatccacttgtaacacggtattagaaggaatgttattttacatggaagataatcctcagtgatccttttttttttttcttcaagacngagtnntnctcngtcnc

SEQ ID NO: 332090 - DNA, 538 bp, Homo sapiens
cctatggtctccttattcatcaaagggcctacccattttctcacaagtgggcactcaatgtatatctgtggaatgcatgtatgaccaaagaggaagagtccacagaatgaaacgggagctcacatttgagtgtggtacaagtcacccggagcaatgaaagaccaccacagactggggtgtcagagtcagctacctttaaaaggcaaatacaggataaaagtttagaatgattcctggctccaaaacactgccttcagtctaatctaagattttaataaaaacatatttacgcctatgaaataataaaacatataacttttaggcaaatataagactaacaaaaacatacctacatatgtaaaattctagacttcaccttaggtaaagtcctaaaataacttcttcaaatttcctttgcctaatgaggatatggcccaggactagtactctgggatgctgattcaattcctacatttgctattatttggaattggcacattttattaatgatttaggtgacaagtacttgaaaaattag

SEQ ID NO: 332091 - DNA, 418 bp, Homo sapiens
atcaatggcaaatatcaatatttctcctacatttcaaaaagtagctgattattttctcaaaaattactgttaaaatataaatttcaaaaaagaaaattatgagtttcatacagatgtaaaattaacaagtgttaaagattttacttaaatcattaaagaaggaactagtaaggtgttataaccagttcaaaggagagtttaaaaacatacatatttttagttcaggaatattgaaatagatgtacaaagggaggcaaaacggactttttcacagtgggaagtcagttatactcagagtttgcatgtctatagataaaagtaattttgtttttctattaattatctacaacttacacagttataaaacagctctcaaagaatcagaatcagatacataggaaagatgtactgtagacaa

SEQ ID NO: 332092 - DNA, 2080 bp, Homo sapiens
gcaaagaaatattatagaggtttttttttcattccaagttttaagttgtccttgtgcatgaaatatgcacatgataaaaagggggttgccatcaatgcatattgtcttgaaaagccaagggctctttttcggtttttctctataatgaagactgttagactgaggactctataattatgctcactgaacaaataccttgaaagggaagtaattccaagtcatgtatcaaagattcaatttgacatgtatttactaaatgcctaacatgcctatgcattttgtttattcatttatagtaacaagatatagtgagttcatattctgtgccagcactgtgctcagtattgaaaaattggagtcacaagattcccactttcaagaacttacagtccaatggaggagaaagaagtatgaaaggatcaattgcagggtgacaagagagtgttccaatagtgcagatccagagctgtgattttaaaaagatgatgcaaaccagttatctcttgcttcatggagtggatgggctacaggaaatttgacaataaaacaaagcttaaataaattgcaacatttgtctacaactctactgtaaaattggaaatgcttttccacagaaaaacctctcaaaatgctgaatgcaaaagttgggatcacagaaacattgtgcctatttttggtctgctggaaactgtatttttacaaggtaatccctgttttcaatatagttcctgtcttgccactggcggttttcttgtagcatttttctagttctgagattgctactacccaaagtattcatttctttcttactggggtgtcctctgtcttcacagcctgcttctggattgtaggttttttcctttctttctgttgagatatttatggcatttgatagagtcaaaccagatgtattgcagccggacatacttatgtggcttcagatgtgtaaaataagtaacttcctatctttgtctgtctagctcaagagttgactgtggacgaggaatgcctgtattgattcattaatgtaataactatttactgactgcctaccatgtacaaccagaaacacagttcctaacctcatgaacttaccatgtaacatgggaagacaagcactaagttcttatttgtttgtaattgtgataaggctcagagaacaaatacagattcctatgaacccatgtatagggggaaatatttaggttccatttaatactgacatggctaagtatctcagtatttaagctgagatctgaaggataattagaagattcctcaggcagagggaagagcaaaggctgtgtgtggggcaggaagaaatgtggtcgtttgaggaacttcgagatcagcgtggccactgatgtgctgcagtgtagcaaagagagcaaaagaaagagagaaacagggaggaatggaattcagctcacgggctctggaatcagagtttcaagttggaatcctgacttcctagctgtatcggttaagaatttttttttgtggcatccaaagaacagaaagcctaccttactgaggttcatataaaaaggggaaattggccaggtgcggtgggtcacacctgtaatcccactactttgggaggccgaggcgggtggatcacctgaggtcaggagttcgagaccagcctggccacagtggtgaaaccccgtctctactaaaaatacagaaattagctgggtgtggtggcgggcgcttgtaatcccagctactcgggaagctgagggaggagaatcgcttgaacccgggaggcagaggttgcagtaagccaagatcgcgccattgcacttcagcctgggcaacaagagcaaaactctgtctcaaaaaaaaaaaaaaaaaaaaaaaaggcggtggggggaaattatctccacaaaacaaaaagtccgacaataagcaataagctgtccagggctgatacagggcatgatgaggtcatcacagatccaggttctttctgtcttctgctctgcattcgtagcctgtggctttgtcattccctcatctggaaatggcggctgcagccccaggcacaatggcccgttgaggaagaagggggacgatg

SEQ ID NO: 332093 - DNA, 1988 bp, Homo sapiens
  misc_feature (1772)..(1772): n is a, c, g, or t
  misc_feature (1907)..(1907): n is a, c, g, or t
tgagatcagaggcaagaaagttgaggatgtggtacaatgattatcaagcataaagtccttcatcgatggcagccaccaaggcctgtgttcattgcaaatcacaggatttttcccttgaaccataattggacaaaattgcacaggttttcctctctggagcagacaagatggagacaaattcctctctccccacgaacacctctggagggacacctgctgtatctgctggctatctcttcctggatatcatcacttatctggtatttgcagtcacctttgtcctcggggtcctgggcaacgggcttgtgatctgggtggctggattccggatgacacacacagtcaccaccatcagttacctgaacctggccgtggctgacttctgtttcacctccactttgccattcttcatggtcaggaaggccatgggaggacattggcctttcggctggttcctgtgcaaattcgtctttaccatagtggacatcaacttgttcggaagtgtcttcctgatcgccctcattgctctggaccgctgtgtttgcgtcctgcatccagtctggacccagaaccaccgcaccgtgagcctggccaagaaggtgatcattgggccctgggtgatggctctgctcctcacattgccagttatcattcgtgtgactacagtacctggtaaaacggggacagtagcctgcacttttaacttttcgccctggaccaacgaccctaaagagaggataaatgtggccgttgccatgttgacggtgagaggcatcatccggttcatcattggcttcagcgcacccatgtccatcgttgctgtcagttatgggcttattgccaccaagatccacaagcaaggcttgattaagtccagtcgtcccttacgggtcctctcctttgtcgcagcagccttttttctctgctggtccccatatcaggtggtggcccttatagccacagtcagaatccgtgagttattgcaaggcatgtacaaagaaattggtattgcagtggatgtgacaagtgccctggccttcttcaacagctgcctcaaccccatgctctatgtcttcatgggccaggacttccgggagaggctgatccacgcccttcccgccagtctggagagggccctgaccgaggactcaacccaaaccagtgacacagctaccaattctactttaccttctgcagaggtggcgttacaggcaaagtgaggagggagctgggggacactttcgagctcccagctccagcttcgtctcaccttgagttaggctgagccacaggcatttcctgcttattttaggattacccactcatcagaaaaaaaaaaaagcctttgtgtcccctgatttggggagaataaacagatatgagtttattattgacttcttttttgattttggacctcagcctcgggtggtcagggtgggaaatgataggaagaagctgtcatctgcatcctagtttgcctgaaatgaacccaaataatacccattattattagtcctgaattatgagtagtgaatgatacccatcattctggcatcatgatgagtagtgtccacttccattctgaaaagtgccctgctgtgaaaaataaattatatagtcatcctaggtaaatgaaggaggagggagaagtgtgaaagagtatggcttaaatcagacaagatatacaagaagatactttatatagggcaggagcggtggctcatgcctgtaatcccagcactttgggaggccgaggcaggcggatcaccagnggtcaggaattcgagaacagcctggccaacatggtgaaaccctgtctctactaaaaatacaaaaattagctgggcgtagtggcaggctcccgtaatcccagctactcaggagaccgaggcaggagaatcgcttgnacctggaaggcggaggttgtagtgagccaagaaaacgccactacactccagcctgggtgacagagagagactccggctcag

SEQ ID NO: 332094 - DNA, 1261 bp, Homo sapiens
  misc_feature (1235)..(1235): n is a, c, g, or t
tctccccaggagacccagacctagaactacccagagcaagaccacagctggtgaacagtccaggagcagacaagatggagacaaattcctctctccccacgaacacctctggagggacacctgctgtatctgctggctatctcttcctggatatcatcacttatctggtatttgcagtcacctttgtcctcggggtcctgggcaacgggcttgtgatctgggtggctggattccggatgacacacacagtcaccaccatcagttacctgaacctggccgtggctgacttctgtttcacctccactttgccattcttcatggtcaggaaggccatgggaggacattggcctttcggctggttcctgtgcaaattcgtctttaccatagtggacatcaacttgttcggaagtgtcttcctgatcgccctcattgctctggaccgctgtgtttgcgtcctgcatccagtctggacccagaaccaccgcaccgtgagcctggccaagaaggtgatcattgggccctgggtgatggctctgctcctcacattgccagttatcattcgtgtgactacagtacctggtaaaacggggacagtagcctgcacttttaacttttcgccctggaccaacgaccctaaagagaggataaatgtggccgttgccatgttgacggtgagaggcatcatccggttcatcattggcttcagcgcacccatgtccatcgttgctgtcagttatgggcttattgccaccaagatccacaagcaaggcttgattaagtccagtcgtcccttacgggtcctctcctttgtcgcagcagccttttttctctgctggtccccatatcaggtggtggcccttatagccacagtcagaatccgtgagttattgcaaggcatgtacaaagaaattggtattgcagtggatgtgacaagtgccctggccttcttcaacagctgcctcaaccccatgctctatgtcttcatgggccaggacttccgggagaggctgatccacgcccttcccgccagtctggagagggccctgaccgaggactcaacccaaaccagtgacacagctaccaattctactttaccttctgcagaggtggcgttacaggcaaagtgaggagggagctgggggacactttcgagctcccagctccagcttcgtctcaccttgagttatggtctggaagcaaaaaacaagggcatgtgtggcgctggcctttatctntttatgagcttatccccaactgtctc

SEQ ID NO: 332095 - DNA, 1895 bp, Homo sapiens
  misc_feature (1679)..(1679): n is a, c, g, or t
  misc_feature (1814)..(1814): n is a, c, g, or t
tctccccaggagacccagacctagaactacccagagcaagaccacagctggtgaacagtccaggagcagacaagatggagacaaattcctctctccccacgaacacctctggagggacacctgctgtatctgctggctatctcttcctggatatcatcacttatctggtatttgcagtcacctttgtcctcggggtcctgggcaacgggcttgtgatctgggtggctggattccggatgacacacacagtcaccaccatcagttacctgaacctggccgtggctgacttctgtttcacctccactttgccattcttcatggtcaggaaggccatgggaggacattggcctttcggctggttcctgtgcaaattcgtctttaccatagtggacatcaacttgttcggaagtgtcttcctgatcgccctcattgctctggaccgctgtgtttgcgtcctgcatccagtctggacccagaaccaccgcaccgtgagcctggccaagaaggtgatcattgggccctgggtgatggctctgctcctcacattgccagttatcattcgtgtgactacagtacctggtaaaacggggacagtagcctgcacttttaacttttcgccctggaccaacgaccctaaagagaggataaatgtggccgttgccatgttgacggtgagaggcatcatccggttcatcattggcttcagcgcacccatgtccatcgttgctgtcagttatgggcttattgccaccaagatccacaagcaaggcttgattaagtccagtcgtcccttacgggtcctctcctttgtcgcagcagccttttttctctgctggtccccatatcaggtggtggcccttatagccacagtcagaatccgtgagttattgcaaggcatgtacaaagaaattggtattgcagtggatgtgacaagtgccctggccttcttcaacagctgcctcaaccccatgctctatgtcttcatgggccaggacttccgggagaggctgatccacgcccttcccgccagtctggagagggccctgaccgaggactcaacccaaaccagtgacacagctaccaattctactttaccttctgcagaggtggcgttacaggcaaagtgaggagggagctgggggacactttcgagctcccagctccagcttcgtctcaccttgagttaggctgagccacaggcatttcctgcttattttaggattacccactcatcagaaaaaaaaaaaagcctttgtgtcccctgatttggggagaataaacagatatgagtttattattgacttcttttttgattttggacctcagcctcgggtggtcagggtgggaaatgataggaagaagctgtcatctgcatcctagtttgcctgaaatgaacccaaataatacccattattattagtcctgaattatgagtagtgaatgatacccatcattctggcatcatgatgagtagtgtccacttccattctgaaaagtgccctgctgtgaaaaataaattatatagtcatcctaggtaaatgaaggaggagggagaagtgtgaaagagtatggcttaaatcagacaagatatacaagaagatactttatatagggcaggagcggtggctcatgcctgtaatcccagcactttgggaggccgaggcaggcggatcaccagnggtcaggaattcgagaacagcctggccaacatggtgaaaccctgtctctactaaaaatacaaaaattagctgggcgtagtggcaggctcccgtaatcccagctactcaggagaccgaggcaggagaatcgcttgnacctggaaggcggaggttgtagtgagccaagaaaacgccactacactccagcctgggtgacagagagagactccggctcag

SEQ ID NO: 332096 - DNA, 1299 bp, Homo sapiens
  misc_feature (1113)..(1113): n is a, c, g, or t
  misc_feature (1124)..(1124): n is a, c, g, or t
  misc_feature (1128)..(1128): n is a, c, g, or t
  misc_feature (1134)..(1134): n is a, c, g, or t
  misc_feature (1136)..(1136): n is a, c, g, or t
  misc_feature (1142)..(1143): n is a, c, g, or t
  misc_feature (1148)..(1148): n is a, c, g, or t
  misc_feature (1156)..(1158): n is a, c, g, or t
  misc_feature (1164)..(1164): n is a, c, g, or t
  misc_feature (1173)..(1173): n is a, c, g, or t
  misc_feature (1176)..(1176): n is a, c, g, or t
  misc_feature (1181)..(1182): n is a, c, g, or t
  misc_feature (1185)..(1185): n is a, c, g, or t
  misc_feature (1196)..(1196): n is a, c, g, or t
  misc_feature (1200)..(1200): n is a, c, g, or t
  misc_feature (1202)..(1202): n is a, c, g, or t
  misc_feature (1216)..(1216): n is a, c, g, or t
  misc_feature (1226)..(1226): n is a, c, g, or t
  misc_feature (1229)..(1229): n is a, c, g, or t
  misc_feature (1232)..(1232): n is a, c, g, or t
  misc_feature (1236)..(1236): n is a, c, g, or t
  misc_feature (1238)..(1238): n is a, c, g, or t
  misc_feature (1241)..(1241): n is a, c, g, or t
  misc_feature (1256)..(1256): n is a, c, g, or t
tctccccaggagacccagacctagaactacccagagcaagaccacagctggtgaacagtccaggagcagacaagatggagacaaattcctctctccccacgaacacctctggagggacacctgctgtatctgctggctatctcttcctggatatcatcacttatctggtatttgcagtcacctttgtcctcggggtcctgggcaacgggcttgtgatctgggtggctggattccggatgacacacacagtcaccaccatcagttacctgaacctggccgtggctgacttctgtttcacctccactttgccattcttcatggtcaggaaggccatgggaggacattggcctttcggctggttcctgtgcaaattcgtctttaccatagtggacatcaacttgttcggaagtgtcttcctgatcgccctcattgctctggaccgctgtgtttgcgtcctgcatccagtctggacccagaaccaccgcaccgtgagcctggccaagaaggtgatcattgggccctgggtgatggctctgctcctcacattgccagttatcattcgtgtgactacagtacctggtaaaacggggacagtagcctgcacttttaacttttcgccctggaccaacgaccctaaagagaggataaatgtggccgttgccatgttgacggtgagaggcatcatccggttcatcattggcttcagcgcacccatgtccatcgttgctgtcagttatgggcttattgccaccaagatccacaagcaaggcttgattaagtccagtcgtcccttacgggtcctctcctttgtcgcagcagccttttttctctgctggtccccatatcaggtggtggcccttatagccacagtcagaatccgtgagttattgcaaggcatgtacaaagaaattggtattgcagtggatgtgacaagtgccctggccttcttcaacagctgcctcaaccccatgctctatgtcttcatgggccaggacttccgggagaggctgatccacgcccttcccgccagtctggagagggccctgaccgaggactcaacccaaaccagtgacacagctaccaattctactttaccttctgcagagtgcgtanagcaagtgagnggantggggnanttcgannccacncagctcgnnnacttantagctacanagnattcnnctntttagataccntcananaaaaaaaaaccttnttcctgattnggnganaaanantanttaaaaaaaaaaaanttttttttttttttttttttttttttttttttttttttttttt

SEQ ID NO: 332097 - DNA, 379 bp, Homo sapiens
tttcagttcaactaattgtttaattttcctcttgatttcattgttaacctagagatcattcagtagcagattaatttccatgtgtttgtatagtttttagggttccttttggagttgatttctaattttattccactgtgatctgagagagtgcttaatataattttgattttcttaaatttatttagacttgttttgtggcctatcatagggtctatcttgaagaatgttccatatgctgatgaaaagaatgtatgttctgcagttgttgggtagaatgttctgtaaatatttgttaagtccatttgttctagaatatagtttaagtccattgtttcttggttgacttccttgatgacttctctagtgctgtcagtgg

SEQ ID NO: 332098 - DNA, 949 bp, Homo sapiens
  misc_feature (845)..(845): n is a, c, g, or t
aaccccccaccggagtagtcaggtacaggccttggtttggtcgctgcggcggtgggaaatgctggcgcgcgcggcgcggggcactggggcccttttgctgaggggctctctactggcttctggccgcgctccgcgccgcgcctcctctggattgccccgaaacaccgtggtactgttcgtgccgcagcaggaggcctgggtggtggagcgaatgggccgattccaccggatcctggagcctggtttgaacatcctcatccctgtgttagaccggatccgatatgtgcagagtctcaaggaaattgtcatcaacgtgcctgagcagtcggctgtgactctcgacaatgtaactctgcaaatcgatggagtcctttacctgcgcatcatggacccttacaaggcaagctacggtgtggaggaccctgagtatgccgtcacccagctagctcaaacaaccatgagatcagagctcggcaaactctctctggacaaagtcttccgggaacgggagtccctgaatgccagcattgtggatgccatcaaccaagctgctgactgctggggtatccgctgcctccgttatgagatcaaggatatccatgtgccaccccgggtgaaagagtctatgcagatgcaggtggaggcagagcggcggaaacgggccacagttctagagtctgaggggacccgagagtcggccatcaatgtggcagaagggaagaaacaggcccagatcctggcctccgaagcagaaaaggctgaacagataaatcaggcagcaggagaggccagtgcagttctggcgaaggccaaggctaaagctgaagctattcgaatcctggtgnagtcttgcccacataatgcgcttcgcgcgttccattgatgtggccggccgtatttaggtttccacacgtgctgtccgcatattatggctcactgggggtcccgg

SEQ ID NO: 332099 - DNA, 408 bp, Homo sapiens
ccaaggctttccaccttgaaccttggtgtggccgagcagtatgtcagcgcgttctccaaactggccaaggactccaacactatcctactgccctccaaccctggcgatgtcaccagcatggtggctcaggccatgggtgtatatggagccctcaccaaagccccagtgccagggactccagactcactctccagtgggagcagcagagatgtccagggtacagatgcaagtcttgatgaggaacttgatcgagtcaagatgagttagtggagctgggcttggccagggagtctggggacaaggaagcagattttcctgattctggctctagcttccctgccaagattttggtttttatttttttatttgaactttagtcgtgtaataaactcaccagtggcaaaccaa

SEQ ID NO: 332100 - DNA, 1270 bp, Homo sapiens
aaccccccaccggagtagtcaggtacaggccttggtttggtcgctgcggcggtgggaaatgctggcgcgcgcggcgcggggcactggggcccttttgctgaggggctctctactggcttctggccgcgctccgcgccgcgcctcctctggattgccccgaaacaccgtggtactgttcgtgccgcagcaggaggcctgggtggtggagcgaatgggccgattccaccggatcctggagcctggtttgaacatcctcatccctgtgttagaccggatccgatatgtgcagagtctcaaggaaattgtcatcaacgtgcctgagcagtcggctgtgactctcgacaatgtaactctgcaaatcgatggagtcctttacctgcgcatcatggacccttacaaggcaagctacggtgtggaggaccctgagtatgccgtcacccagctagctcaaacaaccatgagatcagagctcggcaaactctctctggacaaagtcttccgggaacgggagtccctgaatgccagcattgtggatgccatcaaccaagctgctgactgctggggtatccgctgcctccgttatgagatcaaggatatccatgtgccaccccgggtgaaagagtctatgcagatgcaggtggaggcagagcggcggaaacgggccacagttctagagtctgaggggacccgagagtcggccatcaatgtggcagaagggaagaaacaggcccagatcctggcctccgaagcagaaaaggctgaacagataaatcaggcagcaggagaggccagtgcagttctggcgaaggccaaggctaaagctgaagctattcgaatcctggctgcagctctgacacaacataatggagatgcagcagcttcactgactgtggccgagcagtatgtcagcgcgttctccaaactggccaaggactccaacactatcctactgccctccaaccctggcgatgtcaccagcatggtggctcaggccatgggtgtatatggagccctcaccaaagccccagtgccagggactccagactcactctccagtgggagcagcagagatgtccagggtacagatgcaagtcttgatgaggaacttgatcgagtcaagatgagttagtggagctgggcttggccagggagtctggggacaaggaagcagattttcctgattctggctctagcttccctgccaagattttggtttttatttttttatttgaactttagtcgtgtaataaactcaccagtggcaaaccaa

SEQ ID NO: 332101 - DNA, 1266 bp, Homo sapiens
agctagtcgaggcggcgtgatcggccgaggcggaggtcgctgcggcggtgggaaatgctggcgcgcgcggcgcggggcactggggcccttttgctgaggggctctctactggcttctggccgcgctccgcgccgcgcctcctctggattgccccgaaacaccgtggtactgttcgtgccgcagcaggaggcctgggtggtggagcgaatgggccgattccaccggatcctggagcctggtttgaacatcctcatccctgtgttagaccggatccgatatgtgcagagtctcaaggaaattgtcatcaacgtgcctgagcagtcggctgtgactctcgacaatgtaactctgcaaatcgatggagtcctttacctgcgcatcatggacccttacaaggcaagctacggtgtggaggaccctgagtatgccgtcacccagctagctcaaacaaccatgagatcagagctcggcaaactctctctggacaaagtcttccgggaacgggagtccctgaatgccagcattgtggatgccatcaaccaagctgctgactgctggggtatccgctgcctccgttatgagatcaaggatatccatgtgccaccccgggtgaaagagtctatgcagatgcaggtggaggcagagcggcggaaacgggccacagttctagagtctgaggggacccgagagtcggccatcaatgtggcagaagggaagaaacaggcccagatcctggcctccgaagcagaaaaggctgaacagataaatcaggcagcaggagaggccagtgcagttctggcgaaggccaaggctaaagctgaagctattcgaatcctggctgcagctctgacacaacataatggagatgcagcagcttcactgactgtggccgagcagtatgtcagcgcgttctccaaactggccaaggactccaacactatcctactgccctccaaccctggcgatgtcaccagcatggtggctcaggccatgggtgtatatggagccctcaccaaagccccagtgccagggactccagactcactctccagtgggagcagcagagatgtccagggtacagatgcaagtcttgatgaggaacttgatcgagtcaagatgagttagtggagctgggcttggccagggagtctggggacaaggaagcagattttcctgattctggctctagcttccctgccaagattttggtttttatttttttatttgaactttagtcgtgtaataaactcaccagtggcaaaccaa

SEQ ID NO: 332102 - DNA, 1437 bp, Homo sapiens
agtacatccgggggagcggaactgcaagaggaaaggctcgggtaggcttctgggagcgaccgctccgctcgtctcgttggttccggaggtcgctgcggcggtgggaaatgctggcgcgcgcggcgcggggcactggggcccttttgctgaggggctctctactggcttctggccgcgctccgcgccgcgcctcctctggattgccccgaaacaccgtggtactgttcgtgccgcagcaggaggcctgggtggtggagcgaatgggccgattccaccggatcctggagcctggtttgaacatcctcatccctgtgttagaccggatccgatatgtgcagagtctcaaggaaattgtcatcaacgtgcctgagcagtcggctgtgactctcgacaatgtaactctgcaaatcgatggagtcctttacctgcgcatcatggacccttacaaggcaagctacggtgtggaggaccctgagtatgccgtcacccagctagctcaaacaaccatgagatcagagctcggcaaactctctctggacaaagtcttccgggaacgggagtccctgaatgccagcattgtggatgccatcaaccaagctgctgactgctggggtatccgctgcctccgttatgagatcaaggatatccatgtgccaccccgggtgaaagagtctatgcagatgcaggtggaggcagagcggcggaaacgggccacagttctagagtctgaggggacccgagagtcggccatcaatgtggcagaagggaagaaacaggcccagatcctggcctccgaagcagaaaaggctgaacagataaatcaggcagcaggagaggccagtgcagttctggcgaaggccaaggctaaagctgaagctattcgaatcctggctgcagctctgacacaacataatggagatgcagcagcttcactgactgtggccgagcagtatgtcagcgcgttctccaaactggccaaggactccaacactatcctactgccctccaaccctggcgatgtcaccagcatggtggctcaggccatgggtgtatatggagccctcaccaaagccccagtgccagggactccagactcactctccagtgggagcagcagagatgtccagggtacagatgcaagtcttgatgaggaacttgatcgagtcaagatgagttagtggagctgggcttggccagggagtctggggacaaggaagcagattttcctgattctggctctagcttccctgccaagattttggtttttatttttttatttgaactttagtcgtgtaataaactcaccagtggcaaaccaaaaaaaacctctttgattggggaatgaagttgggaaagtcactagcattttccttggatccagtcctgtcagcatgatgcctccatgaataagagtgaacttcttgtaaagtgaaacta

SEQ ID NO: 332103 - DNA, 1743 bp, Homo sapiens
agtacatccgggggagcggaactgcaagaggaaaggctcgggtaggcttctgggagcgaccgctccgctcgtctcgttggttccggaggtcgctgcggcggtgggaaatgctggcgcgcgcggcgcggggcactggggcccttttgctgaggggctctctactggcttctggccgcgctccgcgccgcgcctcctctggattgccccgaaacaccgtggtactgttcgtgccgcagcaggaggcctgggtggtggagcgaatgggccgattccaccggatcctggagcctggtttgaacatcctcatccctgtgttagaccggatccgatatgtgcagagtctcaaggaaattgtcatcaacgtgcctgagcagtcggctgtgactctcgacaatgtaactctgcaaatcgatggagtcctttacctgcgcatcatggacccttacaaggcaagctacggtgtggaggaccctgagtatgccgtcacccagctagctcaaacaaccatgagatcagagctcggcaaactctctctggacaaagtcttccgggaacgggagtccctgaatgccagcattgtggatgccatcaaccaagctgctgactgctggggtatccgctgcctccgttatgagatcaaggatatccatgtgccaccccgggtgaaagagtctatgcagatgcaggtggaggcagagcggcggaaacgggccacagttctagagtctgaggggacccgagagtcggccatcaatgtggcagaagggaagaaacaggcccagatcctggcctccgaagcagaaaaggctgaacagataaatcaggcagcaggagaggccagtgcagttctggcgaaggccaaggctaaagctgaagctattcgaatcctggctgcagctctgacacaacataatggagatgcagcagcttcactgactgtggccgagcagtatgtcagcgcgttctccaaactggccaaggactccaacactatcctactgccctccaaccctggcgatgtcaccagcatggtggctcaggttagagctctctgaggacccagcacagagcactggtgccagggaccaaactgagaccccaccaccgtcatcaacacttacataccataaaggtcttcagagtgccttggccctagacctcccttcgttctttgtagagatggaatctaagaatgaaacatctccactcagtcctgcaaatatggaagttcttgagatacctttttttggtagatacttgtgctggtattctgagagtcactttactctgatggtttgcaagattcctaaaatcaactccagagcttacaagacaggtttgagagagggagaaaggaaaaccaacttactggcccccatgccatcttttcccgtttagccattggtaggctgggctgcacctctgtcaagtgtcctcatggtattctctctgttcctctcctcagccatgggtgtatatggagccctcaccaaagccccagtgccagggactccagactcactctccagtgggagcagcagagatgtccagggtacagatgcaagtcttgatgaggaacttgatcgagtcaagatgagttagtggagctgggcttggccagggagtctggggacaaggaagcagattttcctgattctggctctagcttccctgccaagattttggtttttatttttttatttgaactttagtcgtgtaataaactcaccagtggcaaaccaa

SEQ ID NO: 332104 - DNA, 1496 bp, Homo sapiens
gcgcgcagcgcaaactaaggctagtagagccgggggttagtcgctgcggcggtgggaaatgctggcgcgcgcggcgcggggcactggggcccttttgctgagggtgagagcgaggcaacctttccagagggtcaggacagagattacctgggttctccgctggaaaagagcgaaattccaacttttggagaggactggggtcagaggtcatggtccccatgtgattctccgaggatcctgagggtcgtggtttatggagatgccttcaggaccgaggggcggcgtgtctggccagatgggatctctgctcaccctcttctttccttcagggctctctactggcttctggccgcgctccgcgccgcgcctcctctggattgccccgaaacaccgtggtactgttcgtgccgcagcaggaggcctgggtggtggagcgaatgggccgattccaccggatcctggagcctggtttgaacatcctcatccctgtgttagaccggatccgatatgtgcagagtctcaaggaaattgtcatcaacgtgcctgagcagtcggctgtgactctcgacaatgtaactctgcaaatcgatggagtcctttacctgcgcatcatggacccttacaaggcaagctacggtgtggaggaccctgagtatgccgtcacccagctagctcaaacaaccatgagatcagagctcggcaaactctctctggacaaagtcttccgggaacgggagtccctgaatgccagcattgtggatgccatcaaccaagctgctgactgctggggtatccgctgcctccgttatgagatcaaggatatccatgtgccaccccgggtgaaagagtctatgcagatgcaggtggaggcagagcggcggaaacgggccacagttctagagtctgaggggacccgagagtcggccatcaatgtggcagaagggaagaaacaggcccagatcctggcctccgaagcagaaaaggctgaacagataaatcaggcagcaggagaggccagtgcagttctggcgaaggccaaggctaaagctgaagctattcgaatcctggctgcagctctgacacaacataatggagatgcagcagcttcactgactgtggccgagcagtatgtcagcgcgttctccaaactggccaaggactccaacactatcctactgccctccaaccctggcgatgtcaccagcatggtggctcaggccatgggtgtatatggagccctcaccaaagccccagtgccagggactccagactcactctccagtgggagcagcagagatgtccagggtacagatgcaagtcttgatgaggaacttgatcgagtcaagatgagttagtggagctgggcttggccagggagtctggggacaaggaagcagattttcctgattctggctctagcttccctgccaagattttggtttttatttttttatttgaactttagtcgtgtaataaactcaccagtggcaaaccaa

SEQ ID NO: 332105 - DNA, 1229 bp, Homo sapiens
agtgaccttgagattacccgccccctcccggattatcgggatccgctccgctcgtctcgttggttccggaggtcgctgcggcggtgggaaatggccgcgcctcctctggattgccccgaaacaccgtggtactgttcgtgccgcagcaggaggcctgggtggtggagcgaatgggccgattccaccggatcctggagcctggtttgaacatcctcatccctgtgttagaccggatccgatatgtgcagagtctcaaggaaattgtcatcaacgtgcctgagcagtcggctgtgactctcgacaatgtaactctgcaaatcgatggagtcctttacctgcgcatcatggacccttacaaggcaagctacggtgtggaggaccctgagtatgccgtcacccagctagctcaaacaaccatgagatcagagctcggcaaactctctctggacaaagtcttccgggaacgggagtccctgaatgccagcattgtggatgccatcaaccaagctgctgactgctggggtatccgctgcctccgttatgagatcaaggatatccatgtgccaccccgggtgaaagagtctatgcagatgcaggtggaggcagagcggcggaaacgggccacagttctagagtctgaggggacccgagagtcggccatcaatgtggcagaagggaagaaacaggcccagatcctggcctccgaagcagaaaaggctgaacagataaatcaggcagcaggagaggccagtgcagttctggcgaaggccaaggctaaagctgaagctattcgaatcctggctgcagctctgacacaacataatggagatgcagcagcttcactgactgtggccgagcagtatgtcagcgcgttctccaaactggccaaggactccaacactatcctactgccctccaaccctggcgatgtcaccagcatggtggctcaggccatgggtgtatatggagccctcaccaaagccccagtgccagggactccagactcactctccagtgggagcagcagagatgtccagggtacagatgcaagtcttgatgaggaacttgatcgagtcaagatgagttagtggagctgggcttggccagggagtctggggacaaggaagcagattttcctgattctggctctagcttccctgccaagattttggtttttatttttttatttgaactttagtcgtgtaataaactcaccagtggcaaaccaa

SEQ ID NO: 332106 - DNA, 1642 bp, Homo sapiens
agtacatccgggggagcggaactgcaagaggaaaggctcgggtaggcttctgggagcgaccgctccgctcgtctcgttggttccggaggtcgctgcggcggtgggaaatgctggcgcgcgcggcgcggggcactggggcccttttgctgaggggctctctactggcttctggccgcgctccgcgccgcgcctcctctggattgccccgaaacaccgtggtactgttcgtgccgcagcaggaggcctgggtggtggagcgaatgggccgattccaccggatcctggagcctggtttgaacatcctcatccctgtgttagaccggatccgatatgtgcagagtctcaaggaaattgtcatcaacgtgcctgagcagtcggctgtgactctcgacaatgtaactctgcaaatcgatggagtcctttacctgcgcatcatggacccttacaaggcaagctacggtgtggaggaccctgagtatgccgtcacccagctagctcaaacaaccatgagatcagagctcggcaaactctctctggacaaagtcttccgggaacgggagtccctgaatgccagcattgtggatgccatcaaccaagctgctgactgctggggtatccgctgcctccgttatgagatcaaggatatccatgtgccaccccgggtgaaagagtctatgcagatgcaggtggaggcagagcggcggaaacgggccacagttctagagtctgaggggacccgagagtcggccatcaatgtggcagaagggaagaaacaggcccagatcctggcctccgaagcagaaaaggctgaacagataaatcaggcagcaggagaggccagtgcagttctggcgaaggccaaggctaaagctgaagctattcgaatcctggctgcagctctgacacaacatgtgagaggcccctgggtgggaatggggacaggaattgacagtggaaggggttctcttatctacgcttgaggagagttccgcctctgtgggctctgttgagccagattacatggtcctttttattgtgaactgctttcttcattccccatcccccccttcttctccgtatcggtgatctctgatttttatccccctgtgatcacagaatggagatgcagcagcttcactgactgtggccgagcagtatgtcagcgcgttctccaaactggccaaggactccaacactatcctactgccctccaaccctggcgatgtcaccagcatggtggctcaggccatgggtgtatatggagccctcaccaaagccccagtgccagggactccagactcactctccagtgggagcagcagagatgtccagggtacagatgcaagtcttgatgaggaacttgatcgagtcaagatgagttagtggagctgggcttggccagggagtctggggacaaggaagcagattttcctgattctggctctagcttccctgccaagattttggtttttatttttttatttgaactttagtcgtgtaataaactcaccagtggcaaaccaaaaaaaacctctttgattggggaatgaagttgggaaagtcactagcattttccttggatccagtcctgtcagcatgatgcctccatgaataagagtgaacttcttgtaaagtgaaacta

SEQ ID NO: 332107 - DNA, 1794 bp, Homo sapiens
agtgaccttgagattacccgccccctcccggattatcgggatccgctccgctcgtctcgttggttccggaggtcgctgcggcggtgggaaatgctggcgcgcgcggcgcggggcactggggcccttttgctgaggggctctctactggcttctggccgcgctccgcgccgcgcctcctctggattgccccgaaacaccgtggtactgttcgtgccgcagcaggaggcctgggtggtggagcgaatgggccgattccaccggatcctggagccttgtgagaaacctcttctgcccaccctgggccagccagatgaccaatccctcacgacatgcaatgtcgggaggacttcctttgggcctgcccgcactgttagctcccgactctgtaggccagacctgacagggcccaggctgctgaccatcatccccatgttaccaccttttcctatgcatctcacaggccccattcttgggaatctcccctgcccactctcagccctacctctcagtctgcatagagatggctattctgctggctccgattctcatgactctcccctccattcaggggcctagtcttgcattcctgttctcttgggttttcttaccagtgacacctcagccttctgaggacttatttcttggtaggagctgctgcttttctgggcatgttccatgtgttgactccctacatactccaggactagcttaggtcccaacccaatagttcccagccttctgaggacccatgactcctctttccagggtttgaacatcctcatccctgtgttagaccggatccgatatgtgcagagtctcaaggaaattgtcatcaacgtgcctgagcagtcggctgtgactctcgacaatgtaactctgcaaatcgatggagtcctttacctgcgcatcatggacccttacaaggcaagctacggtgtggaggaccctgagtatgccgtcacccagctagctcaaacaaccatgagatcagagctcggcaaactctctctggacaaagtcttccgggaacgggagtccctgaatgccagcattgtggatgccatcaaccaagctgctgactgctggggtatccgctgcctccgttatgagatcaaggatatccatgtgccaccccgggtgaaagagtctatgcagatgcaggtggaggcagagcggcggaaacgggccacagttctagagtctgaggggacccgagagtcggccatcaatgtggcagaagggaagaaacaggcccagatcctggcctccgaagcagaaaaggctgaacagataaatcaggcagcaggagaggccagtgcagttctggcgaaggccaaggctaaagctgaagctattcgaatcctggctgcagctctgacacaacataatggagatgcagcagcttcactgactgtggccgagcagtatgtcagcgcgttctccaaactggccaaggactccaacactatcctactgccctccaaccctggcgatgtcaccagcatggtggctcaggccatgggtgtatatggagccctcaccaaagccccagtgccagggactccagactcactctccagtgggagcagcagagatgtccagggtacagatgcaagtcttgatgaggaacttgatcgagtcaagatgagttagtggagctgggcttggccagggagtctggggacaaggaagcagattttcctgattctggctctagcttccctgccaagattttggtttttatttttttatttgaactttagtcgtgtaataaactcaccagtggcaaaccaa

SEQ ID NO: 332108 - DNA, 1948 bp, Homo sapiens
agtacatccgggggagcggaactgcaagaggaaaggctcgggtaggcttctgggagcgaccgctccgctcgtctcgttggttccggaggtcgctgcggcggtgggaaatgctggcgcgcgcggcgcggggcactggggcccttttgctgaggggctctctactggcttctggccgcgctccgcgccgcgcctcctctggattgccccgaaacaccgtggtactgttcgtgccgcagcaggaggcctgggtggtggagcgaatgggccgattccaccggatcctggagcctggtttgaacatcctcatccctgtgttagaccggatccgatatgtgcagagtctcaaggaaattgtcatcaacgtgcctgagcagtcggctgtgactctcgacaatgtaactctgcaaatcgatggagtcctttacctgcgcatcatggacccttacaaggcaagctacggtgtggaggaccctgagtatgccgtcacccagctagctcaaacaaccatgagatcagagctcggcaaactctctctggacaaagtcttccgggaacgggagtccctgaatgccagcattgtggatgccatcaaccaagctgctgactgctggggtatccgctgcctccgttatgagatcaaggatatccatgtgccaccccgggtgaaagagtctatgcagatgcaggtggaggcagagcggcggaaacgggccacagttctagagtctgaggggacccgagagtcggccatcaatgtggcagaagggaagaaacaggcccagatcctggcctccgaagcagaaaaggctgaacagataaatcaggcagcaggagaggccagtgcagttctggcgaaggccaaggctaaagctgaagctattcgaatcctggctgcagctctgacacaacatgtgagaggcccctgggtgggaatggggacaggaattgacagtggaaggggttctcttatctacgcttgaggagagttccgcctctgtgggctctgttgagccagattacatggtcctttttattgtgaactgctttcttcattccccatcccccccttcttctccgtatcggtgatctctgatttttatccccctgtgatcacagaatggagatgcagcagcttcactgactgtggccgagcagtatgtcagcgcgttctccaaactggccaaggactccaacactatcctactgccctccaaccctggcgatgtcaccagcatggtggctcaggttagagctctctgaggacccagcacagagcactggtgccagggaccaaactgagaccccaccaccgtcatcaacacttacataccataaaggtcttcagagtgccttggccctagacctcccttcgttctttgtagagatggaatctaagaatgaaacatctccactcagtcctgcaaatatggaagttcttgagatacctttttttggtagatacttgtgctggtattctgagagtcactttactctgatggtttgcaagattcctaaaatcaactccagagcttacaagacaggtttgagagagggagaaaggaaaaccaacttactggcccccatgccatcttttcccgtttagccattggtaggctgggctgcacctctgtcaagtgtcctcatggtattctctctgttcctctcctcagccatgggtgtatatggagccctcaccaaagccccagtgccagggactccagactcactctccagtgggagcagcagagatgtccagggtacagatgcaagtcttgatgaggaacttgatcgagtcaagatgagttagtggagctgggcttggccagggagtctggggacaaggaagcagattttcctgattctggctctagcttccctgccaagattttggtttttatttttttatttgaactttagtcgtgtaataaactcaccagtggcaaaccaa

SEQ ID NO: 332109 - DNA, 1827 bp, Homo sapiens
gcgcgcagcgcaaactaaggctagtagagccgggggttagtcgctgcggcggtgggaaatgctggcgcgcgcggcgcggggcactggggcccttttgctgagggtgagagcgaggcaacctttccagagggtcaggacagagattacctgggttctccgctggaaaagagcgaaattccaacttttggagaggactggggtcagaggtcatggtccccatgtgattctccgaggatcctgagggtcgtggtttatggagatgccttcaggaccgaggggcggcgtgtctggccagatgggatctctgctcaccctcttctttccttcagggctctctactggcttctggccgcgctccgcgccgcgcctcctctggattgccccgaaacaccgtggtactgttcgtgccgcagcaggaggcctgggtggtggagcgaatgggccgattccaccggatcctggagccttgtgagaaacctcttctgcccaccctgggccagccagatgaccaatccctcacgacatgcaatgtcgggaggacttcctttgggcctgcccgcactgttagctcccgactctgtaggccagacctgacagggcccaggctgctgaccatcatccccatgttaccaccttttcctatgcatctcacaggccccattcttgggaatctcccctgcccactctcagccctacctctcagtctgcatagagatggctattctgctggctccgattctcatgactctcccctccattcaggggcctagtcttgcattcctgttctcttgggttttcttaccagtgacacctcagccttctgaggacttatttcttggtaggagctgctgcttttctgggcatgttccatgtgttgactccctacatactccaggactagcttaggtcccaacccaatagttcccagccttctgaggacccatgactcctctttccagggtttgaacatcctcatccctgtgttagaccggatccgatatgtgcagagtctcaaggaaattgtcatcaacgtgcctgagcagtcggctgtgactctcggaacgggagtccctgaatgccagcattgtggatgccatcaaccaagctgctgactgctggggtatccgctgcctccgttatgagatcaaggatatccatgtgccaccccgggtgaaagagtctatgcagatgcaggtggaggcagagcggcggaaacgggccacagttctagagtctgaggggacccgagagtcggccatcaatgtggcagaagggaagaaacaggcccagatcctggcctccgaagcagaaaaggctgaacagataaatcaggcagcaggagaggccagtgcagttctggcgaaggccaaggctaaagctgaagctattcgaatcctggctgcagctctgacacaacataatggagatgcagcagcttcactgactgtggccgagcagtatgtcagcgcgttctccaaactggccaaggactccaacactatcctactgccctccaaccctggcgatgtcaccagcatggtggctcaggccatgggtgtatatggagccctcaccaaagccccagtgccagggactccagactcactctccagtgggagcagcagagatgtccagggtacagatgcaagtcttgatgaggaacttgatcgagtcaagatgagttagtggagctgggcttggccagggagtctggggacaaggaagcagattttcctgattctggctctagcttccctgccaagattttggtttttatttttttatttgaactttagtcgtgtaataaactcaccagtggcaaaccaa

SEQ ID NO: 332110 - DNA, 1168 bp, Homo sapiens
gcgcgcagcgcaaactaaggctagtagagccgggggttagtcgctgcggcggtgggaaatgctggcgcgcgcggcgcggggcactggggcccttttgctgaggggctctctactggcttctggccgcgctccgcgccgcgcctcctctggattgccccgaaacaccgtggtactgttcgtgccgcagcaggaggcctgggtggtggagcgaatgggccgattccaccggatcctggagcctggtttgaacatcctcatccctgtgttagaccggatccgatatgtgcagagtctcaaggaaattgtcatcaacgtgcctgagcagtcggctgtgactctcgacaatgtaactctgcaaatcgatggagtcctttacctgcgcatcatggacccttacaaggcaagctacggtgtggaggaccctgagtatgccgccatcaaccaagctgctgactgctggggtatccgctgcctccgttatgagatcaaggatatccatgtgccaccccgggtgaaagagtctatgcagatgcaggtggaggcagagcggcggaaacgggccacagttctagagtctgaggggacccgagagtcggccatcaatgtggcagaagggaagaaacaggcccagatcctggcctccgaagcagaaaaggctgaacagataaatcaggcagcaggagaggccagtgcagttctggcgaaggccaaggctaaagctgaagctattcgaatcctggctgcagctctgacacaacataatggagatgcagcagcttcactgactgtggccgagcagtatgtcagcgcgttctccaaactggccaaggactccaacactatcctactgccctccaaccctggcgatgtcaccagcatggtggctcaggccatgggtgtatatggagccctcaccaaagccccagtgccagggactccagactcactctccagtgggagcagcagagatgtccagggtacagatgcaagtcttgatgaggaacttgatcgagtcaagatgagttagtggagctgggcttggccagggagtctggggacaaggaagcagattttcctgattctggctctagcttccctgccaagattttggtttttatttttttatttgaactttagtcgtgtaataaactcaccagtggcaaaccaa

SEQ ID NO: 332111 - DNA, 1086 bp, Homo sapiens
agtacatccgggggagcggaactgcaagaggaaaggctcgggtaggcttctgggagcgaccgctccgctcgtctcgttggttccggaggtcgctgcggcggtgggaaatgctggcgcgcgcggcgcggggcactggggcccttttgctgaggggctctctactggcttctggccgcgctccgcgccgcgcctcctctggattgccccgaaacaccgtggtactgttcgtgccgcagcaggaggcctgggtggtggagcgaatgggccgattccaccggatcctggagcctggtttgaacatcctcatccctgtgttagaccggatccgatatgtgcagagtctcaaggaaattgtcatcaacgtgcctgagcagtcggctgtgactctcgacaatgtaactctgcaaatcgatggagtcctttacctgcgcatcatggacccttacaaggcaagctacggtgtggaggaccctgagtatgccgtcacccagctagctcaaacaaccatgagatcagagctcggcaaactctctctggacaaagtcttccgggaacgggagtccctgaatgccagcattgtggatgccatcaaccaagctgctgactgctggggtatccgctgcctccgttatgagatcaaggatatccatgtgccaccccgggtgaaagagtctatgcagatgcaggtggaggcagagcggcggaaacgggccacagttctagagtctgaggggacccgagagtcggccatcaatgtggcagaagggaagaaacaggcccagatcctggcctccgaagcagaaaaggctgaacagataaatcaggcagcaggagaggccagtgcagttctggcgaagcaggttaagctgagtatcgatctggtgagtctgacacactaagggatgcgcgttcctgatgtgccaccgatgcggcgttccaatggcaggtcaatttctttgccccactggggtcccgatgtgtcggccgtgtttggccccaaccaggggggaacaattccggggatgtcgccagcttgaagctaactatcggcgacggaacctctctccccgtttgtgccccaaatgc

SEQ ID NO: 332112 - DNA, 1159 bp, Homo sapiens
agtgaccttgagattacccgccccctcccggattatcgggatccgctccgctcgtctcgttggttccggaggtcgctgcggcggtgggaaatgctggcgcgcgcggcgcggggcactggggcccttttgctgaggggctctctactggcttctggccgcgctccgcgccgcgcctcctctggattgccccgaaacaccgtggtactgttcgtgccgcagcaggaggcctgggtggtggagcgaatgggccgattccaccggatcctggagcctggtttgaacatcctcatccctgtgttagaccggatccgatatgtgcagagtctcaaggaaattgtcatcaacgtgcctgagcagtcggctgtgactctcgacaatgtaactctgcaaatcgatggagtcctttacctgcgcatcatggacccttacaaggcaagctacggtgtggaggaccctgagtatgccgtcacccagctagctcaaacaaccatgagatcagagctcggcaaactctctctggacaaagtcttccgggaacgggagtccctgaatgccagcattgtggatgccatgggtgtatatggagccctcaccaaagccccagtgccagggactccagactcactctccagtgggagcagcagagatgtccagggtacagatgcaagtcttgatgaggaacttgatcgagtcaagatgagttagtggagctgggcttggccagggagtctggggacaaggaagcagattttcctgattctggctctagcttccctgccaagattttggtttttatttttttatttgaactttagtcgtgtaataaactcaccagtggcaaaccaaaaaaaaaaaaaaaaaaacacaatggtgggcggggcccggggccccgggaagcgttttaaaaacaaatcgggggggggccgggggcccagtgggggaaagggaaatggggcaaaaccggggccaaagggagacccgggggcaagagaaaaggggggggggttctctcccacaattaaaaaaccccgggggggggacaccgggcgggtctgggaaaaattccaaaaggggaggccgggagggcccaaaagggggatctataccaaacggggagccaaaggggacccccggatcaaattaaacgccgggcgggtgc

SEQ ID NO: 332113 - DNA, 996 bp, Homo sapiens
agtgaccttgagattacccgccccctcccggattatcgggatccgctccgctcgtctcgttggttccggaggtcgctgcggcggtgggaaatggccgcgcctcctctggattgccccgaaacaccgtggtactgttcgtgccgcagcaggaggcctgggtggtggagcgaatgggccgattccaccggatcctggagcctggtttgaacatcctcatccctgtgttagaccggatccgatatgtgcagagtctcaaggaaattgtcatcaacgtgcctgagcagtcggctgtgactctcgacaatgtaactctgcaaatcgatggagtcctttacctgcgcatcatggacccttacaaggcaagctacggtgtggaggaccctgagtatgccgtcacccagctagctcaaacaaccatgagatcagagctcggcaaactctctctggacaaagtcttccgggaacgggagtccctgaatgccagcattgtggatgccatcaaccaagctgctgactgctggggtatccgctgcctccgttatgagatcaaggatatccatgtgccaccccgggtgaaagagtctatgcagatgcaggtggaggcagagcggcggaaacgggccacagttctagagtctgaggggacccgagagtcggccatcaatgtggcagaagggaagaaacaggcccagatcctggcctccgaagcagaaaaggctgaacagataaatcaggcagcaggagaggccagtgcagttctggcgaagcaggttaagctgagtatcgatctggtgagtctgacacactaagggatgcgcgttcctgatgtgccaccgatgcggcgttccaatggcaggtcaatttctttgccccactggggtcccgatgtgtcggccgtgtttggccccaaccaggggggaacaattccggggatgtcgccagcttgaagctaactatcggcgacggaacctctctccccgtttgtgccccaaatgc

SEQ ID NO: 332114 - DNA, 923 bp, Homo sapiens
gcgcgcagcgcaaactaaggctagtagagccgggggttagtcgctgcggcggtgggaaatgctggcgcgcgcggcgcggggcactggggcccttttgctgaggggctctctactggcttctggccgcgctccgcgccgcgcctcctctggattgccccgaaacaccgtggtactgttcgtgccgcagcaggaggcctgggtggtggagcgaatgggccgattccaccggatcctggagcctggtttgaacatcctcatccctgtgttagaccggatccgatatgtgcagagtctcaaggaaattgtcatcaacgtgcctgagcagtcggctgtgactctcgacaatgtaactctgcaaatcgatggagtcctttacctgcgcatcatggacccttacaaggcaagctacggtgtggaggaccctgagtatgccgtcacccagctagctcaaacaaccatgagatcagagctcggcaaactctctctggacaaagtcttccgggtaagcagatctgagccagagttagggtttgaagacacaaacctgacactcttaatcttttctgaaggtcaagatcagtcccaggcccttctcagtgtaggcccttgataggtaggttgaggctgtggggcttacacctctttttccaggaacgggagtccctgaatgccagcattgtggatgccatcaaccaagctgctgactgctggggtatccgctgcctccgttatgagatcaaggatatccatgtgccaccccgggtgaaagagtctatgcagatgcaggtgggggccaaggaggggtgggaaaagggcctcagggctccagtaccaggaggatccagacttccctcctgttatgatgggtagagttgcatgttgtatcagtctcccttggcttgttgattgggattgttgtgggc

SEQ ID NO: 332115 - DNA, 801 bp, Homo sapiens
  misc_feature (245)..(245): n is a, c, g, or t
  misc_feature (252)..(252): n is a, c, g, or t
  misc_feature (255)..(256): n is a, c, g, or t
  misc_feature (258)..(258): n is a, c, g, or t
  misc_feature (261)..(263): n is a, c, g, or t
  misc_feature (265)..(265): n is a, c, g, or t
  misc_feature (271)..(271): n is a, c, g, or t
  misc_feature (273)..(276): n is a, c, g, or t
  misc_feature (279)..(281): n is a, c, g, or t
  misc_feature (286)..(286): n is a, c, g, or t
  misc_feature (288)..(288): n is a, c, g, or t
  misc_feature (293)..(293): n is a, c, g, or t
  misc_feature (297)..(297): n is a, c, g, or t
  misc_feature (300)..(301): n is a, c, g, or t
  misc_feature (307)..(307): n is a, c, g, or t
  misc_feature (318)..(318): n is a, c, g, or t
  misc_feature (320)..(320): n is a, c, g, or t
  misc_feature (324)..(324): n is a, c, g, or t
  misc_feature (334)..(334): n is a, c, g, or t
  misc_feature (342)..(342): n is a, c, g, or t
  misc_feature (349)..(349): n is a, c, g, or t
  misc_feature (353)..(353): n is a, c, g, or t
  misc_feature (355)..(355): n is a, c, g, or t
  misc_feature (357)..(357): n is a, c, g, or t
  misc_feature (363)..(364): n is a, c, g, or t
  misc_feature (367)..(367): n is a, c, g, or t
  misc_feature (370)..(370): n is a, c, g, or t
  misc_feature (373)..(373): n is a, c, g, or t
  misc_feature (381)..(381): n is a, c, g, or t
  misc_feature (384)..(384): n is a, c, g, or t
  misc_feature (404)..(404): n is a, c, g, or t
  misc_feature (411)..(411): n is a, c, g, or t
  misc_feature (415)..(415): n is a, c, g, or t
  misc_feature (417)..(417): n is a, c, g, or t
  misc_feature (435)..(435): n is a, c, g, or t
  misc_feature (441)..(442): n is a, c, g, or t
  misc_feature (451)..(451): n is a, c, g, or t
  misc_feature (483)..(483): n is a, c, g, or t
  misc_feature (487)..(487): n is a, c, g, or t
  misc_feature (489)..(489): n is a, c, g, or t
  misc_feature (502)..(502): n is a, c, g, or t
  misc_feature (534)..(534): n is a, c, g, or t
  misc_feature (607)..(607): n is a, c, g, or t
  misc_feature (657)..(657): n is a, c, g, or t
  misc_feature (792)..(792): n is a, c, g, or t
gcgcgcagcgcaaactaaggctagtagagccgggggttagtcgctgcggcggtgggaaatgctggcgcgcgcggcgcggggcactggggcccttttgctgaggggctctctactggcttctggccgcgctccgcgccgcgcctcctctggattgccccgaaacaccgtggtactgttcgtgccgcagcaggaggcctgggtggtggagcgaatgggccgattccaccggatcctggagcctatgntttgaanatnntnatnnntntgttanannnnatnnnatatntncacantctnaannaaattnttataaaactncnttancactcccctntgaatatncaaaatntaantntncaaatnnatncanttntttaaatnccnataatccaaaattaaaaccnaacctancctntncaccaaaatcactatccnctcaannacctacctnaaaaaaaaatcacataacacctacccaaaatntatntncaaaaactattcncccaaacccacttaatcaatcaaacaattgtncatcaaataaaaaaacatcatcaatcatcccctataacatcaataacttatcacataaaccatataaatgttnaaaaaaccctcaaacactttatcaacatcaacctccaccaacacaccacnaaaacccaaaaacttatacactatcacccccaaaacacactaccaaataaatctcccacaacccaacaaaaaccaaaacataatccaataacaacaacaaaaccatcaaaacataaataaccaacaaccacaccnaactcaact

SEQ ID NO: 332116 - DNA, 742 bp, Homo sapiens
tggccgtacgcttgacgttggagtgttaattaacgaatttggttagtaaccgtcagtccgctacgatttcgccaagctcgaaagccggacggatccccagggctgcagagtggaggcagagcggcggaaacgggccacagttctagagtctgaggggacccgagagtcggccatcaatgtggcagaagggaagaaacaggcccagatcctggcctccgaagcagaaaaggctgaacagataaatcaggcagcaggagaggccagtgcagttctggcgaaggccaaggctaaagctgaagctattcgaatcctggctgcagctctgacacaacataatggagatgcagcagcttcactgactgtggccgagcagtatgtcagcgcgttctccaaactggccaaggactccaacactatcctactgccctccaaccctggcgatgtcaccagcatggtggctcaggccatgggtgtatatggagccctcaccaaagccccagtgccagggactccagactcactctccagtgggagcagcagagatgtccagggtacagatgcaagtcttgatgaggaacttgatcgagtcaagatgagttagtggagctgggcttggccagggagtctggggacaaggaagcagattttcctgattctggctctagcttccctgccaagattttggtttttatttttttatttgaactttagtcgtgtaataaactcaccagtggcaaaccaa

SEQ ID NO: 332117 - DNA, 1319 bp, Homo sapiens
agtacatccgggggagcggaactgcaagaggaaaggctcgggtaggcttctgggagcgaccgctccgctcgtctcgttggttccggaggtcgctgcggcggtgggaaatgctggcgcgcgcggcgcggggcactggggcccttttgctgaggggctctctactggcttctggccgcgctccgcgccgcgcctcctctggattgccccgaaacaccgtggtactgttcgtgccgcagcaggaggcctgggtggtggagcgaatgggccgattccaccggatcctggagcctggtttgaacatcctcatccctgtgttagaccggatccgatatgtgcagagtctcaaggaaattgtcatcaacgtgcctgagcagtcggctgtgactctcgacaatgtaactctgcaaatcgatggagtcctttacctgcgcatcatggacccttacaaggcaagctacggtgtggaggaccctgagtatgccgtcacccagctagctcaaacaaccatgagatcagagctcggcaaactctctctggacaaagtcttccgggaacgggagtccctgaatgccagcattgtggatgccatcaaccaagctgctgactgctggggtatccgctgcctccgttatgagatcaaggatatccatgtgccaccccgggtgaaagagtctatgcagatgcaggtggaggcagagcggcggaaacgggccacagttctagagtctgaggggacccgagagtcggccatcaatgtggcagaagggaagaaacaggcccagatcctggcctccgaagcagaaaaggctgaacagataaatcaggcagcaggagaggccagtgcagttctggcgaaggccaaggctaaagctgaagctattcgaatcctggctgcagctctgacacaacataatggagatgcagcagcttcactgactgtggccgagcagtatgtcagcgcgttctccaaactggccaaggactccaacactatcctactgccctccaaccctggcgatgtcaccagcatggtggctcaggccatgggtgtatatggagccctcaccaaagccccagtgccagggactccagactcactctccagtgggagcagcagagatgtccagggtacagatgcaagtcttgatgaggaacttgatcgagtcaagatgagttagtggagctgggcttggccagggagtctggggacaaggaagcagattttcctgattctggctctagcttccctgccaagattttggtttttatttttttatttgaactttagtcgtgtaataaactcaccagtggcaaaccaa

SEQ ID NO: 332118 - DNA, 1270 bp, Homo sapiens
gcgcgcagcgcaaactaaggctagtagagccgggggttagtcgctgcggcggtgggaaatgctggcgcgcgcggcgcggggcactggggcccttttgctgaggggctctctactggcttctggccgcgctccgcgccgcgcctcctctggattgccccgaaacaccgtggtactgttcgtgccgcagcaggaggcctgggtggtggagcgaatgggccgattccaccggatcctggagcctggtttgaacatcctcatccctgtgttagaccggatccgatatgtgcagagtctcaaggaaattgtcatcaacgtgcctgagcagtcggctgtgactctcgacaatgtaactctgcaaatcgatggagtcctttacctgcgcatcatggacccttacaaggcaagctacggtgtggaggaccctgagtatgccgtcacccagctagctcaaacaaccatgagatcagagctcggcaaactctctctggacaaagtcttccgggaacgggagtccctgaatgccagcattgtggatgccatcaaccaagctgctgactgctggggtatccgctgcctccgttatgagatcaaggatatccatgtgccaccccgggtgaaagagtctatgcagatgcaggtggaggcagagcggcggaaacgggccacagttctagagtctgaggggacccgagagtcggccatcaatgtggcagaagggaagaaacaggcccagatcctggcctccgaagcagaaaaggctgaacagataaatcaggcagcaggagaggccagtgcagttctggcgaaggccaaggctaaagctgaagctattcgaatcctggctgcagctctgacacaacataatggagatgcagcagcttcactgactgtggccgagcagtatgtcagcgcgttctccaaactggccaaggactccaacactatcctactgccctccaaccctggcgatgtcaccagcatggtggctcaggccatgggtgtatatggagccctcaccaaagccccagtgccagggactccagactcactctccagtgggagcagcagagatgtccagggtacagatgcaagtcttgatgaggaacttgatcgagtcaagatgagttagtggagctgggcttggccagggagtctggggacaaggaagcagattttcctgattctggctctagcttccctgccaagattttggtttttatttttttatttgaactttagtcgtgtaataaactcaccagtggcaaaccaa

SEQ ID NO: 332119 - DNA, 1632 bp, Homo sapiens
agtacatccgggggagcggaactgcaagaggaaaggctcgggtaggcttctgggagcgaccgctccgctcgtctcgttggttccggaggtcgctgcggcggtgggaaatgctggcgcgcgcggcgcggggcactggggcccttttgctgaggggctctctactggcttctggccgcgctccgcgccgcgcctcctctggattgccccgaaacaccgtggtactgttcgtgccgcagcaggaggcctgggtggtggagcgaatgggccgattccaccggatcctggagcctggtttgaacatcctcatccctgtgttagaccggatccgatatgtgcagagtctcaaggaaattgtcatcaacgtgcctgagcagtcggctgtgactctcgacaatgtaactctgcaaatcgatggagtcctttacctgcgcatcatggacccttacaaggcaagctacggtgtggaggaccctgagtatgccgtcacccagctagctcaaacaaccatgagatcagagctcggcaaactctctctggacaaagtcttccgggaacgggagtccctgaatgccagcattgtggatgccatcaaccaagctgctgactgctggggtatccgctgcctccgttatgagatcaaggatatccatgtgccaccccgggtgaaagagtctatgcagatgcaggtggaggcagagcggcggaaacgggccacagttctagagtctgaggggacccgagagtcggccatcaatgtggcagaagggaagaaacaggcccagatcctggcctccgaagcagaaaaggctgaacagataaatcaggcagcaggagaggccagtgcagttctggcgaaggccaaggctaaagctgaagctattcgaatcctggctgcagctctgacacaacataatggagatgcagcagcttcactgactgtggccgagcagtatgtcagcgcgttctccaaactggccaaggactccaacactatcctactgccctccaaccctggcgatgtcaccagcatggtggctcaggccatgggtgtatatggagccctcaccaaagccccagtgccagggactccagactcactctccagtgggagcagcagagatgtccagggtacagatgcaagtcttgatgaggaacttgatcgagtcaagatgagttagtggagctgggcttggccagggagtctggggacaaggaagcagattttcctgattctggctctagcttccctgccaagattttggtttttatttttttatttgaactttagtcgtgtaataaactcaccagtggcaaaccaaaaaaaaaaaaaaaaaaacacaatggtgggcggggcccggggccccgggaagcgttttaaaaacaaatcgggggggggccgggggcccagtgggggaaagggaaatggggcaaaaccggggccaaagggagacccgggggcaagagaaaaggggggggggttctctcccacaattaaaaaaccccgggggggggacaccgggcgggtctgggaaaaattccaaaaggggaggccgggagggcccaaaagggggatctataccaaacggggagccaaaggggacccccggatcaaattaaacgccgggcgggtgc

SEQ ID NO: 332120 - DNA, 1208 bp, Homo sapiens
agtacatccgggggagcggaactgcaagaggaaaggctcggggctctctactggcttctggccgcgctccgcgccgcgcctcctctggattgccccgaaacaccgtggtactgttcgtgccgcagcaggaggcctgggtggtggagcgaatgggccgattccaccggatcctggagcctggtttgaacatcctcatccctgtgttagaccggatccgatatgtgcagagtctcaaggaaattgtcatcaacgtgcctgagcagtcggctgtgactctcgacaatgtaactctgcaaatcgatggagtcctttacctgcgcatcatggacccttacaaggcaagctacggtgtggaggaccctgagtatgccgtcacccagctagctcaaacaaccatgagatcagagctcggcaaactctctctggacaaagtcttccgggaacgggagtccctgaatgccagcattgtggatgccatcaaccaagctgctgactgctggggtatccgctgcctccgttatgagatcaaggatatccatgtgccaccccgggtgaaagagtctatgcagatgcaggtggaggcagagcggcggaaacgggccacagttctagagtctgaggggacccgagagtcggccatcaatgtggcagaagggaagaaacaggcccagatcctggcctccgaagcagaaaaggctgaacagataaatcaggcagcaggagaggccagtgcagttctggcgaaggccaaggctaaagctgaagctattcgaatcctggctgcagctctgacacaacataatggagatgcagcagcttcactgactgtggccgagcagtatgtcagcgcgttctccaaactggccaaggactccaacactatcctactgccctccaaccctggcgatgtcaccagcatggtggctcaggccatgggtgtatatggagccctcaccaaagccccagtgccagggactccagactcactctccagtgggagcagcagagatgtccagggtacagatgcaagtcttgatgaggaacttgatcgagtcaagatgagttagtggagctgggcttggccagggagtctggggacaaggaagcagattttcctgattctggctctagcttccctgccaagattttggtttttatttttttatttgaactttagtcgtgtaataaactcaccagtggcaaaccaa

SEQ ID NO: 332121 - DNA, 1524 bp, Homo sapiens
agtacatccgggggagcggaactgcaagaggaaaggctcgggtaggcttctgggagcgaccgctccgctcgtctcgttggttccggaggtcgctgcggcggtgggaaatgctggcgcgcgcggcgcggggcactggggcccttttgctgaggggctctctactggcttctggccgcgctccgcgccgcgcctcctctggattgccccgaaacaccgtggtactgttcgtgccgcagcaggaggcctgggtggtggagcgaatgggccgattccaccggatcctggagcctggtttgaacatcctcatccctgtgttagaccggatccgatatgtgcagagtctcaaggaaattgtcatcaacgtgcctgagcagtcggctgtgactctcgacaatgtaactctgcaaatcgatggagtcctttacctgcgcatcatggacccttacaaggcaagctacggtgtggaggaccctgagtatgccgtcacccagctagctcaaacaaccatgagatcagagctcggcaaactctctctggacaaagtcttccgggaacgggagtccctgaatgccagcattgtggatgccatcaaccaagctgctgactgctggggtatccgctgcctccgttatgagatcaaggatatccatgtgccaccccgggtgaaagagtctatgcagatgcaggtggaggcagagcggcggaaacgggccacagttctagagtctgaggggacccgagagtcggccatcaatgtggcagaagggaagaaacaggcccagatcctggcctccgaagcagaaaaggctgaacagataaatcaggcagcaggagaggccagtgcagttctggcgaaggccaaggctaaagctgaagctattcgaatcctggctgcagctctgacacaacatgtgagaggcccctgggtgggaatggggacaggaattgacagtggaaggggttctcttatctacgcttgaggagagttccgcctctgtgggctctgttgagccagattacatggtcctttttattgtgaactgctttcttcattccccatcccccccttcttctccgtatcggtgatctctgatttttatccccctgtgatcacagaatggagatgcagcagcttcactgactgtggccgagcagtatgtcagcgcgttctccaaactggccaaggactccaacactatcctactgccctccaaccctggcgatgtcaccagcatggtggctcaggccatgggtgtatatggagccctcaccaaagccccagtgccagggactccagactcactctccagtgggagcagcagagatgtccagggtacagatgcaagtcttgatgaggaacttgatcgagtcaagatgagttagtggagctgggcttggccagggagtctggggacaaggaagcagattttcctgattctggctctagcttccctgccaagattttggtttttatttttttatttgaactttagtcgtgtaataaactcaccagtggcaaaccaa

SEQ ID NO: 332122 - DNA, 1988 bp, Homo sapiens
gcgcgcagcgcaaactaaggctagtagagccgggggttagtcgctgcggcggtgggaaatgctggcgcgcgcggcgcggggcactggggcccttttgctgagggtgagagcgaggcaacctttccagagggtcaggacagagattacctgggttctccgctggaaaagagcgaaattccaacttttggagaggactggggtcagaggtcatggtccccatgtgattctccgaggatcctgagggtcgtggtttatggagatgccttcaggaccgaggggcggcgtgtctggccagatgggatctctgctcaccctcttctttccttcagggctctctactggcttctggccgcgctccgcgccgcgcctcctctggattgccccgaaacaccgtggtactgttcgtgccgcagcaggaggcctgggtggtggagcgaatgggccgattccaccggatcctggagccttgtgagaaacctcttctgcccaccctgggccagccagatgaccaatccctcacgacatgcaatgtcgggaggacttcctttgggcctgcccgcactgttagctcccgactctgtaggccagacctgacagggcccaggctgctgaccatcatccccatgttaccaccttttcctatgcatctcacaggccccattcttgggaatctcccctgcccactctcagccctacctctcagtctgcatagagatggctattctgctggctccgattctcatgactctcccctccattcaggggcctagtcttgcattcctgttctcttgggttttcttaccagtgacacctcagccttctgaggacttatttcttggtaggagctgctgcttttctgggcatgttccatgtgttgactccctacatactccaggactagcttaggtcccaacccaatagttcccagccttctgaggacccatgactcctctttccagggtttgaacatcctcatccctgtgttagaccggatccgatatgtgcagagtctcaaggaaattgtcatcaacgtgcctgagcagtcggctgtgactctcgacaatgtaactctgcaaatcgatggagtcctttacctgcgcatcatggacccttacaaggcaagctacggtgtggaggaccctgagtatgccgtcacccagctagctcaaacaaccatgagatcagagctcggcaaactctctctggacaaagtcttccgggaacgggagtccctgaatgccagcattgtggatgccatcaaccaagctgctgactgctggggtatccgctgcctccgttatgagatcaaggatatccatgtgccaccccgggtgaaagagtctatgcagatgcaggtggaggcagagcggcggaaacgggccacagttctagagtctgaggggacccgagagtcggccatcaatgtggcagaagggaagaaacaggcccagatcctggcctccgaagcagaaaaggctgaacagataaatcaggcagcaggagaggccagtgcagttctggcgaaggccaaggctaaagctgaagctattcgaatcctggctgcagctctgacacaacataatggagatgcagcagcttcactgactgtggccgagcagtatgtcagcgcgttctccaaactggccaaggactccaacactatcctactgccctccaaccctggcgatgtcaccagcatggtggctcaggccatgggtgtatatggagccctcaccaaagccccagtgccagggactccagactcactctccagtgggagcagcagagatgtccagggtacagatgcaagtcttgatgaggaacttgatcgagtcaagatgagttagtggagctgggcttggccagggagtctggggacaaggaagcagattttcctgattctggctctagcttccctgccaagattttggtttttatttttttatttgaactttagtcgtgtaataaactcaccagtggcaaaccaa

SEQ ID NO: 332123 - DNA, 1132 bp, Homo sapiens
gcgcgcagcgcaaactaaggctagtagagccgggggttagtcgctgcggcggtgggaaatgctggcgcgcgcggcgcggggcactggggcccttttgctgaggggtttgaacatcctcatccctgtgttagaccggatccgatatgtgcagagtctcaaggaaattgtcatcaacgtgcctgagcagtcggctgtgactctcgacaatgtaactctgcaaatcgatggagtcctttacctgcgcatcatggacccttacaaggcaagctacggtgtggaggaccctgagtatgccgtcacccagctagctcaaacaaccatgagatcagagctcggcaaactctctctggacaaagtcttccgggaacgggagtccctgaatgccagcattgtggatgccatcaaccaagctgctgactgctggggtatccgctgcctccgttatgagatcaaggatatccatgtgccaccccgggtgaaagagtctatgcagatgcaggtggaggcagagcggcggaaacgggccacagttctagagtctgaggggacccgagagtcggccatcaatgtggcagaagggaagaaacaggcccagatcctggcctccgaagcagaaaaggctgaacagataaatcaggcagcaggagaggccagtgcagttctggcgaaggccaaggctaaagctgaagctattcgaatcctggctgcagctctgacacaacataatggagatgcagcagcttcactgactgtggccgagcagtatgtcagcgcgttctccaaactggccaaggactccaacactatcctactgccctccaaccctggcgatgtcaccagcatggtggctcaggccatgggtgtatatggagccctcaccaaagccccagtgccagggactccagactcactctccagtgggagcagcagagatgtccagggtacagatgcaagtcttgatgaggaacttgatcgagtcaagatgagttagtggagctgggcttggccagggagtctggggacaaggaagcagattttcctgattctggctctagcttccctgccaagattttggtttttatttttttatttgaactttagtcgtgtaataaactcaccagtggcaaaccaa

SEQ ID NO: 332124 - DNA, 1419 bp, Homo sapiens
gcgcgcagcgcaaactaaggctagtagagccgggggttagtcgctgcggcggtgggaaatgctggcgcgcgcggcgcggggcactggggcccttttgctgaggggctctctactggcttctggccgcgctccgcgccgcgcctcctctggattgccccgaaacaccgtggtactgttcgtgccgcagcaggaggcctgggtggtggagcgaatgggccgattccaccggatcctggagcctggtttgaacatcctcatccctgtgttagaccggatccgatatgtgcagagtctcaaggaaattgtcatcaacgtgcctgagcagtcggctgtgactctcgacaatgtaactctgcaaatcgatggagtcctttacctgcgcatcatggacccttacaaggcaagctacggtgtggaggaccctgagtatgccgtcacccagctagctcaaacaaccatgagatcagagctcggcaaactctctctggacaaagtcttccgggtaagcagatctgagccagagttagggtttgaagacacaaacctgacactcttaatcttttctgaaggtcaagatcagtcccaggcccttctcagtgtaggcccttgataggtaggttgaggctgtggggcttacacctctttttccaggaacgggagtccctgaatgccagcattgtggatgccatcaaccaagctgctgactgctggggtatccgctgcctccgttatgagatcaaggatatccatgtgccaccccgggtgaaagagtctatgcagatgcaggtggaggcagagcggcggaaacgggccacagttctagagtctgaggggacccgagagtcggccatcaatgtggcagaagggaagaaacaggcccagatcctggcctccgaagcagaaaaggctgaacagataaatcaggcagcaggagaggccagtgcagttctggcgaaggccaaggctaaagctgaagctattcgaatcctggctgcagctctgacacaacataatggagatgcagcagcttcactgactgtggccgagcagtatgtcagcgcgttctccaaactggccaaggactccaacactatcctactgccctccaaccctggcgatgtcaccagcatggtggctcaggccatgggtgtatatggagccctcaccaaagccccagtgccagggactccagactcactctccagtgggagcagcagagatgtccagggtacagatgcaagtcttgatgaggaacttgatcgagtcaagatgagttagtggagctgggcttggccagggagtctggggacaaggaagcagattttcctgattctggctctagcttccctgccaagattttggtttttatttttttatttgaactttagtcgtgtaataaactcaccagtggcaaaccaa

SEQ ID NO: 332125 - DNA, 698 bp, Homo sapiens
  misc_feature (58)..(58): n is a, c, g, or t
aggaggaatccccgcaacggcatggacgcggctccgggtgaaagaggtctaagcaagnatgcacggtggaggcagagcggcggaaacgggccacagttctagagtctgaggggacccgagagtcggccatcaatgtggcagaagggaagaaacaggcccagatcctggcctccgaagcagaaaaggctgaacagataaatcaggcagcaggagaggccagtgcagttctggcgaaggccaaggctaaagctgaagctattcgaatcctggctgcagctctgacacaacataatggagatgcagcagcttcactgactgtggccgagcagtatgtcagcgcgttctccaaactggccaaggactccaacactatcctactgccctccaaccctggcgatgtcaccagcatggtggctcaggccatgggtgtatatggagccctcaccaaagccccagtgccagggactccagactcactctccagtgggagcagcagagatgtccagggtacagatgcaagtcttgatgaggaacttgatcgagtcaagatgagttagtggagctgggcttggccagggagtctggggacaaggaagcagattttcctgattctggctctagcttccctgccaagattttggtttttatttttttatttgaactttagtcgtgtaataaactcaccagtggcaaaccaa

SEQ ID NO: 332126 - DNA, 605 bp, Homo sapiens
gaagaaggccaaggggaaggcggggtggaggggtgtctaaggaggcagaagggaagaaacaggcccagatcctggcctccgaagcagaaaaggctgaacagataaatcaggcagcaggagaggccagtgcagttctggcgaaggccaaggctaaagctgaagctattcgaatcctggctgcagctctgacacaacataatggagatgcagcagcttcactgactgtggccgagcagtatgtcagcgcgttctccaaactggccaaggactccaacactatcctactgccctccaaccctggcgatgtcaccagcatggtggctcaggccatgggtgtatatggagccctcaccaaagccccagtgccagggactccagactcactctccagtgggagcagcagagatgtccagggtacagatgcaagtcttgatgaggaacttgatcgagtcaagatgagttagtggagctgggcttggccagggagtctggggacaaggaagcagattttcctgattctggctctagcttccctgccaagattttggtttttatttttttatttgaactttagtcgtgtaataaactcaccagtggcaaaccaa

SEQ ID NO: 332127 - DNA, 715 bp, Homo sapiens
gcgcgcagcgcaaactaaggctagtagagccgggggttagtcgctgcggcggtgggaaatgctggcgcgcgcggcgcggggcactggggcccttttgctgaggggctctctactggcttctggccgcgctccgcgccgcgcctcctctggattgccccgaaacaccgtggtactgttcgtgccgcagcaggaggcctgggtggtggagcgaatgggccgattccaccggatcctggagcctggtttgaacatcctcatccctgtgttagaccggatccgatatgtgcagagtctcaaggaaattgtcatcaacgtgcctgagcagtcggctgtgactctcgacaatgtaactctgcaaatcgatggagtcctttacctgcgcatcatggacccttacaaggcaagctacggtgtggaggaccctgagtatgccgtcacccagctagctcaaacaaccatgagatcagagctcggcaaactctctccagactcactctccagtgggagcagcagagatgtccagggtacagatgcaagtcttgatgaggaacttgatcgagtcaagatgagttagtggagctgggcttggccagggagtctggggacaaggaagcagattttcctgattctggctctagcttccctgccaagattttggtttttatttttttatttgaactttagtcgtgtaataaactcaccagtggcaaaccaa

SEQ ID NO: 332128 - DNA, 578 bp, Homo sapiens
gcgcgcagcgcaaactaaggctagtagagccgggggttagtcgctgcggcggtgggaaatgctggcgcgcgcggcgcggggcactggggcccttttgctgaggggctctctactggcttctggccgcgctccgcgccgcgcctcctctggattgccccgaaacaccgtggtactgttcgtgccgcagcaggaggcctgggtggtggagcgaatgggccgattccaccggatcctggagcctggtttgaacatcctcatccctgtgttagaccggatccgatatgtgcagagtctcaaggaaattgtcatcaacgtgcctgagcagtcggctgtgactctcgacaatgtaactctgcaaatcgatggagtcctttacctgcgcatcatggacccttacaaggcaagctacggtgtggaggaccctgagtatgccgtcacccagctagctcaaacaaccatgagatcagagctcggcaaactctccaaaacaaactctctcttggggaccaagagtcccctttttttccccacaccccacggggggcaaggacacagacgggaccacaaaatacaaaacc

SEQ ID NO: 332129 - DNA, 1590 bp, Homo sapiens
acaacagttaagcactctttgactgctgaaggaaccccatggatgaggtgcaggctacttcactctttttttttcttttttgagacagagtctcacctattgcccagactgaagtgcagtggtgcgatcatggatcactgcagcagcatcctccgagttcaagctatccttccacctccgcctcctgagtagctgggaccacaggttcacataaccatgcctggctaatttatttttacttttattttaaaataaaagatgaggtctgtcttatgttgcccaggctggtctcaaactatcctacttcttcctcccaaagtgttgggattataggtgtgagccactgcacccagcctacttcactcttctgaattattctgatttattttcaacaacttttgtgaacttgcccgtgatacaaagcagatagtccctgaaccacagtcgtgcctccttgaaacaagccattctactgtgctaatgttttaatatcacatctcacaaataacaggggtgaatgtttctctctagcaatctaggcaggtgctggtgtttcatctccatttgaatgcttgacctcttaatgtgtgtgtgtgtgtgtgtgtgtgtgtgtgtgtgtcatgggttttaaaagaacagtattttacaaaaggtgtagcttttataagagtgcagaaaagggaaggatgtgtttttttctctcactatagtataagaatctattttggagaaaaaaagaaaatatgagggtctcgaagcatgatttttatataactagtttcagttttatctaataacttactttttaaatcaatatttatcaacaatctttccttgtatgcagtgctttcaaaagatggttttgagtgtccagtgaaacttatgacttggatatatggttgaagaatcaaaacaaaagcaaaaaaaaaaaaagcaaaaaaagaaaagagaaaaaaagaaaaaatgcaaatggaataattttctattatattttagacaaacatatcattttcgagtattttaaatactgaattcatagttgttgttttttaaattccaacagtaacagctgaatggtttaatctgactggcttcctaagaaatgtttaagactcagctttaaaaagaagttaacattcatatctctgttttgaaatcaaaaatcatatttcaaaattctttcctaggaccatctatgtgtctcccctcccctccacaaaaaggagaaagagtgcattaaaatgtttagttgggttttttaatttttaatttttatgttatgttttgctttgttttaagtaaacaaaaatttttctttctttactgcatgcatagcacttaataaaatggatttttaaaaaatccactagtaatatcagaatgtccagggagtgactgtcactacaatgatggtttagtttacttctgttccaccttttgattgaaatatttagttgttaggctgaaagcctcggcagttaagaacttgcctgagttttcttcgttcagcaacttgacagtttgactgatgtgcattatatatagctcaattatgtctgttttttatgctaagtaggaaaaccaaccaca

SEQ ID NO: 332130 - DNA, 1684 bp, Homo sapiens
agatcatgcggagaacccatggtcagaaacaatctgggcaaaaaagaggcaggcatttcaaaggaaggggcaaggaagacgtggcaaacagatggcaagggatgcccctctttttcataaaactctccaaggttcaatcaatgcaatgtatagtgaaacttcaatagatctttcattttgacactattaaacaatccagagaagtaaacactgttaaattgactgtatatatttgcttcttaaaactacctgtatcactgtttgctcacctaatttatatacaggtagttccattttctcccagttccttctcgtctttttttttatttttacttttattttaaaataaaagatgaggtctgtcttatgttgcccaggctggtctcaaactatcctacttcttcctcccaaagtgttgggattataggtgtgagccactgcacccagcctacttcactcttctgaattattctgatttattttcaacaacttttgtgaacttgcccgtgatacaaagcagatagtccctgaaccacagtcgtgcctccttgaaacaagccattctactgtgctaatgttttaatatcacatctcacaaataacaggggtgaatgtttctctctagcaatctaggcaggtgctggtgtttcatctccatttgaatgcttgacctcttaatgtgtgtgtgtgtgtgtgtgtgtgtgtgtgtgtgtcatgggttttaaaagaacagtattttacaaaaggtgtagcttttataagagtgcagaaaagggaaggatgtgtttttttctctcactatagtataagaatctattttggagaaaaaaagaaaatatgagggtctcgaagcatgatttttatataactagtttcagttttatctaataacttactttttaaatcaatatttatcaacaatctttccttgtatgcagtgctttcaaaagatggttttgagtgtccagtgaaacttatgacttggatatatggttgaagaatcaaaacaaaagcaaaaaaaaaaaaagcaaaaaaagaaaagagaaaaaaagaaaaaatgcaaatggaataattttctattatattttagacaaacatatcattttcgagtattttaaatactgaattcatagttgttgttttttaaattccaacagtaacagctgaatggtttaatctgactggcttcctaagaaatgtttaagactcagctttaaaaagaagttaacattcatatctctgttttgaaatcaaaaatcatatttcaaaattctttcctaggaccatctatgtgtctcccctcccctccacaaaaaggagaaagagtgcattaaaatgtttagttgggttttttaatttttaatttttatgttatgttttgctttgttttaagtaaacaaaaatttttctttctttactgcatgcatagcacttaataaaatggatttttaaaaaatccactagtaatatcagaatgtccagggagtgactgtcactacaatgatggtttagtttacttctgttccaccttttgattgaaatatttagttgttaggctgaaagcctcggcagttaagaacttgcctgagttttcttcgttcagcaacttgacagtttgactgatgtgcattatatatagctcaattatgtctgttttttatgctaagtaggaaaaccaaccaca

SEQ ID NO: 332131 - DNA, 1439 bp, Homo sapiens
acaacagttaagcactctttgactgctgaaggaaccccatggatgaggtgcaggctacttcactctttttttttcttttttgagacagagtctcacctattgcccagactgaagtgcagtggtgcgatcatggatcactgcagcagcatcctccgagttcaagctatccttccacctccgcctcctgagtagctgggaccacaggttcacataaccatgcctggctaatttatttttacttttattttaaaataaaagatgaggtctgtcttatgttgcccaggctggtctcaaactatcctacttcttcctcccaaagtgttgggattataggtgtgagccactgcacccagcctacttcactcttctgaattattctgatttattttcaacaacttttgtgaacttgcccgtgatacaaagcagatagtccctgaaccacagtcgtgcctccttgaaacaagccattctactgtgctaatgttttaatatcacatctcacaaataacaggggtgaatgtttctctctagcaatctaggcaggtgctggtgtttcatctccatttgaatgcttgacctcttaatgtgtgtgtgtgtgtgtgtgtgtgtgtgtgtgtgtcatgggttttaaaagaacagtattttacaaaaggtgtagcttttataagagtgcagaaaagggaaggatgtgtttttttctctcactatagtataagaatctattttggagaaaaaaagaaaatatgagggtctcgaagcatgatttttatataactagtttcagttttatctaataacttactttttaaatcaatatttatcaacaatctttccttgtatgcagtgctttcaaaagatggttttgagtgtccagtgaaacttatgacttggatatatggttgaagaatcaaaacaaaagcaaaaaaaaaaaaagcaaaaaaagaaaagagaaaaaaagaaaaaatgcaaatggaataattttctattatattttagacaaacatatcattttcgagtattttaaatactgaattcatagttgttgttttttaaattccaacagtaacagctgaatggtttaatctgactggcttcctaagaaatgtttaagactcagctttaaaaagaagttaacattcatatctctgttttgaaatcaaaaatcatatttcaaaattctttcctaggaccatctatgtgtctcccctcccctccacaaaaaggagaaagagtgcattaaaatgtttagttgggttttttaattttttttgcgctgctaagaagctaaagtcatccatccttattcacgttgacagtacctagctgtaatgtttcacagagtgtgctgctattttataaacatttttataatatattattttactgcttaaattccaagtcctgaagtagatgtgagatatgagagtctccgtcgaact

SEQ ID NO: 332132 - DNA, 400 bp, Homo sapiens
tgagctgagatcgaaccaccacacttcagcttgggcaacagagcaaaacaacaacaaaaaagtaggagctaacatacagctggtgtttcaggccacatctgtgcattttatttcaaggacaaaaggaaacccaagtcatcactagggcaaaggcaaaccctctgtgatctgcacccaactctccaattctcctcatgtgctgggccttctgcctagagctcccctccctcttctcttcacacaccggctccttctctcctggtctcagcccagatgtggcctcctcagtggcaccttccatgaccacctaccccaaggaccctctcctccctagggttccaggggatggctgtctgccctgtttccttcctttagctttttttttttttttttttttttt

SEQ ID NO: 332133 - DNA, 860 bp, Homo sapiens
ccttggctgttatgaggaaaaatctgagtctataggagtcagtttgttttcactaaatgagcttgaagcatgacttgtgttaatcctaataagccggtgattaggtaaacatgctgttaaatgcaaaggaatgcaaggaatttcaactacttttccaatagcgtgagggccaagctaccccatccccctttcctttttataatatacgttatattgatgggggagggagcagttatatagagttggctattcagaaggtcaaaggtccagagcattcctaaaagaaagggacccaaatcataggtctaggagaggttgagaaggctgtgtcaatgtttgtgaaaatgtcagtagtctgtttcagaagcatcttcatctttagaaagcgctgacaataaaccttttatagggagaagttttcctttcatcatcactgttggctcctgttcaaatccatagtgaaatatttcagtccgcacttagttaagagagtacttgagtttttaggcagaagagaaagtgcttttaaaaggaatggaggaggacagctcctgggatcctgaagggatttttccaagtagattaaataagatccatactttaatgaagacccacagaaaaatactgcctaagaaatggttttaaagccttatggaaatgcatagaggttaatataaatgcactagtaaaatctatggccaaaagccttcacttctgattttgacttgcctgaaatattacagcttgtgccttctgaatagtcaggtttcttgcctgagacattcaaatgttaaggtatttgagaatttaaacatcagctggcccagtcgtggatgcagttaaacttgtcagtgcaatgt

SEQ ID NO: 332134 - DNA, 191 bp, Homo sapiens
cggcctatattttttatttttatttttaagagagacaaggtctttctgtgttgcccaggctggtctcaaactcctgagctcaagcaatcctcctaccttggctaaagaaagtcatttgtgtaagtaactatagtctgagaaataaagttattacatgtaatagtttttcttttttcttttttttttttttt

SEQ ID NO: 332135 - DNA, 507 bp, Homo sapiens
gcagagcagggagaggtcctgcctaaaccaccagagatgccaagatggccaagtgcccggcaacagtggaggggcaacggcagcttagaaaatggctagaagacaacaagggggtgtaaggggagaggagagacagagaatgaggtttctgggatgtggggcccataggcctgctatgacccagccggaccacctgtctgggcaagtacagagcaccaggcctcactttcacagaaaggccccaaagctttattgacggctacatgtggtcccttcctctgtccagccaaaatcacctgaagttcttgctaaaggagactccctaggttcagggaaaggaagacctctgctagagccaggggaaatctgaggccaaggtgcttcaggtaaatgcccaccctgtcagtcagccagggaaagagaagaacaagcctactgctggtgccaaaccaggaaactggctgctccaagattctgtccctacaccaagaatttggggaaggcagc

SEQ ID NO: 332136 - DNA, 408 bp, Homo sapiens
aagggaacattacatcctctctaacaaaaataagctcggttgtctaggcgttttttaaaaagtctaccagatgactgagattgcaaggccctctagtgaaatgaaattcttcagagtgagagtaatgagtctatgaaatagggtggagagacaggacaaatgaactgtcttacttaaggcagttctgcaggaagaagagatgttcatggtaaaagcaggttaaaaaacagtggaaatgttaaccaattcttaaagatgtaggctagcatcatgtttagaatcccaggaagcctctaaaacaagggaagtctggaagtattacacaactcattaccatagtcctctgacaagcattcacaaggaagttttgtggtaggggaagaagcctgagaggaaaacccctccata

SEQ ID NO: 332137 - DNA, 2551 bp, Homo sapiens
gggcgcaggcctgctacagtctgggcaacacctacacgctgctgcaggactacgagcgcgcggccgagtaccacctgcggcacctgctcattgcccaggagctggccgacagagtgggcgagggccgggcgtgctggagcctgggaaatgcctacgtgtccatggggcgcccagcgcaggccctgaccttcgccaagaagcacctgcagatctcccaggagatcggggaccgccatggggagctcacggcccgcatgaacgtggcgcagctgcagctggtgctcggccgcctgaccagcccggcagcctcagagaagcctgacctggccggctatgaggcccagggggccagacccaagaggacgcagaggctgagcgcggagacctgggacctgctgagactccccctggagcgggagcagaatggagacagccaccattcaggggactggcgggggcccagcagggactcgctacccctccccgtgaggagcaggaagtaccaggaaggcccggacgctgagaggaggccccgggagggcagccactccccgctggacagcgccgacgtccgggtgcacgtgccacgcacgagcatcccgagggccccgtcttcggacgaggagtgcttctttgacctgttgaccaagttccagagcagccgcatggacgaccagcgttgtcccctggacgatggccaggccggggctgccgaggccacggccgcccccaccctggaggacaggatcgcccagccctcgatgacggcctcgccccagaccgaggaattcttcgacctcatcgccagctcccagagccgccggctggacgaccagcgggccagcgtgggcagcctgccggggctgcgaatcacccacagcaatgcagggcacctccgaggccacggcgagccccaggagccgggggacgacttcttcaacatgctcatcaagtaccagtcctccaggatcgatgaccagcgctgcccaccacctgacgtactgccccggggccctaccatgccggacgaggacttcttcagcctcattcagagggtgcaggctaagcgcatggacgagcagcgggtggacctcgccgggggcccggagcagggggcaggcggcccgcccgagccccagcagcagtgccagcctggtgcgagctaaggccctgtgcccaccgccaggcccaccctgcccccactcctggacgccggtctcacagtcacagccacgtcctcccgaggccattgccgaggacaggcactgggcatgcagccccacggcctccccgacccagggcgacaggctcaggccaagctgcccgtggtgggagggcgtgcttccatcccgggctggcccccatggccctcagcttcctcccttctgcccctgccgcaggccggacggggccttcggcatgtcggccccgacctggtgctgtcagactcccgcatcctctcccccaagcccttcccgttctgccctgccctgccaaatgtgaaaccctgctgtctcccccaccctccccaaaggtgtctctgagccgcctcttggggccaccaaggacagggccatgttctgtccccccagagctggtcttgggatggccgtgtgacaggcatgctccacccctccagcttcgtcctggggcagggctccctccaagcctgtctccccactccccggccagaggtcagcaaccacagaaggccccccagaccacgcatggcagaccaggctgcagtggcagccctgaggtgccccccgccgagtcccagggccctgcaggggcctcgacaggagccgggcctatctctaaagcagagggaatggctgggcatgaacttcgacattccaaaaccccaagccaggaaaaagggcagggcctggtcctagggatgcttactggcagcaagagcagtgcccagtcagggtgggaggtagcaccaggctctgtgaccctcacccaagtgggggggtggtcagtggaagctggggaggcttcactcagctcaaccctgcagaccccccatatgagaacccccctcctcccaccagctgggggagatgacatcactgctctctccatggggagggggctcacagggcaccaagttcgggatcctaggactggcaggacctgctggagcctgagatgggccccaggggcctgaggttgcctcctcctgtccagacccagccttggcacctcccaagactgccaagggccctaccatggccccacagcccccagggctggcagttccatctaggagggtgcctctaggccccactctcaggctaggatggagaggcagatctgggcctggtgaggtgacctgcttctggaggggcagggccgcacccgagagcagggacaggtgcccgaacacagggtctccaggacgtagcgcccccccgcatacttgaatgtatgtgcgtatttattgctcacgtctgtgccatgttgtcaatgggtcctttccaacccaagaggtacatttgtttttctgtttttcctgaaaaataaagtcggccaagtgagtgtg

SEQ ID NO: 332138 - DNA, 2116 bp, Homo sapiens
gtgacacgtctgggggaggggtagccgacaggcggcaggttagagtcccgatcttggccaggcctcagaagtgtgtgtggcctgggcaagcagcccccggtctcgtctgggggtctgcggggctagctttggctgcggtgaccccactccctccccagagcatcccgagggccccgtcttcggacgaggagtgcttctttgacctgttgaccaagttccagagcagccgcatggacgaccagcgttgtcccctggacgatggccaggccggggctgccgaggccacggccgcccccaccctggaggacaggatcgcccagccctcgatgacggcctcgccccagaccgaggaattcttcgacctcatcgccagctcccagagccgccggctggacgaccagcgggccagcgtgggcagcctgccggggctgcgaatcacccacagcaatgcagggcacctccgaggccacggcgagccccaggagccgggggacgacttcttcaacatgctcatcaagtaccagtcctccaggatcgatgaccagcgctgcccaccacctgacgtactgccccggggccctaccatgccggacgaggacttcttcagcctcattcagagggtgcaggctaagcgcatggacgagcagcgggtggacctcgccgggggcccggagcagggggcaggcggcccgcccgagccccagcagcagtgccagcctggtgcgagctaaggccctgtgcccaccgccaggcccaccctgcccccactcctggacgccggtctcacagtcacagccacgtcctcccgaggccattgccgaggacaggcactgggcatgcagccccacggcctccccgacccagggcgacaggctcaggccaagctgcccgtggtgggagggcgtgcttccatcccgggctggcccccatggccctcagcttcctcccttctgcccctgccgcaggccggacggggccttcggcatgtcggccccgacctggtgctgtcagactcccgcatcctctcccccaagcccttcccgttctgccctgccctgccaaatgtgaaaccctgctgtctcccccaccctccccaaaggtgtctctgagccgcctcttggggccaccaaggacagggccatgttctgtccccccagagctggtcttgggatggccgtgtgacaggcatgctccacccctccagcttcgtcctggggcagggctccctccaagcctgtctccccactccccggccagaggtcagcaaccacagaaggccccccagaccacgcatggcagaccaggctgcagtggcagccctgaggtgccccccgccgagtcccagggccctgcaggggcctcgacaggagccgggcctatctctaaagcagagggaatggctgggcatgaacttcgacattccaaaaccccaagccaggaaaaagggcagggcctggtcctagggatgcttactggcagcaagagcagtgcccagtcagggtgggaggtagcaccaggctctgtgaccctcacccaagtgggggggtggtcagtggaagctggggaggcttcactcagctcaaccctgcagaccccccatatgagaacccccctcctcccaccagctgggggagatgacatcactgctctctccatggggagggggctcacagggcaccaagttcgggatcctaggactggcaggacctgctggagcctgagatgggccccaggggcctgaggttgcctcctcctgtccagacccagccttggcacctcccaagactgccaagggccctaccatggccccacagcccccagggctggcagttccatctaggagggtgcctctaggccccactctcaggctaggatggagaggcagatctgggcctggtgaggtgacctgcttctggaggggcagggccgcacccgagagcagggacaggtgcccgaacacagggtctccaggacgtagcgcccccccgcatacttgaatgtatgtgcgtatttattgctcacgtctgtgccatgttgtcaatgggtcctttccaacccaagaggtacatttgtttttctgtttttcctgaaaaataaagtcggccaagtgagtgtg

SEQ ID NO: 332139 - DNA, 2173 bp, Homo sapiens
ctgtgtagggcatggacacagggagctcatggcagggctgacacagggtgtggtgggcacagggacaggaggcacgggaggcttcccgggatgtctgggaagtgttccaggccaaggctggggaggctggcccagggcaggtgacggacagaggcctggactggggtagcacccatgagaggggagaagtccggggcagtcggcgggtgccgaggagcatcccgagggccccgtcttcggacgaggagtgcttctttgacctgttgaccaagttccagagcagccgcatggacgaccagcgttgtcccctggacgatggccaggccggggctgccgaggccacggccgcccccaccctggaggacaggatcgcccagccctcgatgacggcctcgccccagaccgaggaattcttcgacctcatcgccagctcccagagccgccggctggacgaccagcgggccagcgtgggcagcctgccggggctgcgaatcacccacagcaatgcagggcacctccgaggccacggcgagccccaggagccgggggacgacttcttcaacatgctcatcaagtaccagtcctccaggatcgatgaccagcgctgcccaccacctgacgtactgccccggggccctaccatgccggacgaggacttcttcagcctcattcagagggtgcaggctaagcgcatggacgagcagcgggtggacctcgccgggggcccggagcagggggcaggcggcccgcccgagccccagcagcagtgccagcctggtgcgagctaaggccctgtgcccaccgccaggcccaccctgcccccactcctggacgccggtctcacagtcacagccacgtcctcccgaggccattgccgaggacaggcactgggcatgcagccccacggcctccccgacccagggcgacaggctcaggccaagctgcccgtggtgggagggcgtgcttccatcccgggctggcccccatggccctcagcttcctcccttctgcccctgccgcaggccggacggggccttcggcatgtcggccccgacctggtgctgtcagactcccgcatcctctcccccaagcccttcccgttctgccctgccctgccaaatgtgaaaccctgctgtctcccccaccctccccaaaggtgtctctgagccgcctcttggggccaccaaggacagggccatgttctgtccccccagagctggtcttgggatggccgtgtgacaggcatgctccacccctccagcttcgtcctggggcagggctccctccaagcctgtctccccactccccggccagaggtcagcaaccacagaaggccccccagaccacgcatggcagaccaggctgcagtggcagccctgaggtgccccccgccgagtcccagggccctgcaggggcctcgacaggagccgggcctatctctaaagcagagggaatggctgggcatgaacttcgacattccaaaaccccaagccaggaaaaagggcagggcctggtcctagggatgcttactggcagcaagagcagtgcccagtcagggtgggaggtagcaccaggctctgtgaccctcacccaagtgggggggtggtcagtggaagctggggaggcttcactcagctcaaccctgcagaccccccatatgagaacccccctcctcccaccagctgggggagatgacatcactgctctctccatggggagggggctcacagggcaccaagttcgggatcctaggactggcaggacctgctggagcctgagatgggccccaggggcctgaggttgcctcctcctgtccagacccagccttggcacctcccaagactgccaagggccctaccatggccccacagcccccagggctggcagttccatctaggagggtgcctctaggccccactctcaggctaggatggagaggcagatctgggcctggtgaggtgacctgcttctggaggggcagggccgcacccgagagcagggacaggtgcccgaacacagggtctccaggacgtagcgcccccccgcatacttgaatgtatgtgcgtatttattgctcacgtctgtgccatgttgtcaatgggtcctttccaacccaagaggtacatttgtttttctgtttttcctgaaaaataaagtcggccaagtgagtgtg

SEQ ID NO: 332140 - DNA, 1951 bp, Homo sapiens
gggcgcaggcctgctacagtctgggcaacacctacacgctgctgcaggactacgagcgcgcggccgagtaccacctgcggcacctgctcattgcccaggagctggccgacagagtgggcgagggccgggcgtgctggagcctgggaaatgcctacgtgtccatggggcgcccagcgcaggccctgaccttcgccaagaagcacctgcagatctcccaggagatcggggaccgccatggggagctcacggcccgcatgaacgtggcgcagctgcagctggtgctcggccgcctgaccagcccggcagcctcagagaagcctgacctggccggctatgaggcccagggggccagacccaagaggacgcagaggctgagcgcggagacctgggacctgctgagactccccctggagcgggagcagaatggagacagccaccattcaggggactggcgggggcccagcagggactcgctacccctccccgtgaggagcaggaagtaccaggaaggcccggacgctgagaggaggccccgggagggcagccactccccgctggacagcgccgacgtccgggtgcacgtgccacgcacgagcatcccgagggccccgtcttcggacgaggagtgcttctttgacctgttgaccaagttccagagcagccgcatggacgaccagcgttgtcccctggacgatggccaggccggggctgccgaggccacggccgcccccaccctggaggacaggatcgcccagccctcgatgacggcctcgccccagaccgaggaattcttcgacctcatcgccagctcccagagccgccggctggacgaccagcgggccagcgtgggcagcctgccggggctgcgaatcacccacagcaatgcagggcacctccgaggccacggcgagccccaggagccgggggacgacttcttcaacatgctcatcaagtaccagtcctccaggatcgatgaccagcgctgcccaccacctgacgtactgccccggggccctaccatgccggacgaggacttcttcagcctcattcagagggtgcaggctaagcgcatggacgagcagcgggtggacctcgccgggggcccggagcagggggcaggcggcccgcccgagccccagcagcagtgccagcctggtgcgagctaaggccctgtgcccaccgccaggcccaccctgcccccactcctggacgccggtctcacagtcacagccacgtcctcccgaggccattgccgaggacaggcactgggcatgcagccccacggcctccccgacccagggcgacaggctcaggccaagctgcccgtggtgggagggcgtgcttccatcccgggctggcccccatggccctcagcttcctcccttctgcccctgccgcaggccggacggggccttcggcatgtcggccccgacctggtgctgtcagactcccgcatcctctcccccaagcccttcccgttctgccctgccctgccaaatgtgaaaccctgctgtctcccccaccctccccaaaggtgtctctgagccgcctcttggggccaccaaggacagggccatgttctgtccccccagagctggtcttgggatggccgtgtgacaggcatgctccacccctccagcttcgtcctggggcagggctccctccaagcctgtctccccactccccggccagaggtcagcaaccacagaaggccccccagatctgggcctggtgaggtgacctgcttctggaggggcagggccgcacccgagagcagggacaggtgcccgaacacagggtctccaggacgtagcgcccccccgcatacttgaatgtatgtgcgtatttattgctcacgtctgtgccatgttgtcaatgggtcctttccaacccaagaggtacatttgtttttctgtttttcctgaaaaataaagtcggccaagtgagtgtg

SEQ ID NO: 332141 - DNA, 470 bp, Homo sapiens
  misc_feature (145)..(145): n is a, c, g, or t
  misc_feature (148)..(148): n is a, c, g, or t
gtggaaacctgggaaacacactcaaggtcctggggcgcttcgacgaggctgccgtctgctccagcggcatctgagcatcgcccaagagcagggagacaaggttggggaggcgagggccctctacaacatcgggaaacgtgtaccnacncaaaggcaagcaactgtcctggaacgccgcaaacgccacgcaggaccgccggcacctgccgcccgatgtccgagagaccctgtgcaaggcctccgagttctacgagaggaacctgcttctggaggggcagggccgcacccgagagcagggacaggtgcccgaacacagggtctccaggacgtagcgcccccccgcatacttgaatgtatgtgcgtatttattgctcacgtctgtgccatgttgtcaatgggtcctttccaacccaagaggtacatttgtttttctgtttttcctgaaaaataaagtcggccaagtgagtgtg

SEQ ID NO: 332142 - DNA, 2088 bp, Homo sapiens
agcaggctggtactggtctgggagtatggatgggcggtggtggcctgggcaccttgtgtactgcctgcgctctgtgtggccaagcacccagcgtggctccctgctgctgtggagacagcctgtgatccgcagcatcccgagggccccgtcttcggacgaggagtgcttctttgacctgttgaccaagttccagagcagccgcatggacgaccagcgttgtcccctggacgatggccaggccggggctgccgaggccacggccgcccccaccctggaggacaggatcgcccagccctcgatgacggcctcgccccagaccgaggaattcttcgacctcatcgccagctcccagagccgccggctggacgaccagcgggccagcgtgggcagcctgccggggctgcgaatcacccacagcaatgcagggcacctccgaggccacggcgagccccaggagccgggggacgacttcttcaacatgctcatcaagtaccagtcctccaggatcgatgaccagcgctgcccaccacctgacgtactgccccggggccctaccatgccggacgaggacttcttcagcctcattcagagggtgcaggctaagcgcatggacgagcagcgggtggacctcgccgggggcccggagcagggggcaggcggcccgcccgagccccagcagcagtgccagcctggtgcgagctaaggccctgtgcccaccgccaggcccaccctgcccccactcctggacgccggtctcacagtcacagccacgtcctcccgaggccattgccgaggacaggcactgggcatgcagccccacggcctccccgacccagggcgacaggctcaggccaagctgcccgtggtgggagggcgtgcttccatcccgggctggcccccatggccctcagcttcctcccttctgcccctgccgcaggccggacggggccttcggcatgtcggccccgacctggtgctgtcagactcccgcatcctctcccccaagcccttcccgttctgccctgccctgccaaatgtgaaaccctgctgtctcccccaccctccccaaaggtgtctctgagccgcctcttggggccaccaaggacagggccatgttctgtccccccagagctggtcttgggatggccgtgtgacaggcatgctccacccctccagcttcgtcctggggcagggctccctccaagcctgtctccccactccccggccagaggtcagcaaccacagaaggccccccagaccacgcatggcagaccaggctgcagtggcagccctgaggtgccccccgccgagtcccagggccctgcaggggcctcgacaggagccgggcctatctctaaagcagagggaatggctgggcatgaacttcgacattccaaaaccccaagccaggaaaaagggcagggcctggtcctagggatgcttactggcagcaagagcagtgcccagtcagggtgggaggtagcaccaggctctgtgaccctcacccaagtgggggggtggtcagtggaagctggggaggcttcactcagctcaaccctgcagaccccccatatgagaacccccctcctcccaccagctgggggagatgacatcactgctctctccatggggagggggctcacagggcaccaagttcgggatcctaggactggcaggacctgctggagcctgagatgggccccaggggcctgaggttgcctcctcctgtccagacccagccttggcacctcccaagactgccaagggccctaccatggccccacagcccccagggctggcagttccatctaggagggtgcctctaggccccactctcaggctaggatggagaggcagatctgggcctggtgaggtgacctgcttctggaggggcagggccgcacccgagagcagggacaggtgcccgaacacagggtctccaggacgtagcgcccccccgcatacttgaatgtatgtgcgtatttattgctcacgtctgtgccatgttgtcaatgggtcctttccaacccaagaggtacatttgtttttctgtttttcctgaaaaataaagtcggccaagtgagtgtg

SEQ ID NO: 332143 - DNA, 647 bp, Homo sapiens
cccagagcgaggcaggccccagaaccaatttcctgggtggacagggggaagcccgtgaacagtgcacgctggcctctggaaccaccgctgctgaccagccccggaccactggggctgggggggtgaggccgccaactgcactgtgtccacccagtcctccaggatcgatgaccagcgctgcccaccacctgacgtactgccccggggccctaccatgccggacgaggacttcttcagcctcattcagagggtgcaggctaagcgcatggacgagcagcgggtggacctcgccgggggcccggagcagggggcaggcggcccgcccgagccccagcagcagtgccagcctggtgcgagctaaggccctgtgcccaccgccaggcccaccctgcccccactcctggacgccggtctcacagtcacagccacgtcctcccgaggccattgccgaggacaggcactgggcatgcagccccacggcctccccgacccagggcgacaggctcaggccaagctgcccgtggtgggagggcgtgcttccatcccgggctggcccccatggccctcagcttcctcccttctgcccctgccgcaggccggacggggccttcggcatgtcggccccgacctggtgctgtcagactccc

SEQ ID NO: 332144 - DNA, 159 bp, Homo sapiens
catgccatctctgaagaatattacagaccattttggagcatggtgaataagaaatttttaccttaggagttcacttgaatagtcatttttatatttgtgactgcaagtcacttttaggggctgtacttccttagtactggtagcattattatccaatgg

SEQ ID NO: 332145 - DNA, 306 bp, Homo sapiens
gaacctagtaaatactaattaattgttaatattatttaataaaatgacaggttttcaatgactagtaggactgacacacatattttgttttgctgtggctgattccagtgaagaagattcaaaatcttgagttctttaggatttgaaaaatagcaagagagcatcttgtcaactataaaacatcttcctaggctgggtgcggtggttcatgcctataatctcagcactttgggaggccgaggtgagaggatgtcttaagcccagaagttcaagaacagcctggacaatgaagtgagaccccatctc

SEQ ID NO: 332146 - DNA, 1966 bp, Homo sapiens
aattctaatcaatatttcatcattgctgtcaatgatagcctgttactaatgaaacaacattctgtcccagcactaaatttactgggacataaatttttcacatggagccaagctcttcactgattaagccaatgcagaatccacttgtgggcagtcagtgcccattaccccctgtgaaccattctgtgcccttgagtacatttgtgggtttaactcagtctatattcttaagttggtaatttttatgttgtaattctcaaagttctgtttctgtagctggactatgaataatacctgaatatgaagattgtgttttttaataatgtcaaagtggtgtgttgattatcataaatgttattaattcaaccccacagtttcttgggggctggttcctcattagagtgaaaggtagccaagagtgaaaactggaaggggcctaaggcttaaagtcttaagacctggatgtggttcaggttttgccatctgcctcagaaaaaatctcttcagttcttggagccttgaattcctcatctgttaaacaggaggaagaatatctacctcacaaagttcttatgagataatgaatataaaaatgtttcatccaggttgttgaatcatcccagcttatataataattacaaaggacatatgtactttaacaatggagaatgctgtgatttacctcttcaccgagtaacaaaatgtcacattgcttagattgagacagcccacataatgtgccaccttctgtgatgtaataagctgaaaaatgttcaacctgaatttaatcaagcttcttggacctcattgccaggttacaggaaatacaggaggcagaggaacaaataaaagacaccacgagaaacagacacatccagaacgtggaatattgcataagaaagctgccctggattcttcaaaatattattatgatgaaaaagagaggggagtgaaaattgttcaagctgtcttgagtctgctgtgagtttattataccattctctgcttttgtgtatgtatgaaaatttcgatatgaaaggtataaaacatggatgaggaggcttgtttttaaaagataatactagagagccgttaggtactaagaaccagaaatagactcacataaatggccaattgatttttgacaggggcaaaagcaattcaatggaggagggatcgccttttcagcaaatactgttggagtaattggatatccataggcagtaaaccaacaacttcaggacctaggactgagctaagaaggctcagatgactcaaaagcatgctccttagaaggaaaaaaaatgttaaattggacttcatcaaaattaagataatttaccctgtaagagacctttttacaaagatgatattacaggttgggaaaaaatatttgcaaatcatatccaacaagggatttgtatgtaaactacataaagaactttccaaatttaacagtaataagtaaatacaattagaaaataagcaaaagacagacatttcactgaagtatagatagcaaataagcaaatgaaaagatgttcaacatcattaggcatgagggaaatgcagagtaaaatcgtgagatatcacctatcagaatagcttaactttttttttttaatggtggtaactgctggcaaggatgaagagaaacaggatctcatacattgctgggaatgtaaaatggtacagccactctggaatataatttggcagtttcttgtaaaaccacacatgtatatgtcatgcttcaggaattgcacttctgagcatttatcccagagaaatgaaaacttgcgttcacacaaaaacctgtatacgaatgttcatagcagctttatttgtaatggtcgaaacctgtaggcaacccatatatccttccttaggtggttaaaacaaattgtggtttatgtattaccatggaatacttgttactctgcaataaaattgacttattgatatc

SEQ ID NO: 332147 - DNA, 899 bp, Homo sapiens
tattctcggctcggccattattctgtgcctcggctgccggaagggctcgttcctgtgtcatctcctagcggcctggcgccgaggcggcggtacgcaaggctggagccgcagcgggagcccccggtgagcggggtgggctcgggggcgggtgggcgtgcagggaaggcggcccgggacgcgggcctgagcttgctgggactgcacagccctcggtagcctctcccgggccctgacccccggcatggtccgtcgccagcttcgtgttggggttcgacgtcgtggcctcggctgggcaggcagccggcccgagggaagtactgaggacagcagctccgagtctgtgtgtgtttgtggaccggtgctcctgtctaacggactctgctggcgctttgagaagagctgcctcagtagcctgctcccccagctcaggcctttctgctcttcctcagtcttgtctgaggctaatccacagaaacattctgaggtttccctattaccggtggcgcccagactcttgaggacggatttttttgtttgtttgttttaaggggtggaacgattttagcttttttagtcttttagttttgtaatataatggtatttaaaaatcaaacttgaaaaactcaaacttgaaaccacccataccaacattacttcaggcaatacattttaacacaaagtactaagaccgtaaactcagaataaatgctggcctttgcgcgcgcgcgcgcacacacacacacacacacacacacacacacacacactcattgccaacctgtcagcgacgattgttactggttttctctttttgcagcttaccagattaaagctttgtcgtggactggtgtttggaaactgttgttttagaacagtttgggttgtttgggtttcataag

SEQ ID NO: 332148 - DNA, 4606 bp, Homo sapiens
ccagagccttaggcagggggtttctgtcagaggaagcactctctagagcctggaaccttgcactcacaaaggttctctttattactgggagctgactgggagctgactggggcctggaaagctcagttgtttctctgggctaactttaacaatgatttcttgaggtcttgtagatgatactctccaagctgtaaggaagaagtcaaggattaaggagacctggactggagaggagcctttttcaaaaaacaacaatgacaagagaaaatgtagcccacaatgctctgagacaagagggccttgtgaaggggaaggatgatacctggaaatggggaaccagcttccaaggaagtagctcctctgtttgggagacctcccacctacactttagacaattacgttaccatgagacatctggaccccaggaagccctgagccggctcagggaactctgtcgccggtggctgagaccagaagcacgcaccaaggcacagatcctggagctgctggtgctggagcagtttctgagcatcctgcctggggagattcggacctgggtacagctccatcaccctggaagtggcgaggaggctgtggccctggtagaggagctgcagaaagaccttgatggaccagcaatacaagttccagtccttgtcaaggatcaggacactctccagaaggtggtgagtgccccaggaacaacacttcctcctgtacttcctggcagccacatagcagctgaaatttgcccgcatcctcctactgacctagtggcattcaacctccaggatcctcagcatgattctcctgcccctgaagcttctgccctttcccaggaagagaacccaagaaatcaattaatggcacttatgctcctaacagcccagccccaggagttggtgatgttcgaggaggtgtcagtatgcttcacttcagaggaatgggcatgtctgggcccaatccagagggccttgtactgggatgtgatgctggagaattatggaaatgtgacctccctagaatgggagaccatgaccgagaatgaggaggtgacatcaaagccaagtagttctcaaagagcagactctcataaaggaacatcaaaaagacttcaaggaagtgttccccaggtccttgattttgaagaagagtgtgaatggcaagttttggcaagtcagtggggaaatgaaacagatgaaagggcagatacagtgaagaaagtttccctttgtgaacgagacaagaagaaaaggactccaccagagaaacaaggccaaaagtggaaggaattaggagacagcttgactttcggttcagctatttctgaaagtttaataggtactgaaggaaagaagttttataaatgtgatatgtgttgtaaacattttaataaaatctcccatcttataaaccatcggagaatccacactggtgagaaacctcataaatgtaaggaatgtggaaaaggctttattcagcgttcgagccttctaatgcatttacggaaccattcaggggagaaaccttataaatgtaatgaatgtgggaaagcattttctcaaagtgcttaccttctaaaccatcagaggatccacactggggagaaaccttataagtgtaaggagtgtggaaagggcttctataggcactcaggcctaattatacatctaaggcgccattcaggggagagaccttataagtgtaatgaatgtgggaaagtcttctctcagaatgcttacctcattgaccatcagaggctccacaaaggggaagaaccttataaatgtaataagtgtcagaaagctttcattctgaagaagagcctcattctgcaccagagaatccactctggggaaaaaccctataaatgtgatgaatgtggaaagacctttgctcagaccacttatcttattgaccatcagcgactccacagtgcagagaacccttacaagtgtaaagaatgtggaaaagttttcattcgaagcaaaagcctcctcttacatcagagagtccacacagaaaagaaaacctttggttgtaaaaagtgtgggaagattttcagttctaagtcaaacttcattgaccataagaggatgcacagcagagagaaaccttacaaatgcactgaatgtgggaaagcctttactcaaagtgcttacctttttgaccaccagagactccacaatggggagaagccctatgaatgtaatgaatgtgggaaagtttttattctgaagaagagcctcattttacatcaaaggttccacactggagagaatctctatgaatgtaaagattgtggtaaggtcttcggttcaaacagaaacctcattgaccatgagagactccacaatggggagaagccatatgaatgtcgagagtgtgggaaaacctttattatgagcaaaagttttatggtccatcagaaactccatacacaagagaaagcctacaaatgtgaggattgtgggaaggctttcagttacaattcaagcctgcttgtacatcggagaatccacaccggagaaaaaccctttgaatgcagtgagtgtggaagagctttcagttcaaacagaaacctcattgagcataagagaatccacagtggtgagaaaccctatgagtgtgatgagtgtggcaaatgcttcattctgaagaaaagcctcattggacatcagagaattcacacgagggaaaaatcttataaatgcaatgactgtgggaaggtcttcagttaccgctcaaaccttatagcccatcagaggatccatactggtgagaagccctatgcgtgtagtgagtgtggaaaaggttttacgtacaacagaaacctgattgaacatcaaagaattcacagtggagaaaaaacctacgaatgtcatgtatgtaggaaagtccttacctctagtagaaatcttatggtacatcaaagaatccatactggagagaaaccttataaatgtaatgagtgtggaaaagactttagtcagaataaaaaccttgttgtacatcagagaatgcacactggggaaaaaccttatgagtgtgacaagtgtaggaaatcctttacttctaagaggaatttagttggccaccagagaattcacacaggggagaaaccctatgggtgtaatgattgtagtaaagtttttaggcaaagaaaaaaccttactgtacatcagaaaatccacacagatgaaaaaccttgtgaatgtgatgtgtctgaaaaagaattctctcagacttccaaccttcatcttcaacagaaaatccataccattgaggaattctcttggctacaaaacaccaatgagtccaagattgagattcagaaaatctagtgtcatatgtaaaatggaatagaatccctgcctacttaagtaactgttggacaaatgatatatatttcttctaaggaaaaagtttattatttactctttactagacaaatgagtagcatatagaagaaagttaataggccgggcttggtggctcatgcctgtaatcccagcactttgagaggccgaagcgagtggatcacctgaggtcaggattttgagaccagcctgaccaacatggtgaaaccccatctctactaaaatacaaaaattatccgggcatgggggcacacaccggtaatcccagctactcaggaggctgagacaggagagtcgcttgaacctgggagggcggaggttgcagtgagccaggatcgcgccattgcactccagcctgggcaacaagagcgaaactcttgtctgaaaaaataaagttcatcccaactttcaagtctacaaaaacataatccaaatctaataacatagttgtaaatgagagcaacaataaaaagtagacatgggctgggtgcagtggctcactcctgtagtcccaggactttgggaggccgaggtgggaagatcccttgagcccaggagttcgagacaagcctgggtaacacggggagacccgtctttagtaaataaaaataaatttattaataaaactaaaaatttaataataaaaagtggacattgttttttaaaatgtgtatagtatgcattttaaagatagtgtccctgctgtggaaaacctgaacagacagtatgatccagaatgtcaggtgtggagttgggcggacaagagtctgctgatgaggacaacctaaaagagcactggatttggaatcagaagacctacctttgattcctggctttcccttaatggccatgtgatgttattaagtcagcctctaaagctttagtttcctgtcagtcaaatgttgacatgatacctacctcacagggttgttgtgagggttaagtgaaaggatctttgtgaaagtactttttgaaatcattcagttgtcaataaagttggataaaagaggttatggtaaaagtttagaacatgggatcatgtaagtttgtgtattaagtcaatattagaatgagggggattccaggaacctaaaagatactcattttcataagaggaagtatggtgaatagctaactggaatttagtgttctaagaataattttgttaaatttacctttaaaaatatctgagggagttactagattatatatctagtttatgtata

SEQ ID NO: 332149 - DNA, 4689 bp, Homo sapiens
tattctcggctcggccattattctgtgcctcggctgccggaagggctcgttcctgtgtcatctcctagcggcctggcgccgaggcggcggtacgcaaggctggagccgcagcgggagcccccgatgatactctccaagctgtaaggaagaagtcaaggattaaggagacctggactggagaggagcctttttcaaaaaacaacaatgacaagagaaaatgtagcccacaatgctctgagacaagagggccttgtgaaggggaaggatgatacctggaaatggggaaccagcttccaaggaagtagctcctctgtttgggagacctcccacctacactttagacaattacgttaccatgagacatctggaccccaggaagccctgagccggctcagggaactctgtcgccggtggctgagaccagaagcacgcaccaaggcacagatcctggagctgctggtgctggagcagtttctgagcatcctgcctggggagattcggacctgggtacagctccatcaccctggaagtggcgaggaggctgtggccctggtagaggagctgcagaaagaccttgatggaccagcaatacaagtctggcttctgttcccaccgttgtgtacagtctcctctgggagaggtcaccagtgccatgagtggggctcgagggcagctccattgttctcaatgcaaagctttactgctgttttgatgctccatacttgaggttccagtccttgtcaaggatcaggacactctccagaaggtggtgagtgccccaggaacaacacttcctcctgtacttcctggcagccacatagcagctgaaatttgcccgcatcctcctactgacctagtggcattcaacctccaggatcctcagcatgattctcctgcccctgaagcttctgccctttcccaggaagagaacccaagaaatcaattaatggcacttatgctcctaacagcccagccccaggagttggtgatgttcgaggaggtgtcagtatgcttcacttcagaggaatgggcatgtctgggcccaatccagagggccttgtactgggatgtgatgctggagaattatggaaatgtgacctccctagaatgggagaccatgaccgagaatgaggaggtgacatcaaagccaagtagttctcaaagagcagactctcataaaggaacatcaaaaagacttcaaggaagtgttccccaggtccttgattttgaagaagagtgtgaatggcaagttttggcaagtcagtggggaaatgaaacagatgaaagggcagatacagtgaagaaagtttccctttgtgaacgagacaagaagaaaaggactccaccagagaaacaaggccaaaagtggaaggaattaggagacagcttgactttcggttcagctatttctgaaagtttaataggtactgaaggaaagaagttttataaatgtgatatgtgttgtaaacattttaataaaatctcccatcttataaaccatcggagaatccacactggtgagaaacctcataaatgtaaggaatgtggaaaaggctttattcagcgttcgagccttctaatgcatttacggaaccattcaggggagaaaccttataaatgtaatgaatgtgggaaagcattttctcaaagtgcttaccttctaaaccatcagaggatccacactggggagaaaccttataagtgtaaggagtgtggaaagggcttctataggcactcaggcctaattatacatctaaggcgccattcaggggagagaccttataagtgtaatgaatgtgggaaagtcttctctcagaatgcttacctcattgaccatcagaggctccacaaaggggaagaaccttataaatgtaataagtgtcagaaagctttcattctgaagaagagcctcattctgcaccagagaatccactctggggaaaaaccctataaatgtgatgaatgtggaaagacctttgctcagaccacttatcttattgaccatcagcgactccacagtgcagagaacccttacaagtgtaaagaatgtggaaaagttttcattcgaagcaaaagcctcctcttacatcagagagtccacacagaaaagaaaacctttggttgtaaaaagtgtgggaagattttcagttctaagtcaaacttcattgaccataagaggatgcacagcagagagaaaccttacaaatgcactgaatgtgggaaagcctttactcaaagtgcttacctttttgaccaccagagactccacaatggggagaagccctatgaatgtaatgaatgtgggaaagtttttattctgaagaagagcctcattttacatcaaaggttccacactggagagaatctctatgaatgtaaagattgtggtaaggtcttcggttcaaacagaaacctcattgaccatgagagactccacaatggggagaagccatatgaatgtcgagagtgtgggaaaacctttattatgagcaaaagttttatggtccatcagaaactccatacacaagagaaagcctacaaatgtgaggattgtgggaaggctttcagttacaattcaagcctgcttgtacatcggagaatccacaccggagaaaaaccctttgaatgcagtgagtgtggaagagctttcagttcaaacagaaacctcattgagcataagagaatccacagtggtgagaaaccctatgagtgtgatgagtgtggcaaatgcttcattctgaagaaaagcctcattggacatcagagaattcacacgagggaaaaatcttataaatgcaatgactgtgggaaggtcttcagttaccgctcaaaccttatagcccatcagaggatccatactggtgagaagccctatgcgtgtagtgagtgtggaaaaggttttacgtacaacagaaacctgattgaacatcaaagaattcacagtggagaaaaaacctacgaatgtcatgtatgtaggaaagtccttacctctagtagaaatcttatggtacatcaaagaatccatactggagagaaaccttataaatgtaatgagtgtggaaaagactttagtcagaataaaaaccttgttgtacatcagagaatgcacactggggaaaaaccttatgagtgtgacaagtgtaggaaatcctttacttctaagaggaatttagttggccaccagagaattcacacaggggagaaaccctatgggtgtaatgattgtagtaaagtttttaggcaaagaaaaaaccttactgtacatcagaaaatccacacagatgaaaaaccttgtgaatgtgatgtgtctgaaaaagaattctctcagacttccaaccttcatcttcaacagaaaatccataccattgaggaattctcttggctacaaaacaccaatgagtccaagattgagattcagaaaatctagtgtcatatgtaaaatggaatagaatccctgcctacttaagtaactgttggacaaatgatatatatttcttctaaggaaaaagtttattatttactctttactagacaaatgagtagcatatagaagaaagttaataggccgggcttggtggctcatgcctgtaatcccagcactttgagaggccgaagcgagtggatcacctgaggtcaggattttgagaccagcctgaccaacatggtgaaaccccatctctactaaaatacaaaaattatccgggcatgggggcacacaccggtaatcccagctactcaggaggctgagacaggagagtcgcttgaacctgggagggcggaggttgcagtgagccaggatcgcgccattgcactccagcctgggcaacaagagcgaaactcttgtctgaaaaaataaagttcatcccaactttcaagtctacaaaaacataatccaaatctaataacatagttgtaaatgagagcaacaataaaaagtagacatgggctgggtgcagtggctcactcctgtagtcccaggactttgggaggccgaggtgggaagatcccttgagcccaggagttcgagacaagcctgggtaacacggggagacccgtctttagtaaataaaaataaatttattaataaaactaaaaatttaataataaaaagtggacattgttttttaaaatgtgtatagtatgcattttaaagatagtgtccctgctgtggaaaacctgaacagacagtatgatccagaatgtcaggtgtggagttgggcggacaagagtctgctgatgaggacaacctaaaagagcactggatttggaatcagaagacctacctttgattcctggctttcccttaatggccatgtgatgttattaagtcagcctctaaagctttagtttcctgtcagtcaaatgttgacatgatacctacctcacagggttgttgtgagggttaagtgaaaggatctttgtgaaagtactttttgaaatcattcagttgtcaataaagttggataaaagaggttatggtaaaagtttagaacatgggatcatgtaagtttgtgtattaagtcaatattagaatgagggggattccaggaacctaaaagatactcattttcataagaggaagtatggtgaatagctaactggaatttagtgttctaagaataattttgttaaatttacctttaaaaatatctgagggagttactagattatatatctagtttatgtata

SEQ ID NO: 332150 - DNA, 4627 bp, Homo sapiens
gtatatcaattaatggacttatgctcctaacagcccagccccaggacttggtgatgttcgaggaggtgtcagtatgcttcacttcagaggaatgggcatgtctgggcccaatccttagggccttgtactgggatgtgatgctggagaattatggaaatgtgacctccctagaatgggagaccatgaccgagaatgaggaggtgacatcaaagccaagtagttctcaaagagcattttctcataaaggaacatcaaaaagacctcccacctacactttagacaattacgttaccatgagacatctggaccccaggaagccctgagccggctcagggaactctgtcgccggtggctgagaccagaagcacgcaccaaggcacagatcctggagctgctggtgctggagcagtttctgagcatcctgcctggggagattcggacctgggtacagctccatcaccctggaagtggcgaggaggctgtggccctggtagaggagctgcagaaagaccttgatggaccagcaatacaagtctggcttctgttcccaccgttgtgtacagtctcctctgggagaggtcaccagtgccatgagtggggctcgagggcagctccattgttctcaatgcaaagctttactgctgttttgatgctccatacttgaggttccagtccttgtcaaggatcaggacactctccagaaggtggtgagtgccccaggaacaacacttcctcctgtacttcctggcagccacatagcagctgaaatttgcccgcatcctcctactgacctagtggcattcaacctccaggatcctcagcatgattctcctgcccctgaagcttctgccctttcccaggaagagaacccaagaaatcaattaatggcacttatgctcctaacagcccagccccaggagttggtgatgttcgaggaggtgtcagtatgcttcacttcagaggaatgggcatgtctgggcccaatccagagggccttgtactgggatgtgatgctggagaattatggaaatgtgacctccctagaatgggagaccatgaccgagaatgaggaggtgacatcaaagccaagtagttctcaaagagcagactctcataaaggaacatcaaaaagacttcaaggaagtgttccccaggtccttgattttgaagaagagtgtgaatggcaagttttggcaagtcagtggggaaatgaaacagatgaaagggcagatacagtgaagaaagtttccctttgtgaacgagacaagaagaaaaggactccaccagagaaacaaggccaaaagtggaaggaattaggagacagcttgactttcggttcagctatttctgaaagtttaataggtactgaaggaaagaagttttataaatgtgatatgtgttgtaaacattttaataaaatctcccatcttataaaccatcggagaatccacactggtgagaaacctcataaatgtaaggaatgtggaaaaggctttattcagcgttcgagccttctaatgcatttacggaaccattcaggggagaaaccttataaatgtaatgaatgtgggaaagcattttctcaaagtgcttaccttctaaaccatcagaggatccacactggggagaaaccttataagtgtaaggagtgtggaaagggcttctataggcactcaggcctaattatacatctaaggcgccattcaggggagagaccttataagtgtaatgaatgtgggaaagtcttctctcagaatgcttacctcattgaccatcagaggctccacaaaggggaagaaccttataaatgtaataagtgtcagaaagctttcattctgaagaagagcctcattctgcaccagagaatccactctggggaaaaaccctataaatgtgatgaatgtggaaagacctttgctcagaccacttatcttattgaccatcagcgactccacagtgcagagaacccttacaagtgtaaagaatgtggaaaagttttcattcgaagcaaaagcctcctcttacatcagagagtccacacagaaaagaaaacctttggttgtaaaaagtgtgggaagattttcagttctaagtcaaacttcattgaccataagaggatgcacagcagagagaaaccttacaaatgcactgaatgtgggaaagcctttactcaaagtgcttacctttttgaccaccagagactccacaatggggagaagccctatgaatgtaatgaatgtgggaaagtttttattctgaagaagagcctcattttacatcaaaggttccacactggagagaatctctatgaatgtaaagattgtggtaaggtcttcggttcaaacagaaacctcattgaccatgagagactccacaatggggagaagccatatgaatgtcgagagtgtgggaaaacctttattatgagcaaaagttttatggtccatcagaaactccatacacaagagaaagcctacaaatgtgaggattgtgggaaggctttcagttacaattcaagcctgcttgtacatcggagaatccacaccggagaaaaaccctttgaatgcagtgagtgtggaagagctttcagttcaaacagaaacctcattgagcataagagaatccacagtggtgagaaaccctatgagtgtgatgagtgtggcaaatgcttcattctgaagaaaagcctcattggacatcagagaattcacacgagggaaaaatcttataaatgcaatgactgtgggaaggtcttcagttaccgctcaaaccttatagcccatcagaggatccatactggtgagaagccctatgcgtgtagtgagtgtggaaaaggttttacgtacaacagaaacctgattgaacatcaaagaattcacagtggagaaaaaacctacgaatgtcatgtatgtaggaaagtccttacctctagtagaaatcttatggtacatcaaagaatccatactggagagaaaccttataaatgtaatgagtgtggaaaagactttagtcagaataaaaaccttgttgtacatcagagaatgcacactggggaaaaaccttatgagtgtgacaagtgtaggaaatcctttacttctaagaggaatttagttggccaccagagaattcacacaggggagaaaccctatgggtgtaatgattgtagtaaagtttttaggcaaagaaaaaaccttactgtacatcagaaaatccacacagatgaaaaaccttgtgaatgtgatgtgtctgaaaaagaattctctcagacttccaaccttcatcttcaacagaaaatccataccattgaggaattctcttggctacaaaacaccaatgagtccaagattgagattcagaaaatctagtgtcatatgtaaaatggaatagaatccctgcctacttaagtaactgttggacaaatgatatatatttcttctaaggaaaaagtttattatttactctttactagacaaatgagtagcatatagaagaaagttaataggccgggcttggtggctcatgcctgtaatcccagcactttgagaggccgaagcgagtggatcacctgaggtcaggattttgagaccagcctgaccaacatggtgaaaccccatctctactaaaatacaaaaattatccgggcatgggggcacacaccggtaatcccagctactcaggaggctgagacaggagagtcgcttgaacctgggagggcggaggttgcagtgagccaggatcgcgccattgcactccagcctgggcaacaagagcgaaactcttgtctgaaaaaataaagttcatcccaactttcaagtctacaaaaacataatccaaatctaataacatagttgtaaatgagagcaacaataaaaagtagacatgggctgggtgcagtggctcactcctgtagtcccaggactttgggaggccgaggtgggaagatcccttgagcccaggagttcgagacaagcctgggtaacacggggagacccgtctttagtaaataaaaataaatttattaataaaactaaaaatttaataataaaaagtggacattgttttttaaaatgtgtatagtatgcattttaaagatagtgtccctgctgtggaaaacctgaacagacagtatgatccagaatgtcaggtgtggagttgggcggacaagagtctgctgatgaggacaacctaaaagagcactggatttggaatcagaagacctacctttgattcctggctttcccttaatggccatgtgatgttattaagtcagcctctaaagctttagtttcctgtcagtcaaatgttgacatgatacctacctcacagggttgttgtgagggttaagtgaaaggatctttgtgaaagtactttttgaaatcattcagttgtcaataaagttggataaaagaggttatggtaaaagtttagaacatgggatcatgtaagtttgtgtattaagtcaatattagaatgagggggattccaggaacctaaaagatactcattttcataagaggaagtatggtgaatagctaactggaatttagtgttctaagaataattttgttaaatttacctttaaaaatatctgagggagttactagattatatatctagtttatgtata

SEQ ID NO: 332151 - DNA, 2711 bp, Homo sapiens
tattctcggctcggccattattctgtgcctcggctgccggaagggctcgttcctgtgtcatctcctagcggcctggcgccgaggcggcggtacgcaaggctggagccgcagcgggagcccccgatgatactctccaagctgtaaggaagaagtcaaggattaaggagacctggactggagaggagcctttttcaaaaaacaacaatgacaagagaaaatgtagcccacaatgctctgagacaagagggccttgtgaaggggaaggatgatacctggaaatggggaaccagcttccaaggaagtagctcctctgtttgggagacctcccacctacactttagacaattacgttaccatgagacatctggaccccaggaagccctgagccggctcagggaactctgtcgccggtggctgagaccagaagcacgcaccaaggcacagatcctggagctgctggtgctggagcagtttctgagcatcctgcctggggagattcggacctgggtacagctccatcaccctggaagtggcgaggaggctgtggccctggtagaggagctgcagaaagaccttgatggaccagcaatacaagttccagtccttgtcaaggatcaggacactctccagaaggtggtgagtgccccaggaacaacacttcctcctgtacttcctggcagccacatagcagctgaaatttgcccgcatcctcctactgacctagtggcattcaacctccaggatcctcagcatgattctcctgcccctgaagcttctgccctttcccaggaagagaacccaagaaatcaattaatggcacttatgctcctaacagcccagccccaggagttggtgatgttcgaggaggtgtcagtatgcttcacttcagaggaatgggcatgtctgggcccaatccagagggccttgtactgggatgtgatgctggagaattatggaaatgtgacctccctagaatgggagaccatgaccgagaatgaggaggtgacatcaaagccaagtagttctcaaagagcagactctcataaaggaacatcaaaaagacttcaaggaagtgttccccaggtccttgattttgaagaagagtgtgaatggcaagttttggcaagtcagtggggaaatgaaacagatgaaagggcagatacagtgaagaaagtttccctttgtgaacgagacaagaagaaaaggactccaccagagaaacaaggccaaaagtggaaggaattaggagacagcttgactttcggttcagctatttctgaaagtttaataggtactgaaggaaagaagttttataaatgtgatatgtgttgtaaacattttaataaaatctcccatcttataaaccatcggagaatccacactggtgagaaacctcataaatgtaaggaatgtggaaaaggctttattcagcgttcgagccttctaatgcatttacggaaccattcaggggagaaaccttataaatgtaatgaatgtgggaaagcattttctcaaagtgcttaccttctaaaccatcagaggatccacactggggagaaaccttataagtgtaaggagtgtggaaagggcttctataggcactcaggcctaattatacatctaaggcgccattcaggggagagaccttataagtgtaatgaatgtgggaaagtcttctctcagaatgcttacctcattgaccatcagaggctccacaaaggggaagaaccttataaatgtaataagtgtcagaaagctttcattctgaagaagagcctcattctgcaccagagaatccactctggggaaaaaccctataaatgtgatgaatgtggaaagacctttgctcagaccacttatcttattgaccatcagcgactccacagtgcagagaacccttacaagtgtaaagaatgtggaaaagttttcattcgaagcaaaagcctcctcttacatcagagagtccacacagaaaagaaaacctttggttgtaaaaagtgtgggaagattttcagttctaagtcaaacttcattgaccataagaggatgcacagcagagagaaaccttacaaatgcactgaatgtgggaaagcctttactcaaagtgcttacctttttgaccaccagagactccacaatggggagaagccctatgaatgtaatgaatgtgggaaagtttttattctgaagaagagcctcattttacatcaaaggttccacactggagagaatctctatgaatgtaaagattgtggtaaggtcttcggttcaaacagaaacctcattgaccatgagagactccacaatggggagaagccatatgaatgtcgagagtgtgggaaaacctttattatgagcaaaagttttatggtccatcagaaactccatacacaagagaaagcctacaaatgtgaggattgtgggaaggctttcagttacaattcaagcctgcttgtacatcggagaatccacaccggagaaaaaccctttgaatgcagtgagtgtggaagagctttcagttcaaacagaaacctcattgagcataagagaatccacagtggtgagaaaccctatgagtgtgatgagtgtggcaaatgcttcattctgaagaaaagcctcattggacatcagagaattcacacgggaaacttatatgcatgcttggagctcagtaccgtcactaatgcctagactactgtggagcatgcgta

SEQ ID NO: 332152 - DNA, 2964 bp, Homo sapiens
tattctcggctcggccattattctgtgcctcggctgccggaagggctcgttcctgtgtcatctcctagcggcctggcgccgaggcggcggtacgcaaggctggagccgcagcgggagcccccgatgatactctccaagctgtaaggaagaagtcaaggattaaggagacctggactggagaggagcctttttcaaaaaacaacaatgacaagagaaaatgtagcccacaatgctctgagacaagagggccttgtgaaggggaaggatgatacctggaaatggggaaccagcttccaaggaagtagctcctctgtttgggagacctcccacctacactttagacaattacgttaccatgagacatctggaccccaggaagccctgagccggctcagggaactctgtcgccggtggctgagaccagaagcacgcaccaaggcacagatcctggagctgctggtgctggagcagtttctgagcatcctgcctggggagattcggacctgggtacagctccatcaccctggaagtggcgaggaggctgtggccctggtagaggagctgcagaaagaccttgatggaccagcaatacaagttccagtccttgtcaaggatcaggacactctccagaaggtggtgagtgccccaggaacaacacttcctcctgtacttcctggcagccacatagcagctgaaatttgcccgcatcctcctactgacctagtggcattcaacctccaggatcctcagcatgattctcctgcccctgaagcttctgccctttcccaggaagagaacccaagaaatcaattaatggcacttatgctcctaacagcccagccccaggagttggtgatgttcgaggaggtgtcagtatgcttcacttcagaggaatgggcatgtctgggcccaatccagagggccttgtactgggatgtgatgctggagaattatggaaatgtgacctccctaggttacaggaaatacaggaggcagaggaacaaataaaagacaccacgagaaacagacacatccagaacgtggaatattgcataagaaagctgccctggattcttcaaaatattattatgatgaaaaagagaggggagtgaaaattgttcaagctgtcttgagtctgctgtgagtttattataccattctctgcttttgtgtatgtatgaaaatttcgatatgaaaggtataaaacatggatgaggaggcttgtttttaaaagataatactagagagccgttaggtactaagaaccagaaatagactcacataaatggccaattgatttttgacaggggcaaaagcaattcaatggaggagggatcgccttttcagcaaatactgttggagtaattggatatccataggcagtaaaccaacaacttcaggacctaggactgagctaagaaggctcagatgactcaaaagcatgctccttagaaggaaaaaaaatgttaaattggacttcatcaaaattaagataatttaccctgtaagagacctttttacaaagatgatattacaggttgggaaaaaatatttgcaaatcatatccaacaagggatttgtatgtaaactacataaagaactttccaaatttaacagtaataagtaaatacaattagaaaataagcaaaagacagacatttcactgaagtatagatagcaaataagcaaatgaaaagatgttcaacatcattaggcatgagggaaatgcagagtaaaatcgtgagatatcacctatcagaatagcttaactttttttttttaatggtggtaactgctggcaaggatgaagagaaacaggatctcatacattgctgggaatgtaaaatggtacagccactctggaatataatttggcagtttcttgtaaaaccacacatgtatatgtcatgcttcaggaattgcacttctgagcatttatcccagagaaatgaaaacttgcgttcacacaaaaacctgtatacgaatgttcatagcagctttatttgtaatggtcgaaacctgtaggcaacccatatatccttccttaggtggttaaaacaaattgtggtttatgtattaccatggaatacttgttactctgcaataaaattgacttattgatatccataacaactcaaataaatttcaagggaattaatgctgagtgaaaataatcacaaaaggccatattctgtatgaaaatattcatataacattctcaaaatgataaaactatagagatgaaaaatggattaatggttgccaaaggttagggatggtgggaggaaaaatggggagagggttggatggaactattaaaaggtagcaccagaaaggtctttgtggtgatggaacacttgtgtatcttgattgcagtggtggttacacaaatctataggtgctatacctatacacacatactgtaccaatgttgatttcctttttcattttatgtaagatgtaaccatgaggggaaagtgggtgaagggtgctatctttgcaacttcctgtgattctatcatttcaaaataaaaagtaaaaaccaacaatggcaacgaaaacccaaaactaaagagctgtaaccaactaaagtgtgtgaaactgatttgaaaaaaagttataaaatacatgttttaggacagttgggaaatttgaatatgactggttattagatggtattagggaatttttgttgattttcttacctgtgacggtggtggtagtttgaagaatattcttaatcttaagggatgcatgttgaagtatttggaatgaagtgttctgatgtttacaactttcaaaaaaatgattttaaatatgtattgagagatcaggcaaacatagcaaaatgttcattgttgagtccacatggaaaatacgggtattcaatgtgccatactttcaactcttctgtactctgatattttcaaaataaaacatttgaggggaaattaaaaaaaaaaa

SEQ ID NO: 332153 - DNA, 2805 bp, Homo sapiens
aattctaatcaatatttcatcattgctgtcaatgatagcctgttactaatgaaacaacattctgtcccagcactaaatttactgggacataaatttttcacatggagccaagctcttcactgattaagccaatgcagaatccacttgtgggcagtcagtgcccattaccccctgtgaaccattctgtgcccttgagtacatttgtgggtttaactcagtctatattcttaagttggtaatttttatgttgtaattctcaaagttctgtttctgtagctggactatgaataatacctgaatatgaagattgtgttttttaataatgtcaaagtggtgtgttgattatcataaatgttattaattcaaccccacagtttcttgggggctggttcctcattagagtgaaaggtagccaagagtgaaaactggaaggggcctaaggcttaaagtcttaagacctggatgtggttcaggttttgccatctgcctcagaaaaaatctcttcagttcttggagccttgaattcctcatctgttaaacaggaggaagaatatctacctcacaaagttcttatgagataatgaatataaaaatgtttcatccaggttgttgaatcatcccagcttatataataattacaaaggacatatgtactttaacaatggagaatgctgtgatttacctcttcaccgagtaacaaaatgtcacattgcttagattgagacagcccacataatgtgccaccttctgtgatgtaataagctgaaaaatgttcaacctgaatttaatcaagcttcttggacctcattgccaggttacaggaaatacaggaggcagaggaacaaataaaagacaccacgagaaacagacacatccagaacgtggaatattgcataagaaagctgccctggattcttcaaaatattattatgatgaaaaagagaggggagtgaaaattgttcaagctgtcttgagtctgctgtgagtttattataccattctctgcttttgtgtatgtatgaaaatttcgatatgaaaggtataaaacatggatgaggaggcttgtttttaaaagataatactagagagccgttaggtactaagaaccagaaatagactcacataaatggccaattgatttttgacaggggcaaaagcaattcaatggaggagggatcgccttttcagcaaatactgttggagtaattggatatccataggcagtaaaccaacaacttcaggacctaggactgagctaagaaggctcagatgactcaaaagcatgctccttagaaggaaaaaaaatgttaaattggacttcatcaaaattaagataatttaccctgtaagagacctttttacaaagatgatattacaggttgggaaaaaatatttgcaaatcatatccaacaagggatttgtatgtaaactacataaagaactttccaaatttaacagtaataagtaaatacaattagaaaataagcaaaagacagacatttcactgaagtatagatagcaaataagcaaatgaaaagatgttcaacatcattaggcatgagggaaatgcagagtaaaatcgtgagatatcacctatcagaatagcttaactttttttttttaatggtggtaactgctggcaaggatgaagagaaacaggatctcatacattgctgggaatgtaaaatggtacagccactctggaatataatttggcagtttcttgtaaaaccacacatgtatatgtcatgcttcaggaattgcacttctgagcatttatcccagagaaatgaaaacttgcgttcacacaaaaacctgtatacgaatgttcatagcagctttatttgtaatggtcgaaacctgtaggcaacccatatatccttccttaggtggttaaaacaaattgtggtttatgtattaccatggaatacttgttactctgcaataaaattgacttattgatatccataacaactcaaataaatttcaagggaattaatgctgagtgaaaataatcacaaaaggccatattctgtatgaaaatattcatataacattctcaaaatgataaaactatagagatgaaaaatggattaatggttgccaaaggttagggatggtgggaggaaaaatggggagagggttggatggaactattaaaaggtagcaccagaaaggtctttgtggtgatggaacacttgtgtatcttgattgcagtggtggttacacaaatctataggtgctatacctatacacacatactgtaccaatgttgatttcctttttcattttatgtaagatgtaaccatgaggggaaagtgggtgaagggtgctatctttgcaacttcctgtgattctatcatttcaaaataaaaagtaaaaaccaacaatggcaacgaaaacccaaaactaaagagctgtaaccaactaaagtgtgtgaaactgatttgaaaaaaagttataaaatacatgttttaggacagttgggaaatttgaatatgactggttattagatggtattagggaatttttgttgattttcttacctgtgacggtggtggtagtttgaagaatattcttaatcttaagggatgcatgttgaagtatttggaatgaagtgttctgatgtttacaactttcaaaaaaatgattttaaatatgtattgagagatcaggcaaacatagcaaaatgttcattgttgagtccacatggaaaatacgggtattcaatgtgccatactttcaactcttctgtactctgatattttcaaaataaaacatttgaggggaaattaaaaaaaaaaa

SEQ ID NO: 332154 - DNA, 2395 bp, Homo sapiens
tattctcggctcggccattattctgtgcctcggctgccggaagggctcgttcctgtgtcatctcctagcggcctggcgccgaggcggcggtacgcaaggctggagccgcagcgggagcccccgatgatactctccaagctgtaaggaagaagtcaaggattaaggagacctggactggagaggagcctttttcaaaaaacaacaatgacaagagaaaatgtagcccacaatgctctgagacaagagggccttgtgaaggggaaggatgatacctggaaatggggaaccagcttccaaggaagtagctcctctgtttgggagacctcccacctacactttagacaattacgttaccatgagacatctggaccccaggaagccctgagccggctcagggaactctgtcgccggtggctgagaccagaagcacgcaccaaggcacagatcctggagctgctggtgctggagcagtttctgagcatcctgcctggggagattcggacctgggtacagctccatcaccctggaagtggcgaggaggctgtggccctggtagaggagctgcagaaagaccttgatggaccagcaatacaagttccagtccttgtcaaggatcaggacactctccagaaggtggtgagtgccccaggaacaacacttcctcctgtacttcctggcagccacatagcagctgaaatttgcccgcatcctcctactgacctagtggcattcaacctccaggatcctcagcatgattctcctgcccctgaagcttctgccctttcccaggaagagaacccaagaaatcaattaatggcacttatgctcctaacagcccagccccaggagttggtgatgttcgaggaggtgtcagtatgcttcacttcagaggaatgggcatgtctgggcccaatccagagggccttgtactgggatgtgatgctggagaattatggaaatgtgacctccctaggttacaggaaatacaggaggcagaggaacaaataaaagacaccacgagaaacagacacatccagaacgtggaatattgcataagaaagctgccctggattcttcaaaatattattatgatgaaaaagagaggggagtgaaaattgttcaagctgtcttgagtctgctgtgagtttattataccattctctgcttttgtgtatgtatgaaaatttcgatatgaaaggtataaaacatggatgaggaggcttgtttttaaaagataatactagagagccgttaggtactaagaaccagaaatagactcacataaatggccaattgatttttgacaggggcaaaagcaattcaatggaggagggatcgccttttcagcaaatactgttggagtaattggatatccataggcagtaaaccaacaacttcaggacctaggactgagctaagaaggctcagatgactcaaaagcatgctccttagaaggaaaaaaaatgttaaattggacttcatcaaaattaagataatttaccctgtaagagacctttttacaaagatgatattacaggttgggaaaaaatatttgcaaatcatatccaacaagggatttgtatgtaaactacataaagaactttccaaatttaacagtaataagtaaatacaattagaaaataagcaaaagacagacatttcactgaagtatagatagcaaataagcaaatgaaaagatgttcaacatcattaggcatgagggaaatgcagagtaaaatcgtgagatatcacctatcagaatagcttaactttttttttttaatggtggtaactgctggcaaggatgaagagaaacaggatctcatacattgctgggaatgtaaaatggtacagccactctggaatataatttggcagtttcttgtaaaaccacacatgtatatgtcatgcttcaggaattgcacttctgagcatttatcccagagaaatgaaaacttgcgttcacacaaaaacctgtatacgaatgttcatagcagctttatttgtaatggtcgaaacctgtaggcaacccatatatccttccttaggtggttaaaacaaattgtggtttatgtattaccatggaatacttgttactctgcaataaaattgacttattgatatcaaaaaaaaaaaaaaaaaaaaaaaaaaaaatttgttggggccggcctgggacccagaaaaaggtttctcaaacccttcgtgtgggggcgcgcgggccagtgatgttatgcaacactggggccaacgtgggtcccaaggaacaccgggtcaagaatggcgtggtttcccacccataaagaaccgcgggggcaccggcgttctgacaaatccagggcttcggaggccggctccaccggggccaggggtcgatatacgcgacgcgcggggggag

SEQ ID NO: 332155 - DNA, 431 bp, Homo sapiens
ggtgtggcattaaggatgggcttgtttcttttaataataacgtgaacaattttagagctatatatttcgttacaaattactaatacatcctcatttgagagataaggaaactgaggcagatgtctagctggccgcaaaaccaagtgtcttggtgccaattttagtgttagttgtatttgagcacaaagggctaggtaaaggggtcaataagtagatggtaaataagtagaagagatgtgactgaagtccgatctaaaacttaagtctgaagctaaaatccatgctcttaattactgcttattacttcccattccctccttaacccacacccaggtctggcttctgttcccaccgttgtgtacagtctcctctgggagaggtcaccagtgccatgagtggggctcgagggcagctccattgttctcaatgca

SEQ ID NO: 332156 - DNA, 2118 bp, Homo sapiens
atcgtacataagattctactagaggtaggagtttcctacatacatgacatacgtaggtttattctccactgtgagtatcagttcaaacagaaacctcattgagcataagagaatccacagtggtgagaaaccctatgagtgtgatgagtgtggcaaatgcttcattctgaagaaaagcctcattggacatcagagaattcacacgagggaaaaatcttataaatgcaatgactgtgggaaggtcttcagttaccgctcaaaccttatagcccatcagaggatccatactggtgagaagccctatgcgtgtagtgagtgtggaaaaggttttacgtacaacagaaacctgattgaacatcaaagaattcacagtggagaaaaaacctacgaatgtcatgtatgtaggaaagtccttacctctagtagaaatcttatggtacatcaaagaatccatactggagagaaaccttataaatgtaatgagtgtggaaaagactttagtcagaataaaaaccttgttgtacatcagagaatgcacactggggaaaaaccttatgagtgtgacaagtgtaggaaatcctttacttctaagaggaatttagttggccaccagagaattcacacaggggagaaaccctatgggtgtaatgattgtagtaaagtttttaggcaaagaaaaaaccttactgtacatcagaaaatccacacagatgaaaaaccttgtgaatgtgatgtgtctgaaaaagaattctctcagacttccaaccttcatcttcaacagaaaatccataccattgaggaattctcttggctacaaaacaccaatgagtccaagattgagattcagaaaatctagtgtcatatgtaaaatggaatagaatccctgcctacttaagtaactgttggacaaatgatatatatttcttctaaggaaaaagtttattatttactctttactagacaaatgagtagcatatagaagaaagttaataggccgggcttggtggctcatgcctgtaatcccagcactttgagaggccgaagcgagtggatcacctgaggtcaggattttgagaccagcctgaccaacatggtgaaaccccatctctactaaaatacaaaaattatccgggcatgggggcacacaccggtaatcccagctactcaggaggctgagacaggagagtcgcttgaacctgggagggcggaggttgcagtgagccaggatcgcgccattgcactccagcctgggcaacaagagcgaaactcttgtctgaaaaaataaagttcatcccaactttcaagtctacaaaaacataatccaaatctaataacatagttgtaaatgagagcaacaataaaaagtagacatgggctgggtgcagtggctcactcctgtagtcccaggactttgggaggccgaggtgggaagatcccttgagcccaggagttcgagacaagcctgggtaacacggggagacccgtctttagtaaataaaaataaatttattaataaaactaaaaatttaataataaaaagtggacattgttttttaaaatgtgtatagtatgcattttaaagatagtgtccctgctgtggaaaacctgaacagacagtatgatccagaatgtcaggtgtggagttgggcggacaagagtctgctgatgaggacaacctaaaagagcactggatttggaatcagaagacctacctttgattcctggctttcccttaatggccatgtgatgttattaagtcagcctctaaagctttagtttcctgtcagtcaaatgttgacatgatacctacctcacagggttgttgtgagggttaagtgaaaggatctttgtgaaagtactttttgaaatcattcagttgtcaataaagttggataaaagaggttatggtaaaagtttagaacatgggatcatgtaagtttgtgtattaagtcaatattagaatgagggggattccaggaacctaaaagatactcattttcataagaggaagtatggtgaatagctaactggaatttagtgttctaagaataattttgttaaatttacctttaaaaatatctgagggagttactagattatatatctagtttatgtata

SEQ ID NO: 332157 - DNA, 4556 bp, Homo sapiens
tattctcggctcggccattattctgtgcctcggctgccggaagggctcgttcctgtgtcatctcctagcggcctggcgccgaggcggcggtacgcaaggctggagccgcagcgggagcccccgatgatactctccaagctgtaaggaagaagtcaaggattaaggagacctggactggagaggagcctttttcaaaaaacaacaatgacaagagaaaatgtagcccacaatgctctgagacaagagggccttgtgaaggggaaggatgatacctggaaatggggaaccagcttccaaggaagtagctcctctgtttgggagacctcccacctacactttagacaattacgttaccatgagacatctggaccccaggaagccctgagccggctcagggaactctgtcgccggtggctgagaccagaagcacgcaccaaggcacagatcctggagctgctggtgctggagcagtttctgagcatcctgcctggggagattcggacctgggtacagctccatcaccctggaagtggcgaggaggctgtggccctggtagaggagctgcagaaagaccttgatggaccagcaatacaagttccagtccttgtcaaggatcaggacactctccagaaggtggtgagtgccccaggaacaacacttcctcctgtacttcctggcagccacatagcagctgaaatttgcccgcatcctcctactgacctagtggcattcaacctccaggatcctcagcatgattctcctgcccctgaagcttctgccctttcccaggaagagaacccaagaaatcaattaatggcacttatgctcctaacagcccagccccaggagttggtgatgttcgaggaggtgtcagtatgcttcacttcagaggaatgggcatgtctgggcccaatccagagggccttgtactgggatgtgatgctggagaattatggaaatgtgacctccctagaatgggagaccatgaccgagaatgaggaggtgacatcaaagccaagtagttctcaaagagcagactctcataaaggaacatcaaaaagacttcaaggaagtgttccccaggtccttgattttgaagaagagtgtgaatggcaagttttggcaagtcagtggggaaatgaaacagatgaaagggcagatacagtgaagaaagtttccctttgtgaacgagacaagaagaaaaggactccaccagagaaacaaggccaaaagtggaaggaattaggagacagcttgactttcggttcagctatttctgaaagtttaataggtactgaaggaaagaagttttataaatgtgatatgtgttgtaaacattttaataaaatctcccatcttataaaccatcggagaatccacactggtgagaaacctcataaatgtaaggaatgtggaaaaggctttattcagcgttcgagccttctaatgcatttacggaaccattcaggggagaaaccttataaatgtaatgaatgtgggaaagcattttctcaaagtgcttaccttctaaaccatcagaggatccacactggggagaaaccttataagtgtaaggagtgtggaaagggcttctataggcactcaggcctaattatacatctaaggcgccattcaggggagagaccttataagtgtaatgaatgtgggaaagtcttctctcagaatgcttacctcattgaccatcagaggctccacaaaggggaagaaccttataaatgtaataagtgtcagaaagctttcattctgaagaagagcctcattctgcaccagagaatccactctggggaaaaaccctataaatgtgatgaatgtggaaagacctttgctcagaccacttatcttattgaccatcagcgactccacagtgcagagaacccttacaagtgtaaagaatgtggaaaagttttcattcgaagcaaaagcctcctcttacatcagagagtccacacagaaaagaaaacctttggttgtaaaaagtgtgggaagattttcagttctaagtcaaacttcattgaccataagaggatgcacagcagagagaaaccttacaaatgcactgaatgtgggaaagcctttactcaaagtgcttacctttttgaccaccagagactccacaatggggagaagccctatgaatgtaatgaatgtgggaaagtttttattctgaagaagagcctcattttacatcaaaggttccacactggagagaatctctatgaatgtaaagattgtggtaaggtcttcggttcaaacagaaacctcattgaccatgagagactccacaatggggagaagccatatgaatgtcgagagtgtgggaaaacctttattatgagcaaaagttttatggtccatcagaaactccatacacaagagaaagcctacaaatgtgaggattgtgggaaggctttcagttacaattcaagcctgcttgtacatcggagaatccacaccggagaaaaaccctttgaatgcagtgagtgtggaagagctttcagttcaaacagaaacctcattgagcataagagaatccacagtggtgagaaaccctatgagtgtgatgagtgtggcaaatgcttcattctgaagaaaagcctcattggacatcagagaattcacacgagggaaaaatcttataaatgcaatgactgtgggaaggtcttcagttaccgctcaaaccttatagcccatcagaggatccatactggtgagaagccctatgcgtgtagtgagtgtggaaaaggttttacgtacaacagaaacctgattgaacatcaaagaattcacagtggagaaaaaacctacgaatgtcatgtatgtaggaaagtccttacctctagtagaaatcttatggtacatcaaagaatccatactggagagaaaccttataaatgtaatgagtgtggaaaagactttagtcagaataaaaaccttgttgtacatcagagaatgcacactggggaaaaaccttatgagtgtgacaagtgtaggaaatcctttacttctaagaggaatttagttggccaccagagaattcacacaggggagaaaccctatgggtgtaatgattgtagtaaagtttttaggcaaagaaaaaaccttactgtacatcagaaaatccacacagatgaaaaaccttgtgaatgtgatgtgtctgaaaaagaattctctcagacttccaaccttcatcttcaacagaaaatccataccattgaggaattctcttggctacaaaacaccaatgagtccaagattgagattcagaaaatctagtgtcatatgtaaaatggaatagaatccctgcctacttaagtaactgttggacaaatgatatatatttcttctaaggaaaaagtttattatttactctttactagacaaatgagtagcatatagaagaaagttaataggccgggcttggtggctcatgcctgtaatcccagcactttgagaggccgaagcgagtggatcacctgaggtcaggattttgagaccagcctgaccaacatggtgaaaccccatctctactaaaatacaaaaattatccgggcatgggggcacacaccggtaatcccagctactcaggaggctgagacaggagagtcgcttgaacctgggagggcggaggttgcagtgagccaggatcgcgccattgcactccagcctgggcaacaagagcgaaactcttgtctgaaaaaataaagttcatcccaactttcaagtctacaaaaacataatccaaatctaataacatagttgtaaatgagagcaacaataaaaagtagacatgggctgggtgcagtggctcactcctgtagtcccaggactttgggaggccgaggtgggaagatcccttgagcccaggagttcgagacaagcctgggtaacacggggagacccgtctttagtaaataaaaataaatttattaataaaactaaaaatttaataataaaaagtggacattgttttttaaaatgtgtatagtatgcattttaaagatagtgtccctgctgtggaaaacctgaacagacagtatgatccagaatgtcaggtgtggagttgggcggacaagagtctgctgatgaggacaacctaaaagagcactggatttggaatcagaagacctacctttgattcctggctttcccttaatggccatgtgatgttattaagtcagcctctaaagctttagtttcctgtcagtcaaatgttgacatgatacctacctcacagggttgttgtgagggttaagtgaaaggatctttgtgaaagtactttttgaaatcattcagttgtcaataaagttggataaaagaggttatggtaaaagtttagaacatgggatcatgtaagtttgtgtattaagtcaatattagaatgagggggattccaggaacctaaaagatactcattttcataagaggaagtatggtgaatagctaactggaatttagtgttctaagaataattttgttaaatttacctttaaaaatatctgagggagttactagattatatatctagtttatgtata

SEQ ID NO: 332158 - DNA, 3893 bp, Homo sapiens
cccatttctaaatcagggtctatgctattggaagacagactttacatgtgatctccttatgtctccctgatgtctgttatgcactcatggcctcacagtgtatcccttccccagaagtgaagggaacctttcgacaggcaagttcctgggcattggtaatctcacacacacttgttatttcaggagttggtgatgttcgaggaggtgtcagtatgcttcacttcagaggaatgggcatgtctgggcccaatccagagggccttgtactgggatgtgatgctggagaattatggaaatgtgacctccctagaatgggagaccatgaccgagaatgaggaggtgacatcaaagccaagtagttctcaaagagcagactctcataaaggaacatcaaaaagacttcaaggaagtgttccccaggtccttgattttgaagaagagtgtgaatggcaagttttggcaagtcagtggggaaatgaaacagatgaaagggcagatacagtgaagaaagtttccctttgtgaacgagacaagaagaaaaggactccaccagagaaacaaggccaaaagtggaaggaattaggagacagcttgactttcggttcagctatttctgaaagtttaataggtactgaaggaaagaagttttataaatgtgatatgtgttgtaaacattttaataaaatctcccatcttataaaccatcggagaatccacactggtgagaaacctcataaatgtaaggaatgtggaaaaggctttattcagcgttcgagccttctaatgcatttacggaaccattcaggggagaaaccttataaatgtaatgaatgtgggaaagcattttctcaaagtgcttaccttctaaaccatcagaggatccacactggggagaaaccttataagtgtaaggagtgtggaaagggcttctataggcactcaggcctaattatacatctaaggcgccattcaggggagagaccttataagtgtaatgaatgtgggaaagtcttctctcagaatgcttacctcattgaccatcagaggctccacaaaggggaagaaccttataaatgtaataagtgtcagaaagctttcattctgaagaagagcctcattctgcaccagagaatccactctggggaaaaaccctataaatgtgatgaatgtggaaagacctttgctcagaccacttatcttattgaccatcagcgactccacagtgcagagaacccttacaagtgtaaagaatgtggaaaagttttcattcgaagcaaaagcctcctcttacatcagagagtccacacagaaaagaaaacctttggttgtaaaaagtgtgggaagattttcagttctaagtcaaacttcattgaccataagaggatgcacagcagagagaaaccttacaaatgcactgaatgtgggaaagcctttactcaaagtgcttacctttttgaccaccagagactccacaatggggagaagccctatgaatgtaatgaatgtgggaaagtttttattctgaagaagagcctcattttacatcaaaggttccacactggagagaatctctatgaatgtaaagattgtggtaaggtcttcggttcaaacagaaacctcattgaccatgagagactccacaatggggagaagccatatgaatgtcgagagtgtgggaaaacctttattatgagcaaaagttttatggtccatcagaaactccatacacaagagaaagcctacaaatgtgaggattgtgggaaggctttcagttacaattcaagcctgcttgtacatcggagaatccacaccggagaaaaaccctttgaatgcagtgagtgtggaagagctttcagttcaaacagaaacctcattgagcataagagaatccacagtggtgagaaaccctatgagtgtgatgagtgtggcaaatgcttcattctgaagaaaagcctcattggacatcagagaattcacacgagggaaaaatcttataaatgcaatgactgtgggaaggtcttcagttaccgctcaaaccttatagcccatcagaggatccatactggtgagaagccctatgcgtgtagtgagtgtggaaaaggttttacgtacaacagaaacctgattgaacatcaaagaattcacagtggagaaaaaacctacgaatgtcatgtatgtaggaaagtccttacctctagtagaaatcttatggtacatcaaagaatccatactggagagaaaccttataaatgtaatgagtgtggaaaagactttagtcagaataaaaaccttgttgtacatcagagaatgcacactggggaaaaaccttatgagtgtgacaagtgtaggaaatcctttacttctaagaggaatttagttggccaccagagaattcacacaggggagaaaccctatgggtgtaatgattgtagtaaagtttttaggcaaagaaaaaaccttactgtacatcagaaaatccacacagatgaaaaaccttgtgaatgtgatgtgtctgaaaaagaattctctcagacttccaaccttcatcttcaacagaaaatccataccattgaggaattctcttggctacaaaacaccaatgagtccaagattgagattcagaaaatctagtgtcatatgtaaaatggaatagaatccctgcctacttaagtaactgttggacaaatgatatatatttcttctaaggaaaaagtttattatttactctttactagacaaatgagtagcatatagaagaaagttaataggccgggcttggtggctcatgcctgtaatcccagcactttgagaggccgaagcgagtggatcacctgaggtcaggattttgagaccagcctgaccaacatggtgaaaccccatctctactaaaatacaaaaattatccgggcatgggggcacacaccggtaatcccagctactcaggaggctgagacaggagagtcgcttgaacctgggagggcggaggttgcagtgagccaggatcgcgccattgcactccagcctgggcaacaagagcgaaactcttgtctgaaaaaataaagttcatcccaactttcaagtctacaaaaacataatccaaatctaataacatagttgtaaatgagagcaacaataaaaagtagacatgggctgggtgcagtggctcactcctgtagtcccaggactttgggaggccgaggtgggaagatcccttgagcccaggagttcgagacaagcctgggtaacacggggagacccgtctttagtaaataaaaataaatttattaataaaactaaaaatttaataataaaaagtggacattgttttttaaaatgtgtatagtatgcattttaaagatagtgtccctgctgtggaaaacctgaacagacagtatgatccagaatgtcaggtgtggagttgggcggacaagagtctgctgatgaggacaacctaaaagagcactggatttggaatcagaagacctacctttgattcctggctttcccttaatggccatgtgatgttattaagtcagcctctaaagctttagtttcctgtcagtcaaatgttgacatgatacctacctcacagggttgttgtgagggttaagtgaaaggatctttgtgaaagtactttttgaaatcattcagttgtcaataaagttggataaaagaggttatggtaaaagtttagaacatgggatcatgtaagtttgtgtattaagtcaatattagaatgagggggattccaggaacctaaaagatactcattttcataagaggaagtatggtgaatagctaactggaatttagtgttctaagaataattttgttaaatttacctttaaaaatatctgagggagttactagattatatatctagtttatgtata

SEQ ID NO: 332159 - DNA, 2580 bp, Homo sapiens
tattctcggctcggccattattctgtgcctcggctgccggaagggctcgttcctgtgtcatctcctagcggcctggcgccgaggcggcggtacgcaaggctggagccgcagcgggagcccccgatgatactctccaagctgtaaggaagaagtcaaggattaaggagacctggactggagaggagcctttttcaaaaaacaacaatgacaagagaaaatgtagcccacaatgctctgagacaagagggccttgtgaaggggaaggatgatacctggaaatggggaaccagcttccaaggaagtagctcctctgtttgggagacctcccacctacactttagacaattacgttaccatgagacatctggaccccaggaagccctgagccggctcagggaactctgtcgccggtggctgagaccagaagcacgcaccaaggcacagatcctggagctgctggtgctggagcagtttctgagcatcctgcctggggagattcggacctgggtacagctccatcaccctggaagtggcgaggaggctgtggccctggtagaggagctgcagaaagaccttgatggaccagcaatacaagttccagtccttgtcaaggatcaggacactctccagaaggtggtgagtgccccaggaacaacacttcctcctgtacttcctggcagccacatagcagctgaaatttgcccgcatcctcctactgacctagtggcattcaacctccaggatcctcagcatgattctcctgcccctgaagcttctgccctttcccaggaagagaacccaagaaatcaattaatggcacttatgctcctaacagcccagccccaggagttggtgatgttcgaggaggtgtcagtatgcttcacttcagaggaatgggcatgtctgggcccaatccagagggccttgtactgggatgtgatgctggagaattatggaaatgtgacctccctagaatgggagaccatgaccgagaatgaggaggtgacatcaaagccaagtagttctcaaagagcagactctcataaaggaacatcaaaaagacttcaaggaagtgttccccaggtccttgattttgaagaagagtgtgaatggcaagttttggcaagtcagtggggaaatgaaacagatgaaagggcagatacagtgaagaaagtttccctttgtgaacgagacaagaagaaaaggactccaccagagaaacaaggccaaaagtggaaggaattaggagacagcttgactttcggttcagctatttctgaaagtttaataggtactgaaggaaagaagttttataaatgtgatatgtgttgtaaacattttaataaaatctcccatcttataaaccatcggagaatccacactggtgagaaacctcataaatgtaaggaatgtggaaaaggctttattcagcgttcgagccttctaatgcatttacggaaccattcaggggagaaaccttataaatgtaatgaatgtgggaaagcattttctcaaagtgcttaccttctaaaccatcagaggatccacactggggagaaaccttataagtgtaaggagtgtggaaagggcttctataggcactcaggcctaattatacatctaaggcgccattcaggggagagaccttataagtgtaatgaatgtgggaaagtcttctctcagaatgcttacctcattgaccatcagaggctccacaaaggggaagaaccttataaatgtaataagtgtcagaaagctttcattctgaagaagagcctcattctgcaccagagaatccactctggggaaaaaccctataaatgtgatgaatgtggaaagacctttgctcagaccacttatcttattgaccatcagcgactccacagtgcagagaacccttacaagtgtaaagaatgtggaaaagttttcattcgaagcaaaagcctcctcttacatcagagagtccacacagaaaagaaaacctttggttgtaaaaagtgtgggaagattttcagttctaagtcaaacttcattgaccataagaggatgcacagcagagagaaaccttacaaatgcactgaatgtgggaaagcctttactcaaagtgcttacctttttgaccaccagagactccacaatggggagaagccctatgaatgtaatgaatgtgggaaagtttttattctgaagaagagcctcattttacatcaaaggttccacactggagagaatctctatgaatgtaaagattgtggtaaggtcttcggttcaaacagaaacctcattgaccatgagagactccacaatggggagaagccatatgaatgtcgagagtgtgggaaaacctttattatgagcaaaagttttatggtccatcagaaactccatacacaagagaaagcctacaaatgtgaggattgtgggaaggctttcagttacaattcaagcctgcttgtacatcggagaatccacaccggagaaaaaccctttgaatgcagtgagtgtggaagagcttggacactcttcactgaagacacatctcgacccataccagagagaccatatgatcaccgttgagtg

SEQ ID NO: 332160 - DNA, 450 bp, Homo sapiens
gttccagtccttgtcaaggatcaggacactctccagaaggtggtgagtgccccaggaacaacacttcctcctgtacttcctggcagccacatagcagctgaaatttgcccgcatcctcctactgacctagtggcattcaacctccaggatcctcagcatggtatttactcagtgctctgggttttgggctgttcaaggacccttcctgtggctcatccccctacttccagggagttgcttcctctgctaccctgtctaggagtctcttacagtgccaatttctttctgctgttctgttgttctctccttctttcttgggcccctctgagcttgtatacatcccccctttttttttttgagacggagtctcgctctgtcgcccaggctggagtgcagtggcgcgatctcagctcactgcaacctccgcctcctgggtttacgccattctcc

SEQ ID NO: 332161 - DNA, 843 bp, Homo sapiens
gttgcagtgagccaagatcacgccactgcactctagcctgggcgacagatcaagactctgtctcaaaaattaaaaaaaaaaatgtgactctgttcatgtgtccttctgcttagcatcctttaatagcttctcattgttcttacgatgaaaacccaaaccccagtatggccttcaaggctccatgtggtctggcacctcttactcacaaactgcatcttgacttctgtgccatgctgcccttttagggtgaatgtcccatgctccctgtcaccacagggcctctgcatatactgtcccctctgcctggaatgggccttcccatccttcagctcattaattcctgcgtaatttcagatctcagccaatcttcacttttttgtctaagcctttttattcgtgtgagtctttaaagtctgtcccatcagacctgaagcactgtaaaagggcaaagacagttacaataacctttgtattctccagctcctagcacagcacttgacatgtagtaggtgcttcgacagatacccagtgggaattgtgtgcagggtagaggaagtagcgtctgcagggcgtgagaaacagtagcattttggagaaaactaacatattgatggctaaagtgtgggttttgcagaagacaagtggtaagagatgaagctggaagggcaggcaggacccaggctgtgaagggccctatttggccaatattggtactaggacccataggatgtgggcagtcagtagtctccccgacttggggaaagaggaataagcataggatgaggcgtgagccttgagagatgggtggggcttggcccacttctgattcccctgcgtagaaga

SEQ ID NO: 332162 - DNA, 4449 bp, Homo sapiens
  misc_feature (1350)..(1350): n is a, c, g, or t
  misc_feature (1681)..(1681): n is a, c, g, or t
gccacttactagctgtgtgacttcgggaaacttatttaacttcttgtagcatgagtcttaggcagggctccccagaaacagaccctaagacaactactaatggagggagaactctaaggagaatcctataggagatggagggaagcaggatagagctggggaagaagctgggccagaatacagctgcttcagaactctagtctcagcctgatcccatggagaactcaagaagtcatgagttgcatcacagaggctgttgcacccagaggtgggggtggggggtgtctgttagatcaccacatcagttagtcattggtctcagcttgctcccctcctccctccaccccctggctcccattccctgacaaggcagctctgctcagccagtgacaatctgatggagaggagattaagcatgatccattagcagtcacccctgcagcatttgagggatgggtgggcagacgggccctggcttatgatggttcagcttatgatttttctactttacagtggtgtgaaagcagtatgcatttagtagacaccacgcttcaagtacccatgcaaccattccgtttttcattttcagtattgaataaattacatttattgtacagtattcaatatgttatgtttatttactgtgtggcactcaacactttattatataataagctttgtattaggtgaactgtagactaataaaagtgtcctgagaatgtaggctaggctaagctatgatttcagtaggttaggtgtattaaatgcattttcaacttaaggtagtttcaacttacaacgggtttattgggacgtcactccattgtatgtggaggagcatctgtacctccataaagggaatctgggcagaggaccaacagtatttgctacactcagttacctcctcttcaaaatgataacaaatatagctctcttacaaggtcaccgtgagtattaaatgggataattaaagcacacagggcagatggtaagtatctacatattgtagttcctttctctctcatatttaattttcttgtcttaattgcttctagccgaagaccgcataatttaacatgatttcgtttctttactaggatgaagtggcccaccatcaaaccattccagtacaaattggaaaagagatagaaaaaataacacgcaaaaaagtgtatgatttaatatttttactttgaatccctgccagtccaagttatgtgtgcacactagaacaagagtactaaccattggacacattaaattactatgataattttagaaatttctgctttgggccctgtctaggttgtttatatcaagttctttaaaagaaagtaatgcaccaaattnctatcattcatagtatttatggcttaattatgggtcaagattctgttgccaatttataaatcatatttttatggagaagttcaattgactttaacagagcggtgcatgggataaattatgcgaactggttagaatttcatagtctagaagtatatcagccaggcagcagcccaaagcccaaataatagtaactccccactttgccacccattcatgtgtataacactcctcagatattcagagtagattgggaggcagaggtcattgaggaaattctcagtgtttaaggaaccaaaaaagataaagattttaagtgaagatacaaaaattntggaaaaataatataattactctggtgactaatcttaaggggaaaaattaggcaggcactagtaactgttctaaaaactaagctcaccaacatcaaagttgagaaactcaggtcagtttcaggaggctggtcaggacgagggttgaatcacaggagatggtagcaaattgggatctgcacagaaagtagggaggctgggcaaattcctgccttccgtggcactcagtggagataccctccaagtcccacccatctgtggtctttacccactgctgagatcattgaatttatgactatctcttctgctgcatggttagaaagcaagaataggtaaagccagcatggcctcaaaataaggcaagtgtgtgtgtgtgtgtgtgtgtgtgtgtgtatcccctacagagaaatggaaaagaaaaaaattgtcttggaacaagaagtcaaaacgctaaatgactccctaaagaaagttgaaaacaaggttagtgctatagtggatgagaaggaaaatgtaataaaggaagttgaaggcaaacgagccttacttgaaatcaaagaacgagaacataaccaattggtcaagctattggaattagccagagagaatgaagcaacttcattaactgaaagagggatcttggatctcaatttacgcaacagtctcattgacaagcagaactaccatgatgaactttctcgtaagcaaagagagaaagaacgagattttcgaaatttaagaaagatggaactgctcttgaaagtgtcctgggatgcacttaggcaaactcaagcactgcatcaaaggcttctattagagaaaattatatcagaaatggagtctaagttagtagaacaacaacttgcagaagaaaacaagcttttaaaggagcaagaaaacatgaaagagctagtagtcaaccttctccgcatgactcaaatcaaaattgatgaaaaggaacaaaagtccaaggatttcctgaaagctcagcaaaaatacaccaacattgttaaagaaatgaaagcaaaggatcttgaaatcaggatacacaagaagaaaaaatgtgaaatttatcggagactgagagagtttgctaaactgtatgacaccattcgaaatgaaagaaacaaatttgttaacttactccacaaagctcatcagaaagtaaatgaaataaaagaaaggcataaaatgtcattaaatgaacttgaaattctgagaaatagtgccgttagtcaagaaagaaagctacaaaattccatgctgaaacacgccaacaatgttaccatcagagagagcatgcaaaacgatgtgcgcaaaattgtatcaaaacttcaggaaatgaaagaaaagaaggaagcccagttaaataacattgacagacttgccaacacgatcacaatgatcgaagaggagatggtgcagcttcgcaaaagatacgaaaaagctgttcagcatcgaaatgaaagtggcgttcagctgatagagcgggaagaagaaatatgcattttttatgaaaaaataaatatccaagagaagatgaaactaaatggagaaattgaaatacatctactggaagaaaagatccaattcctgaaaatgaagattgctgagaagcaaagacaaatttgtgtgacccagaaattactgccagccaagaggtccctggatgccgacctagctgtgctccaaattcagttttcacagtgtacagacagaattaaagacctggagaaacagttcgtaaagcctgatggtgagaatagagctcgcttccttccagggaaagatctgaccgaaaaagaaatgatccaaaaattagacaagctggaactacaactggccaagaaggaggagaagctgctggagaaggatttcatctatgagcaggtctccaggctcacagacaggctctgcagcaaaactcagggctgcaagcaggacacactgctcttagccaagaagatgaatggctatcaaagaaggatcaaaaatgcaactgagaaaatgatggctcttgttgctgagctgtccatgaaacaagccctaaccattgaactccaaaaggaagtcagggagaaagaagacttcatcttcacttgcaattccaggatagaaaaaggtctgccactcaataaggaaattgagaaagaatggttgaaagtccttcgagatgaagaaatgcacgccttggccatcgctgaaaagtctcaggagttcttggaagcagataatcgccagctgcccaatggtgtttacacaactgcagagcagcgtccgaatgcctacatcccagaagcagatgccactcttcctttgccaaaaccttatggtgctttggctccttttaaacccagtgaacctggagccaatatgaggcacataaggaaacctgttataaagccagttgaaatctgaatatgtgaacaaatccaggcctctcaaggaaaagacttcaaccaggcttccttgtacccacaggtgaaaaatgtgagcataatacttctaatattattgataagtaaggtaaccacaattagtcagcaacagagtacaacagggtttctatttacccaccaactactatacctttcatgacgttgaatgggacatagaactgtcctacatttatgtcaaagtatatatttgaatcgcttatattttctttttcactctttatattgagtacattccagaaatttgtagtaggcaaggtgctataaaaatgcactaaaaataaatctgttctcaatgaagtacggaaaaaaaa

SEQ ID NO: 332163 - DNA, 4545 bp, Homo sapiens
  misc_feature (1350)..(1350): n is a, c, g, or t
  misc_feature (1681)..(1681): n is a, c, g, or t
gccacttactagctgtgtgacttcgggaaacttatttaacttcttgtagcatgagtcttaggcagggctccccagaaacagaccctaagacaactactaatggagggagaactctaaggagaatcctataggagatggagggaagcaggatagagctggggaagaagctgggccagaatacagctgcttcagaactctagtctcagcctgatcccatggagaactcaagaagtcatgagttgcatcacagaggctgttgcacccagaggtgggggtggggggtgtctgttagatcaccacatcagttagtcattggtctcagcttgctcccctcctccctccaccccctggctcccattccctgacaaggcagctctgctcagccagtgacaatctgatggagaggagattaagcatgatccattagcagtcacccctgcagcatttgagggatgggtgggcagacgggccctggcttatgatggttcagcttatgatttttctactttacagtggtgtgaaagcagtatgcatttagtagacaccacgcttcaagtacccatgcaaccattccgtttttcattttcagtattgaataaattacatttattgtacagtattcaatatgttatgtttatttactgtgtggcactcaacactttattatataataagctttgtattaggtgaactgtagactaataaaagtgtcctgagaatgtaggctaggctaagctatgatttcagtaggttaggtgtattaaatgcattttcaacttaaggtagtttcaacttacaacgggtttattgggacgtcactccattgtatgtggaggagcatctgtacctccataaagggaatctgggcagaggaccaacagtatttgctacactcagttacctcctcttcaaaatgataacaaatatagctctcttacaaggtcaccgtgagtattaaatgggataattaaagcacacagggcagatggtaagtatctacatattgtagttcctttctctctcatatttaattttcttgtcttaattgcttctagccgaagaccgcataatttaacatgatttcgtttctttactaggatgaagtggcccaccatcaaaccattccagtacaaattggaaaagagatagaaaaaataacacgcaaaaaagtgtatgatttaatatttttactttgaatccctgccagtccaagttatgtgtgcacactagaacaagagtactaaccattggacacattaaattactatgataattttagaaatttctgctttgggccctgtctaggttgtttatatcaagttctttaaaagaaagtaatgcaccaaattnctatcattcatagtatttatggcttaattatgggtcaagattctgttgccaatttataaatcatatttttatggagaagttcaattgactttaacagagcggtgcatgggataaattatgcgaactggttagaatttcatagtctagaagtatatcagccaggcagcagcccaaagcccaaataatagtaactccccactttgccacccattcatgtgtataacactcctcagatattcagagtagattgggaggcagaggtcattgaggaaattctcagtgtttaaggaaccaaaaaagataaagattttaagtgaagatacaaaaattntggaaaaataatataattactctggtgactaatcttaaggggaaaaattaggcaggcactagtaactgttctaaaaactaagctcaccaacatcaaagttgagaaactcaggtcagtttcaggaggctggtcaggacgagggttgaatcacaggagatggtagcaaattgggatctgcacagaaagtagggaggctgggcaaattcctgccttccgtggcactcagtggagataccctccaagtcccacccatctgtggtctttacccactgctgagatcattgaatttatgactatctcttctgctgcatggttagaaagcaagaataggtaaagccagcatggcctcaaaataaggcaagtgtgtgtgtgtgtgtgtgtgtgtgtgtgtatcccctacagagaaatggaaaagaaaaaaattgtcttggaacaagaagtcaaaacgctaaatgactccctaaagaaagttgaaaacaaggttagtgctatagtggatgagaaggaaaatgtaataaaggaagttgaaggcaaacgagccttacttgaaatcaaagaacgagaacataaccaattggtcaagctattggaattagccagagagaatgaagcaacttcattaactgaaagagggatcttggatctcaatttacgcaacagtctcattgacaagcagaactaccatgatgaactttctcgtaagcaaagagagaaagaacgagattttcgaaatttaagaaagatggaactgctcttgaaagtgtcctgggatgcacttaggcaaactcaagcactgcatcaaaggcttctattagagatggaagctatccccaaagatgattctacattatctgagagaaggcgagagcttcacaaggaagttgaagtagctaagaggaatttggcccaacagaaaattatatcagaaatggagtctaagttagtagaacaacaacttgcagaagaaaacaagcttttaaaggagcaagaaaacatgaaagagctagtagtcaaccttctccgcatgactcaaatcaaaattgatgaaaaggaacaaaagtccaaggatttcctgaaagctcagcaaaaatacaccaacattgttaaagaaatgaaagcaaaggatcttgaaatcaggatacacaagaagaaaaaatgtgaaatttatcggagactgagagagtttgctaaactgtatgacaccattcgaaatgaaagaaacaaatttgttaacttactccacaaagctcatcagaaagtaaatgaaataaaagaaaggcataaaatgtcattaaatgaacttgaaattctgagaaatagtgccgttagtcaagaaagaaagctacaaaattccatgctgaaacacgccaacaatgttaccatcagagagagcatgcaaaacgatgtgcgcaaaattgtatcaaaacttcaggaaatgaaagaaaagaaggaagcccagttaaataacattgacagacttgccaacacgatcacaatgatcgaagaggagatggtgcagcttcgcaaaagatacgaaaaagctgttcagcatcgaaatgaaagtggcgttcagctgatagagcgggaagaagaaatatgcattttttatgaaaaaataaatatccaagagaagatgaaactaaatggagaaattgaaatacatctactggaagaaaagatccaattcctgaaaatgaagattgctgagaagcaaagacaaatttgtgtgacccagaaattactgccagccaagaggtccctggatgccgacctagctgtgctccaaattcagttttcacagtgtacagacagaattaaagacctggagaaacagttcgtaaagcctgatggtgagaatagagctcgcttccttccagggaaagatctgaccgaaaaagaaatgatccaaaaattagacaagctggaactacaactggccaagaaggaggagaagctgctggagaaggatttcatctatgagcaggtctccaggctcacagacaggctctgcagcaaaactcagggctgcaagcaggacacactgctcttagccaagaagatgaatggctatcaaagaaggatcaaaaatgcaactgagaaaatgatggctcttgttgctgagctgtccatgaaacaagccctaaccattgaactccaaaaggaagtcagggagaaagaagacttcatcttcacttgcaattccaggatagaaaaaggtctgccactcaataaggaaattgagaaagaatggttgaaagtccttcgagatgaagaaatgcacgccttggccatcgctgaaaagtctcaggagttcttggaagcagataatcgccagctgcccaatggtgtttacacaactgcagagcagcgtccgaatgcctacatcccagaagcagatgccactcttcctttgccaaaaccttatggtgctttggctccttttaaacccagtgaacctggagccaatatgaggcacataaggaaacctgttataaagccagttgaaatctgaatatgtgaacaaatccaggcctctcaaggaaaagacttcaaccaggcttccttgtacccacaggtgaaaaatgtgagcataatacttctaatattattgataagtaaggtaaccacaattagtcagcaacagagtacaacagggtttctatttacccaccaactactatacctttcatgacgttgaatgggacatagaactgtcctacatttatgtcaaagtatatatttgaatcgcttatattttctttttcactctttatattgagtacattccagaaatttgtagtaggcaaggtgctataaaaatgcactaaaaataaatctgttctcaatgaagtacggaaaaaaaa

SEQ ID NO: 332164 - DNA, 3874 bp, Homo sapiens
  misc_feature (1350)..(1350): n is a, c, g, or t
  misc_feature (1681)..(1681): n is a, c, g, or t
gccacttactagctgtgtgacttcgggaaacttatttaacttcttgtagcatgagtcttaggcagggctccccagaaacagaccctaagacaactactaatggagggagaactctaaggagaatcctataggagatggagggaagcaggatagagctggggaagaagctgggccagaatacagctgcttcagaactctagtctcagcctgatcccatggagaactcaagaagtcatgagttgcatcacagaggctgttgcacccagaggtgggggtggggggtgtctgttagatcaccacatcagttagtcattggtctcagcttgctcccctcctccctccaccccctggctcccattccctgacaaggcagctctgctcagccagtgacaatctgatggagaggagattaagcatgatccattagcagtcacccctgcagcatttgagggatgggtgggcagacgggccctggcttatgatggttcagcttatgatttttctactttacagtggtgtgaaagcagtatgcatttagtagacaccacgcttcaagtacccatgcaaccattccgtttttcattttcagtattgaataaattacatttattgtacagtattcaatatgttatgtttatttactgtgtggcactcaacactttattatataataagctttgtattaggtgaactgtagactaataaaagtgtcctgagaatgtaggctaggctaagctatgatttcagtaggttaggtgtattaaatgcattttcaacttaaggtagtttcaacttacaacgggtttattgggacgtcactccattgtatgtggaggagcatctgtacctccataaagggaatctgggcagaggaccaacagtatttgctacactcagttacctcctcttcaaaatgataacaaatatagctctcttacaaggtcaccgtgagtattaaatgggataattaaagcacacagggcagatggtaagtatctacatattgtagttcctttctctctcatatttaattttcttgtcttaattgcttctagccgaagaccgcataatttaacatgatttcgtttctttactaggatgaagtggcccaccatcaaaccattccagtacaaattggaaaagagatagaaaaaataacacgcaaaaaagtgtatgatttaatatttttactttgaatccctgccagtccaagttatgtgtgcacactagaacaagagtactaaccattggacacattaaattactatgataattttagaaatttctgctttgggccctgtctaggttgtttatatcaagttctttaaaagaaagtaatgcaccaaattnctatcattcatagtatttatggcttaattatgggtcaagattctgttgccaatttataaatcatatttttatggagaagttcaattgactttaacagagcggtgcatgggataaattatgcgaactggttagaatttcatagtctagaagtatatcagccaggcagcagcccaaagcccaaataatagtaactccccactttgccacccattcatgtgtataacactcctcagatattcagagtagattgggaggcagaggtcattgaggaaattctcagtgtttaaggaaccaaaaaagataaagattttaagtgaagatacaaaaattntggaaaaataatataattactctggtgactaatcttaaggggaaaaattaggcaggcactagtaactgttctaaaaactaagctcaccaacatcaaagttgagaaactcaggtcagtttcaggaggctggtcaggacgagggttgaatcacaggagatggtagcaaattgggatctgcacagaaagtagggaggctgggcaaattcctgccttccgtggcactcagtggagataccctccaagtcccacccatctgtggtctttacccactgctgagatcattgaatttatgactatctcttctgctgcatggttagaaagcaagaataggtaaagccagcatggcctcaaaataaggcaagtgtgtgtgtgtgtgtgtgtgtgtgtgtgtatcccctacagagaaatggaaaagaaaaaaattgtcttggaacaagaagtcaaaacgctaaatgactccctaaagaaagttgaaaacaaggttagtgctatagtggatgagaaggaaaatgtaataaaggaagttgaaggcaaacgagccttacttgaaatcaaagaacgagaacataaccaattggtcaagctattggaattagccagagagaatgaagcaacttcattaactgaaagagggatcttggatctcaatttacgcaacagtctcattgacaagcagaactaccatgatgaactttctcgtaagcaaagagagaaagaacgagattttcgaaatttaagaaagatggaactgctcttgaaagtgtcctgggatgcacttaggcaaactcaagcactgcatcaaaggcttctattagagatggaagctatccccaaagatgattctacattatctgagagaaggcgagagcttcacaaggaagttgaagtagctaagaggaatttggcccaacagaaaattatatcagaaatggagtctaagttagtagaacaacaacttgcagaagaaaacaagcttttaaaggagcaagaaaacatgaaagagctagtagtcaaccttctccgcatgactcaaatcaaaattgatgaaaaggaacaaaagtccaaggatttcctgaaagctcagcaaaaatacaccaacattgttaaagaaatgaaagcaaaggatcttgaaatcaggatacacaagaagaaaaaatgtgaaatttatcggagactgagagagtttgctaaactgtatgacaccattcgaaatgaaagaaacaaatttgttaacttactccacaaagctcatcagaaagtaaatgaaataaaagaaaggcataaaatgtcattaaatgaacttgaaattctgagaaatagtgccgttagtcaagaaagaaagctacaaaattccatgctgaaacacgccaacaatgttaccatcagagagagcatgcaaaacgatgtgcgcaaaattgtatcaaaacttcaggaaatgaaagaaaagaaggaagcccagttaaataacattgacagacttgccaacacgatcacaatgatcgaagaggagatggtgcagcttcgcaaaagatacgaaaaagctgttcagcatcgaaatgaaagtggcgttcagctgatagagcgggaagaagaaatatgcattttttatgaaaaaataaatatccaagagaagatgaaactaaatggagaaattgaaatacatctactggaagaaaagatccaattcctgaaaatgaagattgctgagaagcaaagacaaatttgtgtgacccagaaattactgccagccaagaggtccctggatgccgacctagctgtgctccaaattcagttttcacagtgtacagacagaattaaagacctggagaaacagttcgtaaagcctgatggtgagaatagagctcgcttccttccagggaaagatctgaccgaaaaagaaatgatccaaaaattagacaaggtaaacattattgcttaaaattgcatctgttagctcctcgttgatgtagtttcacagatacctatggtactgtttcatgttatgctgacagacctatccttcattattctagtcactaatatagtccttttgttgtaatctagtcatacattctaagcttgatttagacacttgccaaaagaagttccaatccagtggtttcgagattccaaaggcacatttctctcatgacccaaaggagtaattttggcatcttaaatggattaatttgt

SEQ ID NO: 332165 - DNA, 2581 bp, Homo sapiens
  misc_feature (32)..(32): n is a, c, g, or t
ggaaactcgaaagaaattgttggggacatcantttcgtcctaaaggatgaagtggcccaccatcaaaccattccagtacaaattggaaaagagatagaaaaaataacacgcaaaaaagtagaaatggaaaagaaaaaaattgtcttggaacaagaagtcaaaacgctaaatgactccctaaagaaagttgaaaacaaggttagtgctatagtggatgagaaggaaaatgtaataaaggaagttgaaggcaaacgagccttacttgaaatcaaagaacgagaacataaccaattggtcaagctattggaattagccagagagaatgaagcaacttcattaactgaaagagggatcttggatctcaatttacgcaacagtctcattgacaagcagaactaccatgatgaactttctcgtaagcaaagagagaaagaacgagattttcgaaatttaagaaagatggaactgctcttgaaagtgtcctgggatgcacttaggcaaactcaagcactgcatcaaaggcttctattagagatggaagctatccccaaagatgattctacattatctgagagaaggcgagagcttcacaaggaagttgaagtagctaagaggaatttggcccaacagaaaattatatcagaaatggagtctaagttagtagaacaacaacttgcagaagaaaacaagcttttaaaggagcaagaaaacatgaaagagctagtagtcaaccttctccgcatgactcaaatcaaaattgatgaaaaggaacaaaagtccaaggatttcctgaaagctcagcaaaaatacaccaacattgttaaagaaatgaaagcaaaggatcttgaaatcaggatacacaagaagaaaaaatgtgaaatttatcggagactgagagagtttgctaaactgtatgacaccattcgaaatgaaagaaacaaatttgttaacttactccacaaagctcatcagaaagtaaatgaaataaaagaaaggcataaaatgtcattaaatgaacttgaaattctgagaaatagtgccgttagtcaagaaagaaagctacaaaattccatgctgaaacacgccaacaatgttaccatcagagagagcatgcaaaacgatgtgcgcaaaattgtatcaaaacttcaggaaatgaaagaaaagaaggaagcccagttaaataacattgacagacttgccaacacgatcacaatgatcgaagaggagatggtgcagcttcgcaaaagatacgaaaaagctgttcagcatcgaaatgaaagtggcgttcagctgatagagcgggaagaagaaatatgcattttttatgaaaaaataaatatccaagagaagatgaaactaaatggagaaattgaaatacatctactggaagaaaagatccaattcctgaaaatgaagattgctgagaagcaaagacaaatttgtgtgacccagaaattactgccagccaagaggtccctggatgccgacctagctgtgctccaaattcagttttcacagtgtacagacagaattaaagacctggagaaacagttcgtaaagcctgatggtgagaatagagctcgcttccttccagggaaagatctgaccgaaaaagaaatgatccaaaaattagacaagctggaactacaactggccaagaaggaggagaagctgctggagaaggatttcatctatgagcaggtctccaggctcacagacaggctctgcagcaaaactcagggctgcaagcaggacacactgctcttagccaagaagatgaatggctatcaaagaaggatcaaaaatgcaactgagaaaatgatggctcttgttgctgagctgtccatgaaacaagccctaaccattgaactccaaaaggaagtcagggagaaagaagacttcatcttcacttgcaattccaggatagaaaaaggtctgccactcaataaggaaattgagaaagaatggttgaaagtccttcgagatgaagaaatgcacgccttggccatcgctgaaaagtctcaggagttcttggaagcagataatcgccagctgcccaatggtgtttacacaactgcagagcagcgtccgaatgcctacatcccagaagcagatgccactcttcctttgccaaaaccttatggtgctttggctccttttaaacccagtgaacctggagccaatatgaggcacataaggaaacctgttataaagccagttgaaatctgaatatgtgaacaaatccaggcctctcaaggaaaagacttcaaccaggcttccttgtacccacaggtgaaaaatgtgagcataatacttctaatattattgataagtaaggtaaccacaattagtcagcaacagagtacaacagggtttctatttacccaccaactactatacctttcatgacgttgaatgggacatagaactgtcctacatttatgtcaaagtatatatttgaatcgcttatattttctttttcactctttatattgagtacattccagaaatttgtagtaggcaaggtgctataaaaatgcactaaaaataaatctgttctcaatgaagtacggaaaaaaaa

SEQ ID NO: 332166 - DNA, 1563 bp, Homo sapiens
acctttgggactttcagagacattgtggctagccaaccacatggtcagcctcaaagttgagaggctcagtaaccctcctatccctagagaattccaaagtgtggatgtaatttaactagaaagccattggtgactatctgtgatcctctggaagtatgctatgttgtgtatatcttgcatccaaagccagagggaaccacaatgactagtaaaacggtggtctcaatgcccacttagcctctgcctctgaatttgaccatagtggcgttcagctgatagagcgggaagaagaaatatgcattttttatgaaaaaataaatatccaagagaagatgaaactaaatggagaaattgaaatacatctactggaagaaaagatccaattcctgaaaatgaagattgctgagaagcaaagacaaatttgtgtgacccagaaattactgccagccaagaggtccctggatgccgacctagctgtgctccaaattcagttttcacagtgtacagacagaattaaagacctggagaaacagttcgtaaagcctgatggtgagaatagagctcgcttccttccagggaaagatctgaccgaaaaagaaatgatccaaaaattagacaagctggaactacaactggccaagaaggaggagaagctgctggagaaggatttcatctatgagcaggtctccaggctcacagacaggctctgcagcaaaactcagggctgcaagcaggacacactgctcttagccaagaagatgaatggctatcaaagaaggatcaaaaatgcaactgagaaaatgatggctcttgttgctgagctgtccatgaaacaagccctaaccattgaactccaaaaggaagtcagggagaaagaagacttcatcttcacttgcaattccaggatagaaaaaggtctgccactcaataaggaaattgagaaagaatggttgaaagtccttcgagatgaagaaatgcacgccttggccatcgctgaaaagtctcaggagttcttggaagcagataatcgccagctgcccaatggtgtttacacaactgcagagcagcgtccgaatgcctacatcccagaagcagatgccactcttcctttgccaaaaccttatggtgctttggctccttttaaacccagtgaacctggagccaatatgaggcacataaggaaacctgttataaagccagttgaaatctgaatatgtgaacaaatccaggcctctcaaggaaaagacttcaaccaggcttccttgtacccacaggtgaaaaatgtgagcataatacttctaatattattgataagtaaggtaaccacaattagtcagcaacagagtacaacagggtttctatttacccaccaactactatacctttcatgacgttgaatgggacatagaactgtcctacatttatgtcaaagtatatatttgaatcgcttatattttctttttcactctttatattgagtacattccagaaatttgtagtaggcaaggtgctataaaaatgcactaaaaataaatctgttctcaatgaagtacggaaaaaaaa

SEQ ID NO: 332167 - DNA, 1492 bp, Homo sapiens
acctttgggactttcagagacattgtggctagccaaccacatggtcagcctcaaagttgagaggctcagtaaccctcctatccctagagaattccaaagtgtggatgtaatttaactagaaagccattggtgactatctgtgatcctctggaagtatgctatgttgtgtatatcttgcatccaaagccagagggaaccacaatgactagtaaaacggtggtctcaatgcccacttagcctctgcctctgaatttgaccatagtggcgttcagctgatagagcgggaagaagaaatatgcattttttatgaaaaaataaatatccaagagaagatgaaactaaatggagaaattgaaatacatctactggaagaaaagatccaattcctgaaaatgaagattgctgagaagcaaagacaaatttgtgtgacccagaaattactgccagccaagaggtccctggatgccgacctagctgtgctccaaattcagttttcacagtgtacagacagaattaaagacctggagaaacagttcgtaaagcctgatgctggaactacaactggccaagaaggaggagaagctgctggagaaggatttcatctatgagcaggtctccaggctcacagacaggctctgcagcaaaactcagggctgcaagcaggacacactgctcttagccaagaagatgaatggctatcaaagaaggatcaaaaatgcaactgagaaaatgatggctcttgttgctgagctgtccatgaaacaagccctaaccattgaactccaaaaggaagtcagggagaaagaagacttcatcttcacttgcaattccaggatagaaaaaggtctgccactcaataaggaaattgagaaagaatggttgaaagtccttcgagatgaagaaatgcacgccttggccatcgctgaaaagtctcaggagttcttggaagcagataatcgccagctgcccaatggtgtttacacaactgcagagcagcgtccgaatgcctacatcccagaagcagatgccactcttcctttgccaaaaccttatggtgctttggctccttttaaacccagtgaacctggagccaatatgaggcacataaggaaacctgttataaagccagttgaaatctgaatatgtgaacaaatccaggcctctcaaggaaaagacttcaaccaggcttccttgtacccacaggtgaaaaatgtgagcataatacttctaatattattgataagtaaggtaaccacaattagtcagcaacagagtacaacagggtttctatttacccaccaactactatacctttcatgacgttgaatgggacatagaactgtcctacatttatgtcaaagtatatatttgaatcgcttatattttctttttcactctttatattgagtacattccagaaatttgtagtaggcaaggtgctataaaaatgcactaaaaataaatctgttctcaatgaagtacggaaaaaaaa

SEQ ID NO: 332168 - DNA, 129 bp, Homo sapiens
gaattcagtagagacagcttgtatctgctccgagatgtctggtacctctgttggagaaacgcagatggctgggggctgacattatttgatcacttccatgtcaggtgcctgggatgggatggctgaagg

SEQ ID NO: 332169 - DNA, 3894 bp, Homo sapiens
ccccagcatggggaaacttcactccaagccggccgccgtgtgcaagcgcagggagagcccggaaggtgacagcttcgccgtgagcgctgcctgggctcggaagggcatcgaggagtggatcgggagacagcgctgcccgggcggtgtctcgggaccccgacagctgcggttggcgggcaccataggccgaagcacccgggagctcgtgggcgacgtgttgagagacacgctcagcgaggaagaggaggacgactttcggctggaagtggccctgcctcctgagaagactgacgggctgggcagcggagatgagaagaagatggagagagtgagcgaaccctgcccaggctccaagaagcagctgaagtttgaagagctccagtgcgacgtgtccatggaggaggacagccggcaggagtggaccttcaccctgtatgactttgacaacaacggcaaggtcacccgagaggacatcaccagcttgctgcacaccatctatgaggtggtggactcctctgtcaaccactccccaacatccagcaagatgctgcgggtaaagctcaccgtggcccccgatggcagccagagcaagaggagcgtccttgtcaatcaggctgacctgcagagcgcaaggccccgagcagagaccaagcccactgaggacctgcggagctgggagaagaagcagcgagccccgctcaggttccagggtgacagccgcctggagcagtctggctgctaccaccattgcgtagatgagaacatcgagaggagaaaccactacttagatctcgccgggatagaaaactacacgtcccaatttgggcctggctccccttccgtggcccagaagtcagaactgcccccccgcacctccaatcccactcgatctcgctcccatgagccggaagccatccacatcccacaccgaaagccccaaggcgtggacccggcctccttccacttccttgacaccccaatcgccaaggtctcagagctccagcaacggctccggggcacccaggacgggagcaagcactttgtgaggtcccccaaggcccagggcaagagtgtgggtgtgggccacgtggccagaggggcaagaaacaagccccctctgggacccgccatccctgcggtgtccccctccgcccacctggctgccagcccggccctcctcccctccctagcccccctcgggcacaagaagcacaagcaccgagccaaggagagccagcagggctgccggggcctgcaggcaccactggcctcaggtggccctgtcctggggcgggagcacctgcgggagctgcccgccttggtggtgtatgagagccaggccgggcagccggtccagagacatgagcaccaccaccaccatgaacatcaccaccattaccaccacttctaccagacatagagcccctccccagggccccaccctgccatatgaaggaccccacccccgacaccacaaggcattattattctattaattattgttattatgatgattattgttattaataattattgttactccactaatatttagctagcctacatgtagaagatctatggaaacacagaactaaacttttatttatatgttgtggggactgcataactagcccaggaaatgactctggttttgagtggcctgtaatgggcagaggctccctcggggctcgggatctgcagcatctatgtggatcagcccacacccttcccagagccagggagcccttagcctcaactctgccccaccccagcctcttccaggagagcacccttacttggcccggcttccagagaccctcgaaatctccgagaagataaacagctgctacctcttagtattattctgattttattttgcccttaactgattgttatatgctacaagggatttcagtggactgcagagtgcgaacgtcttgctgttgtgtttttatgtcccaacctagaaaccttagctgtcttttctggagttgtctttcatgcttttccagtgggatcaagcccttttccccaagagtcccatctcttctgccatgcacgacatgaaaatccacttctcttccttctccttcttctctctctactttacagtgatacacacacgtatttaaggactatccctgagaccatccctctcattttggaaactgctagggagggaaccaaccacttaaacaagcgtggttttccaagatccaggcaattgtgtgctgttggttgtggtggaggatgtggcacatatatacgtacctacacggttctctaacagagctttctgtatctatagatagatgccatctgtccatttctatgtatctttctataaatatacactctcaggtatcttttctggtgtgtataaatcagtggtttgcttccctggatgcttctggaacccagatgtgaccctgcttgtctccttttggggctggacggctctcagatgctttcatcagaggtccattctcgggttttggggtctgatggattttggagagaactgctggggtacagaaacttggtgggaaaaggggactgtggccagagttgggaccctggagcagcatcctctgcagagaaggattttgtctggccagagcctggagaaaccttcctttctgccgttttgtctcccagctggcattctcttttccagagcctcgagtttgggtttaatgtagttagtaaggagttacttccaaaggtagtgggcttagttgtcaccgtattcttaattttattaatgactgatgtgcctgggattggattaatacattaatccttaggacagccccatgaggcagcttggtggcagctcaggaagcatgtctaaggctcagaagttcataactcccttgaggccgcacagagggcggagctggaattctggtctcccactcgatcccttcgccactggtgcagagcttaatcacggccatgggctgcccttgttttgggttgtgggtttctgttcagtgagaacgcaactcaatccaaagtgaatgaaaccaagttggaaggcagggagggaactggctttgagatgacagggtccaggatgtgaatgcagctgagactggttcttgtccctccctcttgtccctcggattgataacttgtactcaactacatgcttttgtcagggaaccctggctgctggccttctgggtcccctaaccataagaaaaaggaccttccgttagtgtaaagcccaaggcaggattctgcttggctgggcttcgatctggtacccatagctggaccaatcatgacatcccagatggggtcacgtggccaacctgccgcaagggggtggggtctgtaccggaagacaggaggggaggggtgcagatcggacaggaagtaatggcatcccaggccccgaattgctgcaaccctggaggccagcccggagttgagactactggttttagagcagttcctctgcctccctaagctccacacctgtcaggattctgttacttcttggtaactgggacttgcccaactttaaaaacattatttaaaaaaatagtaatgtgcacatgtaaaagattcaaatagtatatatacaaggtgtacagtaaaaagtaaacttccctccatcccaggcctgccagcatccctgatgccgactttctgggtgtggcctagggcccctcagtgtaatgtaggggttgtgagcacagactttggtgccagtttgctaggttcgaatcctgactccctctttgtagctctgtgcttcaattgaaatactgtgcctcagtttctcctttataaaggcagggatcatgagagtgcctgtcccttgtgagcactatgaaagtgttagctgttctttaccagaataaatgcatttctatatcttcc

SEQ ID NO: 332170 - DNA, 4067 bp, Homo sapiens
ccccagcatggggaaacttcactccaagccggccgccgtgtgcaagcgcagggagagcccggaaggtgacagcttcgccgtgagcgctgcctgggctcggaagggcatcgaggagtggatcgggagacagcgctgcccgggcggtgtctcgggaccccgacagctgcggttggcgggcaccataggccgaagcacccgggagctcgtgggcgacgtgttgagagacacgctcagcgaggaagaggaggacgactttcggctggaagtggccctgcctcctgagaagactgacgggctgggcagcggagatgagaagaagatggagagagtgagcgaaccctgcccaggctccaagaagcagctgaagtttgaagagctccagtgcgacgtgtccatggaggaggacagccggcaggagtggaccttcaccctgtatgactttgacaacaacggcaaggtcacccgagaggacatcaccagcttgctgcacaccatctatgaggtggtggactcctctgtcaaccactccccaacatccagcaagatgctgcgggtaaagctcaccgtggcccccgatggcagccagagcaagaggagcgtccttgtcaatcaggctgacctgcagagcgcaaggccccgagcagagaccaagcccactgaggacctgcggagctgggagaagaagcagcgagccccgctcaggttccagggtgacagccgcctggagcagtctggctgctaccaccattgcgtagatgagaacatcgagaggagaaaccactacttagatctcgccgggatagaaaactacacgtcccaatttgggcctggctccccttccgtggcccagaagtcagaactgcccccccgcacctccaatcccactcgatctcgctcccatgagccggaagccatccacatcccacaccgaaagccccaaggcgtggacccggcctccttccacttccttgacaccccaatcgccaaggtctcagagctccagcaacggctccggggcacccaggacgggagcaagcactttgtgaggtcccccaaggcccagggcaagagtgtgggtgtgggccacgtggccagaggggcaagaaacaagccccctctgggacccgccatccctgcggtgtccccctccgcccacctggctgccagcccggccctcctcccctccctagcccccctcgggcacaagaagcacaagcaccgagccaaggagagccagcagggctgccggggcctgcaggcaccactggcctcaggtggccctgtcctggggcgggagcacctgcgggagctgcccgccttggtggtgtatgagagccaggccgggcagccggtccagagacatgagcaccaccaccaccatgaacatcaccaccattaccaccacttctaccagacatagagcccctccccagggccccaccctgccatatgaaggaccccacccccgacaccacaaggcattattattctattaattattgttattatgatgattattgttattaataattattgttactccactaatatttagctagcctacatgtagaagatctatggaaacacagaactaaacttttatttatatgttgtggggactgcataactagcccaggaaatgactctggttttgagtggcctgtaatgggcagaggctccctcggggctcgggatctgcagcatctatgtggatcagcccacacccttcccagagccagggagcccttagcctcaactctgccccaccccagcctcttccaggagagcacccttacttggcccggcttccagagaccctcgaaatctccgagaagataaacagctgctacctcttagtattattctgattttattttgcccttaactgattgttatatgctacaagggatttcagtggactgcagagtgcgaacgtcttgctgttgtgtttttatgtcccaacctagaaaccttagctgtcttttctggagttgtctttcatgcttttccagtgggatcaagcccttttccccaagagtcccatctcttctgccatgcacgacatgaaaatccacttctcttccttctccttcttctctctctactttacagtgatacacacacgtatttaaggactatccctgagaccatccctctcattttggaaactgctagggagggaaccaaccacttaaacaagcgtggttttccaagatccaggcaattgtgtgctgttggttgtggtggaggatgtggcacatatatacgtacctacacggttctctaacagagctttctgtatctatagatagatgccatctgtccatttctatgtatctttctataaatatacactctcaggtatcttttctggtgtgtataaatcagtggtttgcttccctggatgcttctggaacccagatgtgaccctgcttgtctccttttggggctggacggctctcagatgctttcatcagaggtccattctcgggttttggggtctgatggattttggagagaactgctggggtacagaaacttggtgggaaaaggggactgtggccagagttgggaccctggagcagcatcctctgcagagaaggattttgtctggccagagcctggagaaaccttcctttctgccgttttgtctcccagctggcattctcttttccagagcctcgagtttgggtttaatgtagttagtaaggagttacttccaaaggtagtgggcttagttgtcaccgtattcttaattttattaatgactgatgtgcctgggattggattaatacattaatccttaggacagccccatgaggcagcttggtggcagctcaggaagcatgtctaaggctcagaagttcataactcccttgaggccgcacagagggcggagctggaattctggtctcccactcgatcccttcgccactggtgcagagcttaatcacggccatgggctgcccttgttttgggttgtgggtttctgttcagtgagaacgcaactcaatccaaagtgaatgaaaccaagttggaaggcagggagggaactggctttgagatgacagggtccaggatgtgaatgcagctgagactggttcttgtccctccctcttgtccctcggattgataacttgtactcaactacatgcttttgtcagggaaccctggctgctggccttctgggtcccctaaccataagaaaaaggaccttccgttagtgtaaagcccaaggcaggattctgcttggctgggcttcgatctggtacccatagctggaccaatcatgacatcccagatggggtcacgtggccaacctgccgcaagggggtggggtctgtaccggaagacaggaggggaggggtgcagatcggacaggaagtaatggcatcccaggccccgaattgctgcaaccctggaggccagcccggagttgagactactggttttagagcagttcctctgcctccctaagctccacacctgtcaggattctgttacttcttggtaactgggacttgcccaactttaaaaacattatttaaaaaaatagtaatgtgcacatgtaaaagattcaaatagtatatatacaaggtgtacagtaaaaagtaaacttccctccatcccaggcctgccagcatccctgatgccgactttctgggtgtggcctagggcccctcagtgtaatgtaggggttgtgagcacagactttggtgccagtttgctaggttcgaatcctgactccctctttgtagctctgtgcttcaattgaaatactgtgcctcagtttctcctttataaaggcagggatcatgagagtgcctgtcccttgtgagcactatgaaagtgttagctgttctttaccagaataaatgcatttctatatcttcccatatgcattttgttaatttttaaagtatttcaaacacaaagtttgaaacagaaaattgtgtaacattaactatgaacttaccacccagaatttacaaatgctgacattttgcaatatttatttcggatctatttttaagggggggaaccctgcagttactgcttaatcctct

SEQ ID NO: 332171 - DNA, 4258 bp, Homo sapiens
ttcctttgtctttgaagacccacagaccaccaggcacccctgcaggcatccctccccaggccaaacctcccctgcccgggctctggctgccctcctgggccagttctgtcttggccaaagtgctccctgtccactcaaggtctggggagggcagaggacaggtggccgccccttggcctggcctctaggcccaggcttccactacccagtcagtgttgccacagataggggaccagccccgcccatctctctgcatccaggagctccagtgcgacgtgtccatggaggaggacagccggcaggagtggaccttcaccctgtatgactttgacaacaacggcaaggtcacccgagaggacatcaccagcttgctgcacaccatctatgaggtggtggactcctctgtcaaccactccccaacatccagcaagatgctgcgggtaaagctcaccgtggcccccgatggcagccagagcaagaggagcgtccttgtcaatcaggctgacctgcagagcgcaaggccccgagcagagaccaagcccactgaggacctgcggagctgggagaagaagcagcgagccccgctcaggttccagggtgacagccgcctggagcagtctggctgctaccaccattgcgtagatgagaacatcgagaggagaaaccactacttagatctcgccgggatagaaaactacacgtcccaatttgggcctggctccccttccgtggcccagaagtcagaactgcccccccgcacctccaatcccactcgatctcgctcccatgagccggaagccatccacatcccacaccgaaagccccaaggcgtggacccggcctccttccacttccttgacaccccaatcgccaaggtctcagagctccagcaacggctccggggcacccaggacgggagcaagcactttgtgaggtcccccaaggcccagggcaagagtgtgggtgtgggccacgtggccagaggggcaagaaacaagccccctctgggacccgccatccctgcggtgtccccctccgcccacctggctgccagcccggccctcctcccctccctagcccccctcgggcacaagaagcacaagcaccgagccaaggagagccagcagggctgccggggcctgcaggcaccactggcctcaggtggccctgtcctggggcgggagcacctgcgggagctgcccgccttggtggtgtatgagagccaggccgggcagccggtccagagacatgagcaccaccaccaccatgaacatcaccaccattaccaccacttctaccagacatagagcccctccccagggccccaccctgccatatgaaggaccccacccccgacaccacaaggcattattattctattaattattgttattatgatgattattgttattaataattattgttactccactaatatttagctagcctacatgtagaagatctatggaaacacagaactaaacttttatttatatgttgtggggactgcataactagcccaggaaatgactctggttttgagtggcctgtaatgggcagaggctccctcggggctcgggatctgcagcatctatgtggatcagcccacacccttcccagagccagggagcccttagcctcaactctgccccaccccagcctcttccaggagagcacccttacttggcccggcttccagagaccctcgaaatctccgagaagataaacagctgctacctcttagtattattctgattttattttgcccttaactgattgttatatgctacaagggatttcagtggactgcagagtgcgaacgtcttgctgttgtgtttttatgtcccaacctagaaaccttagctgtcttttctggagttgtctttcatgcttttccagtgggatcaagcccttttccccaagagtcccatctcttctgccatgcacgacatgaaaatccacttctcttccttctccttcttctctctctactttacagtgatacacacacgtatttaaggactatccctgagaccatccctctcattttggaaactgctagggagggaaccaaccacttaaacaagcgtggttttccaagatccaggcaattgtgtgctgttggttgtggtggaggatgtggcacatatatacgtacctacacggttctctaacagagctttctgtatctatagatagatgccatctgtccatttctatgtatctttctataaatatacactctcaggtatcttttctggtgtgtataaatcagtggtttgcttccctggatgcttctggaacccagatgtgaccctgcttgtctccttttggggctggacggctctcagatgctttcatcagaggtccattctcgggttttggggtctgatggattttggagagaactgctggggtacagaaacttggtgggaaaaggggactgtggccagagttgggaccctggagcagcatcctctgcagagaaggattttgtctggccagagcctggagaaacctgaaaaagaaccagtcagctagccagggtctcagagaaaagcagattacacactcaaattgggtaatttgagcagagcttaataaaggcagtatttacaaagtgtgggctaagcctcccatgagagtgcagaaccctggggctagcagtgtggggcgctattcccacccctgggcctgagtggggaaggagttatctttagcagacagaggattgctggaggagtgagaggggcacctgaaggagctgtgacctttgcttaaaggatgcagccagtcatggggaccctccagggaaattaatatcctgacctgctttcctgccccccagccccctcaatccattggctgaggccgctggaagccaccgggccaagggagcttgttgatgtgggtcacacgggcatgttcccaggtcagagaggagagtggagagtgaatctagggagactcaagagggagaagtgactccagctaccttcctttctgccgttttgtctcccagctggcattctcttttccagagcctcgagtttgggtttaatgtagttagtaaggagttacttccaaaggtagtgggcttagttgtcaccgtattcttaattttattaatgactgatgtgcctgggattggattaatacattaatccttaggacagccccatgaggcagcttggtggcagctcaggaagcatgtctaaggctcagaagttcataactcccttgaggccgcacagagggcggagctggaattctggtctcccactcgatcccttcgccactggtgcagagcttaatcacggccatgggctgcccttgttttgggttgtgggtttctgttcagtgagaacgcaactcaatccaaagtgaatgaaaccaagttggaaggcagggagggaactggctttgagatgacagggtccaggatgtgaatgcagctgagactggttcttgtccctccctcttgtccctcggattgataacttgtactcaactacatgcttttgtcagggaaccctggctgctggccttctgggtcccctaaccataagaaaaaggaccttccgttagtgtaaagcccaaggcaggattctgcttggctgggcttcgatctggtacccatagctggaccaatcatgacatcccagatggggtcacgtggccaacctgccgcaagggggtggggtctgtaccggaagacaggaggggaggggtgcagatcggacaggaagtaatggcatcccaggccccgaattgctgcaaccctggaggccagcccggagttgagactactggttttagagcagttcctctgcctccctaagctccacacctgtcaggattctgttacttcttggtaactgggacttgcccaactttaaaaacattatttaaaaaaatagtaatgtgcacatgtaaaagattcaaatagtatatatacaaggtgtacagtaaaaagtaaacttccctccatcccaggcctgccagcatccctgatgccgactttctgggtgtggcctagggcccctcagtgtaatgtaggggttgtgagcacagactttggtgccagtttgctaggttcgaatcctgactccctctttgtagctctgtgcttcaattgaaatactgtgcctcagtttctcctttataaaggcagggatcatgagagtgcctgtcccttgtgagcactatgaaagtgttagctgttctttaccagaataaatgcatttctatatcttcc

SEQ ID NO: 332172 - DNA, 4371 bp, Homo sapiens
ccccagcatggggaaacttcactccaagccggccgccgtgtgcaagcgcagggagagcccggaaggtgacagcttcgccgtgagcgctgcctgggctcggaagggcatcgaggagtggatcgggagacagcgctgcccgggcggtgtctcgggaccccgacagctgcggttggcgggcaccataggccgaagcacccgggagctcgtgggcgacgtgttgagagacacgctcagcgaggaagaggaggacgactttcggctggaagtggccctgcctcctgagaagactgacgggctgggcagcggagatgagaagaagatggagagagtgagcgaaccctgcccaggctccaagaagcagctgaagtttgaagagctccagtgcgacgtgtccatggaggaggacagccggcaggagtggaccttcaccctgtatgactttgacaacaacggcaaggtcacccgagaggacatcaccagcttgctgcacaccatctatgaggtggtggactcctctgtcaaccactccccaacatccagcaagatgctgcgggtaaagctcaccgtggcccccgatggcagccagagcaagaggagcgtccttgtcaatcaggctgacctgcagagcgcaaggccccgagcagagaccaagcccactgaggacctgcggagctgggagaagaagcagcgagccccgctcaggttccagggtgacagccgcctggagcagtctggctgctaccaccattgcgtagatgagaacatcgagaggagaaaccactacttagatctcgccgggatagaaaactacacgtcccaatttgggcctggctccccttccgtggcccagaagtcagaactgcccccccgcacctccaatcccactcgatctcgctcccatgagccggaagccatccacatcccacaccgaaagccccaaggcgtggacccggcctccttccacttccttgacaccccaatcgccaaggtctcagagctccagcaacggctccggggcacccaggacgggagcaagcactttgtgaggtcccccaaggcccagggcaagagtgtgggtgtgggccacgtggccagaggggcaagaaacaagccccctctgggacccgccatccctgcggtgtccccctccgcccacctggctgccagcccggccctcctcccctccctagcccccctcgggcacaagaagcacaagcaccgagccaaggagagccagcagggctgccggggcctgcaggcaccactggcctcaggtggccctgtcctggggcgggagcacctgcgggagctgcccgccttggtggtgtatgagagccaggccgggcagccggtccagagacatgagcaccaccaccaccatgaacatcaccaccattaccaccacttctaccagacatagagcccctccccagggccccaccctgccatatgaaggaccccacccccgacaccacaaggcattattattctattaattattgttattatgatgattattgttattaataattattgttactccactaatatttagctagcctacatgtagaagatctatggaaacacagaactaaacttttatttatatgttgtggggactgcataactagcccaggaaatgactctggttttgagtggcctgtaatgggcagaggctccctcggggctcgggatctgcagcatctatgtggatcagcccacacccttcccagagccagggagcccttagcctcaactctgccccaccccagcctcttccaggagagcacccttacttggcccggcttccagagaccctcgaaatctccgagaagataaacagctgctacctcttagtattattctgattttattttgcccttaactgattgttatatgctacaagggatttcagtggactgcagagtgcgaacgtcttgctgttgtgtttttatgtcccaacctagaaaccttagctgtcttttctggagttgtctttcatgcttttccagtgggatcaagcccttttccccaagagtcccatctcttctgccatgcacgacatgaaaatccacttctcttccttctccttcttctctctctactttacagtgatacacacacgtatttaaggactatccctgagaccatccctctcattttggaaactgctagggagggaaccaaccacttaaacaagcgtggttttccaagatccaggcaattgtgtgctgttggttgtggtggaggatgtggcacatatatacgtacctacacggttctctaacagagctttctgtatctatagatagatgccatctgtccatttctatgtatctttctataaatatacactctcaggtatcttttctggtgtgtataaatcagtggtttgcttccctggatgcttctggaacccagatgtgaccctgcttgtctccttttggggctggacggctctcagatgctttcatcagaggtccattctcgggttttggggtctgatggattttggagagaactgctggggtacagaaacttggtgggaaaaggggactgtggccagagttgggaccctggagcagcatcctctgcagagaaggattttgtctggccagagcctggagaaacctgaaaaagaaccagtcagctagccagggtctcagagaaaagcagattacacactcaaattgggtaatttgagcagagcttaataaaggcagtatttacaaagtgtgggctaagcctcccatgagagtgcagaaccctggggctagcagtgtggggcgctattcccacccctgggcctgagtggggaaggagttatctttagcagacagaggattgctggaggagtgagaggggcacctgaaggagctgtgacctttgcttaaaggatgcagccagtcatggggaccctccagggaaattaatatcctgacctgctttcctgccccccagccccctcaatccattggctgaggccgctggaagccaccgggccaagggagcttgttgatgtgggtcacacgggcatgttcccaggtcagagaggagagtggagagtgaatctagggagactcaagagggagaagtgactccagctaccttcctttctgccgttttgtctcccagctggcattctcttttccagagcctcgagtttgggtttaatgtagttagtaaggagttacttccaaaggtagtgggcttagttgtcaccgtattcttaattttattaatgactgatgtgcctgggattggattaatacattaatccttaggacagccccatgaggcagcttggtggcagctcaggaagcatgtctaaggctcagaagttcataactcccttgaggccgcacagagggcggagctggaattctggtctcccactcgatcccttcgccactggtgcagagcttaatcacggccatgggctgcccttgttttgggttgtgggtttctgttcagtgagaacgcaactcaatccaaagtgaatgaaaccaagttggaaggcagggagggaactggctttgagatgacagggtccaggatgtgaatgcagctgagactggttcttgtccctccctcttgtccctcggattgataacttgtactcaactacatgcttttgtcagggaaccctggctgctggccttctgggtcccctaaccataagaaaaaggaccttccgttagtgtaaagcccaaggcaggattctgcttggctgggcttcgatctggtacccatagctggaccaatcatgacatcccagatggggtcacgtggccaacctgccgcaagggggtggggtctgtaccggaagacaggaggggaggggtgcagatcggacaggaagtaatggcatcccaggccccgaattgctgcaaccctggaggccagcccggagttgagactactggttttagagcagttcctctgcctccctaagctccacacctgtcaggattctgttacttcttggtaactgggacttgcccaactttaaaaacattatttaaaaaaatagtaatgtgcacatgtaaaagattcaaatagtatatatacaaggtgtacagtaaaaagtaaacttccctccatcccaggcctgccagcatccctgatgccgactttctgggtgtggcctagggcccctcagtgtaatgtaggggttgtgagcacagactttggtgccagtttgctaggttcgaatcctgactccctctttgtagctctgtgcttcaattgaaatactgtgcctcagtttctcctttataaaggcagggatcatgagagtgcctgtcccttgtgagcactatgaaagtgttagctgttctttaccagaataaatgcatttctatatcttcc

SEQ ID NO: 332173 - DNA, 842 bp, Homo sapiens
gccttgtctctgaaggagtctgagaagatggcgctgtcagagaagttgatgggtacacggcacagcctggccaccatctccctggagatggagcggcagaaaccagatgcccagagccggcaggagcaggaccgggtaggcctgccgtcgtagggaggcttgcggagcaggagcgccctctctccaccgagctatcccgcggtttccagcatcccatctggcggactcctcttcctctctcttctcctactctgggtcttctatcctggtgttccttgaatgcctatcttccttttgtgcctcggaacctctcacgcctgccacaagttactcttttccttggtagttctgaactttaaataaggtaatgcctgtaagaatgccataaatgctcaataattgtcatctgttattattttcatcagtaacatcatctgaatcatcagtattgtctgcttttaacagctgcatttttcattgtccaaatatagtcacatacatttgaccattttataattattgaataataaattcgttctgctattttacaatgaaaaataatgctgcagagagcatttttgcacatgtatcgtggcagatgtaggccagaggctcttcttttatccatcctatggccaacctatgaatgtatacacgtttaatgagattttgccagcaatcaaagccttcagggaaaatgtccctagctctttactacatcagatcaaggactctggataattggcataacatcctggaatagctgaaacagagatattattctctgctctcctctgttgtctttgtcttttcacgtcttaataaaagtgctggtgacaaga

SEQ ID NO: 332174 - DNA, 865 bp, Homo sapiens
gccttgtctctgaaggagtctgagaagatggcgctgtcagagaagttgatgggtacacggcacagcctggccaccatctccctggagatggagcggcagaaaccagatgcccagagccggcaggagcaggaccgggtaggcctgccgtcgtagggaggcttgcggagcaggagcgccctctctccaccgagctatcccgcggtttccagcatcccatctggcggactcctcttcctctctcttctcctactctgggtcttctatcctggtgttccttgaatgcctatcttccttttgtgcctcggaacctctcacgcctgccacaagttactcttttccttggtagttctgaactttaaataaggtaatgcctgtaagaatgccataaatgctcaataattgtcatctgttattattttcatcagtaacatcatctgaatcatcagtattgtctgcttttaacagctgcatttttcattgtccaaatatagtcacatacatttgaccattttataattattgaataataaattcgttctgctattttacaatgaaaaataatgctgcagagagcatttttgcacatgtatcgtggcagatgtaggccagaggctcttcttttatccatcctatggccaacctatgaatgtatacacgtttaatgagattttgccagcaatcaaagccttcagggaaaatgtccctagctctttactacatcagatcaaggactctggataattggcataacatcctggaatagctgaaacagagatattattctctgctctcctctgttgtctttgtcttttcacgtcttaataaaagtgctggtgacaagaaaaaaatcgacgcgcccgcgaat

SEQ ID NO: 332175 - DNA, 2195 bp, Homo sapiens
gcggccgccgcccccgggctggggtttgggggaccgagccgctccgggttcgggatgctgaggagaccgcgggcccgcgccagcctcccacacacacacactctcccggcgcctcggccggccgggcgcggtgtgcaggggtgaggcggtgtctccaggctgaggagggacgcggaggagggtccggcgcggccccgggactggagggtgagtccctcacaaagggcggagcggggctgtcacctggagatcacggagggaagttcatccatgagctcggatttcccacattacaacttcaggatgcctaatattggattccagaatctgcctctcaacatatatattgtggtttttggtactgctatatttgtcttcatccttagtttactcttctgttgctacttgattaggctaagacatcaagcacacaaagaattttatgcctacaaacaggttatattaaaagagaaagtaaaagaattgaatttacatgagctctgtgcagtgtgcctagaagacttcaagcctcgagatgagttggggatttgcccatgtaagcacgccttccacagaaagtgccttattaagtggctggaggttcgtaaagtgtgtcccctgtgcaacatgccagttctacagctggcccagttgcacagtaagcaggaccgtggaccccctcaggggccccttcctggggcagagaacattgtatagcttaccgcaaggatcagactgttgctggacacgacgtctgtgtggagccaggaggaacacatgtggtgtctgtatggctgctctctacctaggacaccagctgccacttcttttgcctcatgaagaactcttgggccagccaaactgggaacctaggtgtctgggtcttgtgacaaccaaagcactttgacactaccccctgccgagagaagaggagtggatgagcctgcgggtttgcctcaagaaacttcatgagggtctcttactaactccattacactctctctcctggagcctcatctccatgtcaagcaggagggtaaagaagggaactaagagcaggtctttcaagccacacccccacctgcggatggatgggtttctctgtaggccatgcaggcctttgtcgcagcaaaccttcccagcagcccttgagccaagtaaaaccagcacaaccagccaccagtggttggtgaggcagtgcccacaaggctcatgttgtatgcctttgataaggccatcttggctttgagtagcagtgttcctcgtcacccatttccccctcaggattacaacacctgctatcaaatcatctaagctgaaaacatgagatgcgcttggaaaggcctagtcagaagccatttcctcttatcatttccctctcctatgcaccagtaaggcccgtccagagccccagcagggagtgggccctgagtccacactgtccctgagtgatccaggaggctgcccacatccccacatgtgcactgtggttccagtgtagctgctgtgagcccactgccactgcctcagaagggagccactgtgaacctctcgagtggctccaaagagcagtggctttttgagaatggcccatacttctggcccggctggatgaagggaatgccgaccctttggcctctccccctccttccatctcttctctctcttgccctatctctctttctacttcagaaaaaaaaaaaaaaaaaaaaaaagcctgtcattcactttttaacactttatcccaaataagatccctgtgtaattctgaagctggtgatccacttggaattgtagatagtttcaggaagctcctgcagggctgtccaccgttggtgtgtgcctcagtatttggacttccgaaactgaaagtgaaagtgtctttataggagagaaacgcatgctgctctttggctctttctgtccaacttttctagaaatgactcaaagtccattaagatttgtgaatattgtataaattagctatggaaagtagcaggtcagatggaaaattcttttccacagccctgctctccgcctccctccatcttaggagcgcctgcctcaattcctcgtcaactgctttgctccactccatcccacaggtgtgagtggggggaagtttttcattagggaatacagtctgcgtgacatgggagaatggatggagggagctttgctactctgctcttggc

SEQ ID NO: 332176 - DNA, 2141 bp, Homo sapiens
cgcgaggggccgccgggcgcagtcagccgccgccacctccgccgcgctctgtccggacggacgctcgccgcccgcagcctgccgcccgccgcagggcgctgacggtcccgcacgtctgccgctgccaccggcgcgcccgaaacttccagcactatgttgaataagagtggtgagagcagatatcctgccttgttcccggtcttagggggttcatccatgagctcggatttcccacattacaacttcaggatgcctaatattggattccagaatctgcctctcaacatatatattgtggtttttggtactgctatatttgtcttcatccttagtttactcttctgttgctacttgattaggctaagacatcaagcacacaaagaattttatgcctacaaacaggttatattaaaagagaaagtaaaagaattgaatttacatgagctctgtgcagtgtgcctagaagacttcaagcctcgagatgagttggggatttgcccatgtaagcacgccttccacagaaagtgccttattaagtggctggaggttcgtaaagtgtgtcccctgtgcaacatgccagttctacagctggcccagttgcacagtaagcaggaccgtggaccccctcaggggccccttcctggggcagagaacattgtatagcttaccgcaaggatcagactgttgctggacacgacgtctgtgtggagccaggaggaacacatgtggtgtctgtatggctgctctctacctaggacaccagctgccacttcttttgcctcatgaagaactcttgggccagccaaactgggaacctaggtgtctgggtcttgtgacaaccaaagcactttgacactaccccctgccgagagaagaggagtggatgagcctgcgggtttgcctcaagaaacttcatgagggtctcttactaactccattacactctctctcctggagcctcatctccatgtcaagcaggagggtaaagaagggaactaagagcaggtctttcaagccacacccccacctgcggatggatgggtttctctgtaggccatgcaggcctttgtcgcagcaaaccttcccagcagcccttgagccaagtaaaaccagcacaaccagccaccagtggttggtgaggcagtgcccacaaggctcatgttgtatgcctttgataaggccatcttggctttgagtagcagtgttcctcgtcacccatttccccctcaggattacaacacctgctatcaaatcatctaagctgaaaacatgagatgcgcttggaaaggcctagtcagaagccatttcctcttatcatttccctctcctatgcaccagtaaggcccgtccagagccccagcagggagtgggccctgagtccacactgtccctgagtgatccaggaggctgcccacatccccacatgtgcactgtggttccagtgtagctgctgtgagcccactgccactgcctcagaagggagccactgtgaacctctcgagtggctccaaagagcagtggctttttgagaatggcccatacttctggcccggctggatgaagggaatgccgaccctttggcctctccccctccttccatctcttctctctcttgccctatctctctttctacttcagaaaaaaaaaaaaaaaaaaaaaaagcctgtcattcactttttaacactttatcccaaataagatccctgtgtaattctgaagctggtgatccacttggaattgtagatagtttcaggaagctcctgcagggctgtccaccgttggtgtgtgcctcagtatttggacttccgaaactgaaagtgaaagtgtctttataggagagaaacgcatgctgctctttggctctttctgtccaacttttctagaaatgactcaaagtccattaagatttgtgaatattgtataaattagctatggaaagtagcaggtcagatggaaaattcttttccacagccctgctctccgcctccctccatcttaggagcgcctgcctcaattcctcgtcaactgctttgctccactccatcccacaggtgtgagtggggggaagtttttcattagggaatacagtctgcgtgacatgggagaatggatggagggagctttgctactctgctcttggc

SEQ ID NO: 332177 - DNA, 2072 bp, Homo sapiens
cgcgaggggccgccgggcgcagtcagccgccgccacctccgccgcgctctgtccggacggacgctcgccgcccgcagcctgccgcccgccgcagggcgctgacggtcccgcacgtctgccgctgccaccggcgcgcccgattcatccatgagctcggatttcccacattacaacttcaggatgcctaatattggattccagaatctgcctctcaacatatatattgtggtttttggtactgctatatttgtcttcatccttagtttactcttctgttgctacttgattaggctaagacatcaagcacacaaagaattttatgcctacaaacaggttatattaaaagagaaagtaaaagaattgaatttacatgagctctgtgcagtgtgcctagaagacttcaagcctcgagatgagttggggatttgcccatgtaagcacgccttccacagaaagtgccttattaagtggctggaggttcgtaaagtgtgtcccctgtgcaacatgccagttctacagctggcccagttgcacagtaagcaggaccgtggaccccctcaggggccccttcctggggcagagaacattgtatagcttaccgcaaggatcagactgttgctggacacgacgtctgtgtggagccaggaggaacacatgtggtgtctgtatggctgctctctacctaggacaccagctgccacttcttttgcctcatgaagaactcttgggccagccaaactgggaacctaggtgtctgggtcttgtgacaaccaaagcactttgacactaccccctgccgagagaagaggagtggatgagcctgcgggtttgcctcaagaaacttcatgagggtctcttactaactccattacactctctctcctggagcctcatctccatgtcaagcaggagggtaaagaagggaactaagagcaggtctttcaagccacacccccacctgcggatggatgggtttctctgtaggccatgcaggcctttgtcgcagcaaaccttcccagcagcccttgagccaagtaaaaccagcacaaccagccaccagtggttggtgaggcagtgcccacaaggctcatgttgtatgcctttgataaggccatcttggctttgagtagcagtgttcctcgtcacccatttccccctcaggattacaacacctgctatcaaatcatctaagctgaaaacatgagatgcgcttggaaaggcctagtcagaagccatttcctcttatcatttccctctcctatgcaccagtaaggcccgtccagagccccagcagggagtgggccctgagtccacactgtccctgagtgatccaggaggctgcccacatccccacatgtgcactgtggttccagtgtagctgctgtgagcccactgccactgcctcagaagggagccactgtgaacctctcgagtggctccaaagagcagtggctttttgagaatggcccatacttctggcccggctggatgaagggaatgccgaccctttggcctctccccctccttccatctcttctctctcttgccctatctctctttctacttcagaaaaaaaaaaaaaaaaaaaaaaagcctgtcattcactttttaacactttatcccaaataagatccctgtgtaattctgaagctggtgatccacttggaattgtagatagtttcaggaagctcctgcagggctgtccaccgttggtgtgtgcctcagtatttggacttccgaaactgaaagtgaaagtgtctttataggagagaaacgcatgctgctctttggctctttctgtccaacttttctagaaatgactcaaagtccattaagatttgtgaatattgtataaattagctatggaaagtagcaggtcagatggaaaattcttttccacagccctgctctccgcctccctccatcttaggagcgcctgcctcaattcctcgtcaactgctttgctccactccatcccacaggtgtgagtggggggaagtttttcattagggaatacagtctgcgtgacatgggagaatggatggagggagctttgctactctgctcttggc

SEQ ID NO: 332178 - DNA, 1972 bp, Homo sapiens
  misc_feature (31)..(31): n is a, c, g, or t
  misc_feature (34)..(34): n is a, c, g, or t
  misc_feature (37)..(37): n is a, c, g, or t
  misc_feature (39)..(40): n is a, c, g, or t
ctccttgcggccgccagtgtggtggaattcnctngantnnttcatccatgagctcggatttcccacattacaacttcaggatgcctaatattggattccagaatctgcctctcaacatatatattgtggtttttggtactgctatatttgtcttcatccttagtttactcttctgttgctacttgattaggctaagacatcaagcacacaaagaattttatgcctacaaacaggttatattaaaagagaaagtaaaagaattgaatttacatgagctctgtgcagtgtgcctagaagacttcaagcctcgagatgagttggggatttgcccatgtaagcacgccttccacagaaagtgccttattaagtggctggaggttcgtaaagtgtgtcccctgtgcaacatgccagttctacagctggcccagttgcacagtaagcaggaccgtggaccccctcaggggccccttcctggggcagagaacattgtatagcttaccgcaaggatcagactgttgctggacacgacgtctgtgtggagccaggaggaacacatgtggtgtctgtatggctgctctctacctaggacaccagctgccacttcttttgcctcatgaagaactcttgggccagccaaactgggaacctaggtgtctgggtcttgtgacaaccaaagcactttgacactaccccctgccgagagaagaggagtggatgagcctgcgggtttgcctcaagaaacttcatgagggtctcttactaactccattacactctctctcctggagcctcatctccatgtcaagcaggagggtaaagaagggaactaagagcaggtctttcaagccacacccccacctgcggatggatgggtttctctgtaggccatgcaggcctttgtcgcagcaaaccttcccagcagcccttgagccaagtaaaaccagcacaaccagccaccagtggttggtgaggcagtgcccacaaggctcatgttgtatgcctttgataaggccatcttggctttgagtagcagtgttcctcgtcacccatttccccctcaggattacaacacctgctatcaaatcatctaagctgaaaacatgagatgcgcttggaaaggcctagtcagaagccatttcctcttatcatttccctctcctatgcaccagtaaggcccgtccagagccccagcagggagtgggccctgagtccacactgtccctgagtgatccaggaggctgcccacatccccacatgtgcactgtggttccagtgtagctgctgtgagcccactgccactgcctcagaagggagccactgtgaacctctcgagtggctccaaagagcagtggctttttgagaatggcccatacttctggcccggctggatgaagggaatgccgaccctttggcctctccccctccttccatctcttctctctcttgccctatctctctttctacttcagaaaaaaaaaaaaaaaaaaaaaaagcctgtcattcactttttaacactttatcccaaataagatccctgtgtaattctgaagctggtgatccacttggaattgtagatagtttcaggaagctcctgcagggctgtccaccgttggtgtgtgcctcagtatttggacttccgaaactgaaagtgaaagtgtctttataggagagaaacgcatgctgctctttggctctttctgtccaacttttctagaaatgactcaaagtccattaagatttgtgaatattgtataaattagctatggaaagtagcaggtcagatggaaaattcttttccacagccctgctctccgcctccctccatcttaggagcgcctgcctcaattcctcgtcaactgctttgctccactccatcccacaggtgtgagtggggggaagtttttcattagggaatacagtctgcgtgacatgggagaatggatggagggagctttgctactctgctcttggc

SEQ ID NO: 332179 - DNA, 527 bp, Homo sapiens
gcggccgccgcccccgggctggggtttgggggaccgagccgctccgggttcgggatgctgaggagaccgcgggcccgcgccagcctcccacacacacacactctcccggcgcctcggccggccgggcgcggtgtgcaggggtgaggcggtgtctccaggctgaggagggacgcggaggagggtccggcgcggccccgggactggagggtgagtccctcacaaagggcggagcggggctgtcacctggagatcacggagggaaggtgcgtgggcccccgcacgtcctgctcgcccaagccctggcatcgggtccccgggcgtgggaggcggctgggatgagctgggaggctaggaggaggatggcgaggacgctgcccccgcgttggcggtgggcgcgcgccttggggggtgcggcgtggcagtgttttcctggtccccgtccactcctcccctttctttgtggcgcttgtctcgtgccccgttgtcacagtgtgcatggcagtggtcggggtggagacctcttccct

SEQ ID NO: 332180 - DNA, 2353 bp, Homo sapiens
ctcagttatttctaatattttaccattataaatattgttacttcaagggttgagttattaggttaaaggctaaagagtttgaagaatcttaaaactttttttctttttgcacttctctgaggttgaacattttcatgtttattaattactggcattattttagtgaaatgccttttagtgaataaatgcaacttgcaaagctttttatattggatctccagtctctgaaatagtgccaggtacataatactcagtaaatatttggcatggtgaatgaatgaatgaatggcaagaatattaacactttgtctaccatatttgtttcagatgaggtcattgtgcctctatacgtgcacaatgataatgctgtcttggttcttagtctttacctattttttttccattcttttcttcccccacattcatccatgagctcggatttcccacattacaacttcaggatgcctaatattggattccagaatctgcctctcaacatatatattgtggtttttggtactgctatatttgtcttcatccttagtttactcttctgttgctacttgattaggctaagacatcaagcacacaaagaattttatgcctacaaacaggttatattaaaagagaaagtaaaagaattgaatttacatgagctctgtgcagtgtgcctagaagacttcaagcctcgagatgagttggggatttgcccatgtaagcacgccttccacagaaagtgccttattaagtggctggaggttcgtaaagtgtgtcccctgtgcaacatgccagttctacagctggcccagttgcacagtaagcaggaccgtggaccccctcaggggccccttcctggggcagagaacattgtatagcttaccgcaaggatcagactgttgctggacacgacgtctgtgtggagccaggaggaacacatgtggtgtctgtatggctgctctctacctaggacaccagctgccacttcttttgcctcatgaagaactcttgggccagccaaactgggaacctaggtgtctgggtcttgtgacaaccaaagcactttgacactaccccctgccgagagaagaggagtggatgagcctgcgggtttgcctcaagaaacttcatgagggtctcttactaactccattacactctctctcctggagcctcatctccatgtcaagcaggagggtaaagaagggaactaagagcaggtctttcaagccacacccccacctgcggatggatgggtttctctgtaggccatgcaggcctttgtcgcagcaaaccttcccagcagcccttgagccaagtaaaaccagcacaaccagccaccagtggttggtgaggcagtgcccacaaggctcatgttgtatgcctttgataaggccatcttggctttgagtagcagtgttcctcgtcacccatttccccctcaggattacaacacctgctatcaaatcatctaagctgaaaacatgagatgcgcttggaaaggcctagtcagaagccatttcctcttatcatttccctctcctatgcaccagtaaggcccgtccagagccccagcagggagtgggccctgagtccacactgtccctgagtgatccaggaggctgcccacatccccacatgtgcactgtggttccagtgtagctgctgtgagcccactgccactgcctcagaagggagccactgtgaacctctcgagtggctccaaagagcagtggctttttgagaatggcccatacttctggcccggctggatgaagggaatgccgaccctttggcctctccccctccttccatctcttctctctcttgccctatctctctttctacttcagaaaaaaaaaaaaaaaaaaaaaaagcctgtcattcactttttaacactttatcccaaataagatccctgtgtaattctgaagctggtgatccacttggaattgtagatagtttcaggaagctcctgcagggctgtccaccgttggtgtgtgcctcagtatttggacttccgaaactgaaagtgaaagtgtctttataggagagaaacgcatgctgctctttggctctttctgtccaacttttctagaaatgactcaaagtccattaagatttgtgaatattgtataaattagctatggaaagtagcaggtcagatggaaaattcttttccacagccctgctctccgcctccctccatcttaggagcgcctgcctcaattcctcgtcaactgctttgctccactccatcccacaggtgtgagtggggggaagtttttcattagggaatacagtctgcgtgacatgggagaatggatggagggagctttgctactctgctcttggc

SEQ ID NO: 332181 - DNA, 1822 bp, Homo sapiens
  misc_feature (31)..(31): n is a, c, g, or t
  misc_feature (34)..(34): n is a, c, g, or t
  misc_feature (37)..(37): n is a, c, g, or t
  misc_feature (39)..(40): n is a, c, g, or t
ctccttgcggccgccagtgtggtggaattcnctngantnngctaagacatcaagcacacaaagaattttatgcctacaaacaggttatattaaaagagaaagtaaaagaattgaatttacatgagctctgtgcagtgtgcctagaagacttcaagcctcgagatgagttggggatttgcccatgtaagcacgccttccacagaaagtgccttattaagtggctggaggttcgtaaagtgtgtcccctgtgcaacatgccagttctacagctggcccagttgcacagtaagcaggaccgtggaccccctcaggggccccttcctggggcagagaacattgtatagcttaccgcaaggatcagactgttgctggacacgacgtctgtgtggagccaggaggaacacatgtggtgtctgtatggctgctctctacctaggacaccagctgccacttcttttgcctcatgaagaactcttgggccagccaaactgggaacctaggtgtctgggtcttgtgacaaccaaagcactttgacactaccccctgccgagagaagaggagtggatgagcctgcgggtttgcctcaagaaacttcatgagggtctcttactaactccattacactctctctcctggagcctcatctccatgtcaagcaggagggtaaagaagggaactaagagcaggtctttcaagccacacccccacctgcggatggatgggtttctctgtaggccatgcaggcctttgtcgcagcaaaccttcccagcagcccttgagccaagtaaaaccagcacaaccagccaccagtggttggtgaggcagtgcccacaaggctcatgttgtatgcctttgataaggccatcttggctttgagtagcagtgttcctcgtcacccatttccccctcaggattacaacacctgctatcaaatcatctaagctgaaaacatgagatgcgcttggaaaggcctagtcagaagccatttcctcttatcatttccctctcctatgcaccagtaaggcccgtccagagccccagcagggagtgggccctgagtccacactgtccctgagtgatccaggaggctgcccacatccccacatgtgcactgtggttccagtgtagctgctgtgagcccactgccactgcctcagaagggagccactgtgaacctctcgagtggctccaaagagcagtggctttttgagaatggcccatacttctggcccggctggatgaagggaatgccgaccctttggcctctccccctccttccatctcttctctctcttgccctatctctctttctacttcagaaaaaaaaaaaaaaaaaaaaaaagcctgtcattcactttttaacactttatcccaaataagatccctgtgtaattctgaagctggtgatccacttggaattgtagatagtttcaggaagctcctgcagggctgtccaccgttggtgtgtgcctcagtatttggacttccgaaactgaaagtgaaagtgtctttataggagagaaacgcatgctgctctttggctctttctgtccaacttttctagaaatgactcaaagtccattaagatttgtgaatattgtataaattagctatggaaagtagcaggtcagatggaaaattcttttccacagccctgctctccgcctccctccatcttaggagcgcctgcctcaattcctcgtcaactgctttgctccactccatcccacaggtgtgagtggggggaagtttttcattagggaatacagtctgcgtgacatgggagaatggatggagggagctttgctactctgctcttggc

SEQ ID NO: 332182 - DNA, 184 bp, Homo sapiens
agcagtgattttccacaaagacaccaagttaattcagctgggtgaggagaattctttcaacaaggggtgcaggaacaattttatatccagaagcatgaaaagaaaacaaaacaaaacctgagcacttacctcacagctcatggaagaattaacttgaaacatatcataaacttaaatgtaagag

SEQ ID NO: 332183 - DNA, 742 bp, Homo sapiens
gtggagattgatgcttctgttttttgttgccgctgctgccctcgcgctgggagccgagccggagggaaggcggtggagagatgattgcagagttggtgagcagcgctctggggctcgccttgtatctcaacaccctgagtgcggatttctgctatgatgacagccgtgctatcaagactaatcaggaccttctcccagaaactccatggacgcacattttctacaatgatttttgggggactcttctaacccacagtggcagccacaagtcctaccggccactctgcactctttcttttcgcctgaaccatgccattggagggttgaatccctggagctaccatcttgtcaatgtcctgttgcatgcagcagtcactggtctcttcacaagcttctccaagatcctccttggtgatggatactggacattcatggctggcttgatgtttgcttctcaccccattcacacggaggcagtggcaggaatcgtgggacgagccgatgtcggggccagtctcttctttctcctctccttgctctgctacattaaacactgttctacaagaggctactcagccagaacctggggctggttcctggggtcaggactgtgcgcaggatgcagcatgttgtggaaggaacaaggagtgactgttctcgcagtttcagcagtttatgatgtctttgtctttcacaggctgaaaataaaacagatattacctaccatttacaaagtaagtga

SEQ ID NO: 332184 - DNA, 851 bp, Homo sapiens
attaaggcttaaaccagttgaagaactttattcttcaaagatacttgcatttcaacaaggaaggaagcttttaaggaagagaaaaacaaccctcattgtggttttagtaagcattaaggggaggacatgaattcagcttatatgtgcctggaatcccatcacaaagctacatagtaacaaagcttctgagaaaggcagtatcttatcaatgtcatattttttctttctttctgtgttttacatttgattttttttaacgttttgttttttagccgtgctatcaagactaatcaggaccttctcccagaaactccatggacgcacattttctacaatgatttttgggggactcttctaacccacagtggcagccacaagtcctaccggccactctgcactctttcttttcgcctgaaccatgccattggagggttgaatccctggagctaccatcttgtcaatgtcctgttgcatgcagcagtcactggtctcttcacaagcttctccaagatcctccttggtgatggatactggacattcatggctggcttgatgtttgcttctcaccccattcacacggaggcagtggcaggaatcgtgggacgagccgatgtcggggccagtctcttctttctcctctccttgctctgctacattaaacactgttctacaagaggctactcagccagaacctggggctggttcctggggtcaggactgtgcgcaggatgcagcatgttgtggaaggaacaaggagtgactgttctcgcagtttcagcagtttatgatgtctttgtctttcacaggctgaaaataaaacagatattacctaccatttacaaagtaagtga

SEQ ID NO: 332185 - DNA, 671 bp, Homo sapiens
tgacagccgtgctatcatcatagcagaaatccgcactcaggtgttgagatacaaggcgagccccagagcgcggatttctgctatgatgacagccgtgctatcaagactaatcaggaccttctcccagaaactccatggacgcacattttctacaatgatttttgggggactcttctaacccacagtggcagccacaagtcctaccggccactctgcactctttcttttcgcctgaaccatgccattggagggttgaatccctggagctaccatcttgtcaatgtcctgttgcatgcagcagtcactggtctcttcacaagcttctccaagatcctccttggtgatggatactggacattcatggctggcttgatgtttgcttctcaccccattcacacggaggcagtggcaggaatcgtgggacgagccgatgtcggggccagtctcttctttctcctctccttgctctgctacattaaacactgttctacaagaggctactcagccagaacctggggctggttcctggggtcaggactgtgcgcaggatgcagcatgttgtggaaggaacaaggagtgactgttctcgcagtttcagcagtttatgatgtctttgtctttcacaggctgaaaataaaacagatattacctaccatttacaaagtaagtga

SEQ ID NO: 332186 - DNA, 6012 bp, Homo sapiens
gcggagtgaggacggtgacagccacgcgcgcgcgtacgcgcccgatgcagcgcggccccgtgaccctagtcggccgctgagaggcgcgcggagtctgggccgctgccgtctaggggtcccgtcccgaggcgtccccggcatctccggcccgaatcccggagtgccgggtcgcgcctgcaccgaaggtcccggctcctgtgccctccctgcagccgtcagggcccgtcccccaactcccctttccgctcaggcagggtcctcgcggcccatgctggccgctggggacccgcgcagcccagaccgttcccgggccggccagccggccaccatggtggccctgaggcctgtgcagcaactccaggggggctaaagggctcagagtgcaggccgtggggcgcgagggtcccgggcctgagccccgcgccatggccggggccatcgcttcccgcatgagcttcagctctctcaagaggaagcaacccaagacgttcaccgtgaggatcgtcaccatggacgccgagatggagttcaattgcgagatgaagtggaaagggaaggacctctttgatttggtgtgccggactctggggctccgagaaacctggttctttggactgcagtacacaatcaaggacacagtggcctggctcaaaatggacaagaaggtactggatcatgatgtttcaaaggaagaaccagtcacctttcacttcttggccaaattttatcctgagaatgctgaagaggagctggttcaggagatcacacaacatttattcttcttacaggtaaagaagcagattttagatgaaaagatctactgccctcctgaggcttctgtgctcctggcttcttacgccgtccaggccaagtatggtgactacgaccccagtgttcacaagcggggatttttggcccaagaggaattgcttccaaaaagggtaataaatctgtatcagatgactccggaaatgtgggaggagagaattactgcttggtacgcagagcaccgaggccgagccagggatgaagctgaaatggaatatctgaagatagctcaggacctggagatgtacggtgtgaactactttgcaatccggaataaaaagggcacagagctgctgcttggagtggatgccctggggcttcacatttatgaccctgagaacagactgacccccaagatctccttcccgtggaatgaaatccgaaacatctcgtacagtgacaaggagtttactattaaaccactggataagaaaattgatgtcttcaagtttaactcctcaaagcttcgtgttaataagctgattctccagctatgtatcgggaaccatgatctatttatgaggagaaggaaagccgattctttggaagttcagcagatgaaagcccaggccagggaggagaaggctagaaagcagatggagcggcagcgcctcgctcgagagaagcagatgagggaggaggctgaacgcacgagggatgagttggagaggaggctgctgcagatgaaagaagaagcaacaatggccaacgaagcactgatgcggtctgaggagacagctgacctgttggctgaaaaggcccagatcaccgaggaggaggcaaaacttctggcccagaaggccgcagaggctgagcaggaaatgcagcgcatcaaggccacagcgattcgcacggaggaggagaagcgcctgatggagcagaaggtgctggaagccgaggtgctggcactgaagatggctgaggagtcagagaggagggccaaagaggcagatcagctgaagcaggacctgcaggaagcacgcgaggcggagcgaagagccaagcagaagctcctggagattgccaccaagcccacgtacccgcccatgaacccaattccagcaccgttgcctcctgacataccaagcttcaacctcattggtgacagcctgtctttcgacttcaaagatactgacatgaagcggctttccatggagatagagaaagaaaaagtggaatacatggaaaagagcaagcatctgcaggagcagctcaatgaactcaagacagaaatcgaggccttgaaactgaaagagagggagacagctctggatattctgcacaatgagaactccgacaggggtggcagcagcaagcacaataccattaaaaagctcaccttgcagagcgccaagtcccgagtggccttctttgaagagctctagcaggtgacccagccaccccaggacctgccacttctcctgctaccgggaccgcgggatggaccagatatcaagagagccatccatagggagctggctgggggtttccgtgggagctccagaactttccccagctgagtgaagagcccagcccctcttatgtgcaattgccttgaactacgaccctgtagagatttctctcatggcgttctagttctctgacctgagtctttgttttaagaagtatttgtcttcctttgtctaatgtgggattcctgactcccttcgtccaaggcaccggtgtgtgtgtgtcttgcactccagagctgacctccaccgcccagcctgggaagtcactgtagggagtgagacactgaagccctgagaagccagtgccatcatccccaccccgcccagggttccggaacattcattcccccaccggtgaggacctggcatgcagcgaagcagcccagcccggcggatcccaggccagcacgcctgccggcttctcatcgtcagggagcccgcccagagctcgtgacgagcaagtgctgggtccccgccaggcaccccgaggcggcgctctggctggcagctggtggggaataggcagggcagctgtggctggggagagactttaggcagaagctgtgatgcaggctgactgccagccgaggggctgggtagtgccgtgcgggagctgatggtacagggcactcgctgtccccctccggccaccctagaccagggtccgagaggcaggcaggagccactcatgtcttccccattgcccgacgcccatagacgctccttcctgtgtggggctggggtactccctggtcgtactgcagtcagcacccgtaacccggctatgaccagggatctgtaagccctgtggctccacaggtgctgcttctcactggcccagactctgagctccaccggcccagtctgcacggcccatctgcttcaccttccctcccagccacgtgccagtggccacagcccacttcccaacccactgttgtacccaggcctcactttgctgttgcccttgtccctcttcgggccctgaattttctgttccctgggggccagccagggccctttgtgcccctcccagcacaggcctgatgcaggtgtccactcacaggtggcgctcacctaggctgtcacaggacccacctccatgccaggcaacagagggccacagaaccacccccacggctcactccttggtctggggccaccttcttgccctttctttttttttttttttttttttccgagatggagtctctctctgtcacccaggtgggagtgtggtggcacaatctcggctcactgcaacctccacctcctgagttcaagcaattctcctgcctcagcctcccaagtagctgggactacaggcatgcaccaccacacttggccaatgttctgtatttttaatagggacggggttttgccatgttagctaggctggtctcaaactcacacctgggattacaggcatgagccactgcacccagccccttcttgccctttcttttctccatggctgatgctgctgtggccagccagggcccttgagatccttccagtttggctgttatgcaaagcaggtgatttgtcttaatcagataaaagatagaggctatgggggcctcaagatttttggagagcagaggtggtctctggcaattccatctggttttgagaaacttagcagctcacagagcacagagatcctgccttcttcctactatcaggctgacctaatggggttgggctgctcggcaactgcttgggtcaccttgccccaaggaaaccagccctgggtgccacccagccacttagggtctacagggtgggactccagacctagagcgtaagtatggatgttgtggccctgtgtcttcctagtgtgacccagccaggagcggaagcttcaggcgtttgtaaagtgaggtctggctctgcctcctccgttttttttttttttctggtttctgtttctgtttttttttttggaaatggagtctcgctctgtcgcccaggcttggagtgcagtgtcacgatctcagctcactgcaacctccgcctcccaggtacaagagattctcctgcctcagcctcccgagtagctgggactacaggcgtgtgccaccatgcctggctaatttttggtatttttagtagagatggggtttcgccatgttagccagactggtctcgaactcctgacctcaggtgatcctcccaccccggcttcccaaagttctgggattataggcgtgagccaccatgcccggtctcttctcagtcttgaagcccatccctggatttccaccaggagttactttcctcctgacctgtaaatttgttctttaacaatggctgcaggtgggagcatatggtggtttataaaaacgctgtcgggctttgtttccttctttagctgccgtgtctacttctgaagtctgggaagtgccaagccacgcggcctcaagggagctggctggtgtttgagctgtggcagaagcacctggggctccagggagcaggctgggaactgcaggaccttgctcagccaggagcacttccccctccttgaggcaggaatactgaggtgcctccccacagatggagaaggtggagaggaggatgggcctcaggagcatctcaagccccagtagcaggagaaagaaagaaagagatgcctggttttcacagactggttcctgtggctgggatgactgcatccttttttttttttttttgagacggagtttttgcctttgtcgcccaggctggagtgcaatggcgtgatctcggctcaccgcaacctccgcctcccggattcaagcaattctcctgcctcagcctcccgagtagctgggattacaggcacgcacctccacgtccggctaattttgtatttttagtggagacggggtttctccatgtcggtcaggctggtctcgaactcccgacctcaggtgatctgcccacctcggcctcccaaagtgctgggattacaggcatgagccaccgcgcttggccagactgcgtcctttttaagcgaacattttagggcctgggagtttgtcaagtaaggaagtctcaagcccaaagagcagcgtcctgaccatggtggtttcattacgagcccttctgctggctctcaggcagaagccccacagcaccgggaccattcatgaggtcactgcccagctcatgatgtccgtgaggctgtccttttggccagtagccgtgtgcagctgtgtggcacagatggcttcgttcatcctgatcaaggccccacctcagccacagcagtccccccaacctgtgttgtccaccctattattcatgtacctgccaggccctgctagatagcaccccgtggcattacataacacttcatgagtggctgtgtcttgtaattttggggacaggtttctctctttccctctcttttttttgtcaaaagcccagagactgacaaccagctgcagtgtctaagtgttcctcactgacagggtggggcctcaccacccctggagggagcagcgttggcagggagacagcctggcccagtgaccctgggcccaagccagcccctccagggctttcagggaagcgccatccattttcaaagatgtcaaacgtcacttcttcctgtagggcccgagtcctgcctcctatcagggccagatcatagaaggctattttctattctggggaacgattataacttaaatgattgttttaataaaaattctaagctggaaaa

SEQ ID NO: 332187 - DNA, 3056 bp, Homo sapiens
gcggagtgaggacggtgacagccacgcgcgcgcgtacgcgcccgatgcagcgcggccccgtgaccctagtcggccgctgagaggcgcgcggagtctgggccgctgccgtctaggggtcccgtcccgaggcgtccccggcatctccggcccgaatcccggagtgccgggtcgcgcctgcaccgaaggtcccggctcctgtgccctccctgcagccgtcagggcccgtcccccaactcccctttccgctcaggcagggtcctcgcggcccatgctggccgctggggacccgcgcagcccagaccgttcccgggccggccagccggccaccatggtggccctgaggcctgtgcagcaactccaggggggctaaagggctcagagtgcaggccgtggggcgcgagggtcccgggcctgagccccgcgccatggccggggccatcgcttcccgcatgagcttcagctctctcaagaggaagcaacccaagacgttcaccgtgaggatcgtcaccatggacgccgagatggagttcaattgcgagatgaagtggaaagggaaggacctctttgatttggtgtgccggactctggggctccgagaaacctggttctttggactgcagtacacaatcaaggacacagtggcctggctcaaaatggacaagaaggtactggatcatgatgtttcaaaggaagaaccagtcacctttcacttcttggccaaattttatcctgagaatgctgaagaggagctggttcaggagatcacacaacatttattcttcttacaggtaaagaagcagattttagatgaaaagatctactgccctcctgaggcttctgtgctcctggcttcttacgccgtccaggccaagtatggtgactacgaccccagtgttcacaagcggggatttttggcccaagaggaattgcttccaaaaagggtaataaatctgtatcagatgactccggaaatgtgggaggagagaattactgcttggtacgcagagcaccgaggccgagccagggatgaagctgaaatggaatatctgaagatagctcaggacctggagatgtacggtgtgaactactttgcaatccggaataaaaagggcacagagctgctgcttggagtggatgccctggggcttcacatttatgaccctgagaacagactgacccccaagatctccttcccgtggaatgaaatccgaaacatctcgtacagtgacaaggagtttactattaaaccactggataagaaaattgatgtcttcaagtttaactcctcaaagcttcgtgttaataagctgattctccagctatgtatcgggaaccatgatctatttatgaggagaaggaaagccgattctttggaagttcagcagatgaaagcccaggccagggaggagaaggctagaaagcagatggagcggcagcgcctcgctcgagagaagcagatgagggaggaggctgaacgcacgagggatgagttggagaggaggctgctgcagatgaaagaagaagcaacaatggccaacgaagcactgatgcggtctgaggagacagctgacctgttggctgaaaaggcccagatcaccgaggaggaggcaaaacttctggcccagaaggccgcagaggctgagcaggaaatgcagcgcatcaaggccacagcgattcgcacggaggaggagaagcgcctgatggagcagaaggtgctggaagccgaggtgctggcactgaagatggctgaggagtcagagaggagggccaaagaggcagatcagctgaagcaggacctgcaggaagcacgcgaggcggagcgaagagccaagcagaagctcctggagattgccaccaagcccacgtacccgcccatgaacccaattccagcaccgttgcctcctgacataccaagcttcaacctcattggtgacagcctgtctttcgacttcaaagatactgacatgaagcggctttccatggagatagagaaagaaaaagtggaatacatggaaaagagcaagcatctgcaggagcagctcaatgaactcaagacagaaatcgaggccttgaaactgaaagagagggagacagctctggatattctgcacaatgagaactccgacaggggtggcagcagcaagcacaataccattaaaaagcctcaagcccaaggcagaagacctatctgcatttgagccctcaaataggttgttcccaggtactctctatgtggtgatggtgctgccctctgtgatactaacccgtgcatgagcttgcctgtctctgtcctcgggccacactgagcccttacgagggcaggtggtgcctgggtactggccgcagcatgctttgagtctaaaagtaggcacccaccctgtgaagccagaccagcctccagggccccagaagactgcctcgttccgaagagcatgtcatggggctgtaggaccagccattcttcccatctcgggtcattgttgggctggggaaggttatggcttcttgtccagtcaggtgtgtctaaaagtcctttgtcttggtggcatactcctagcatggaaatggggtcaatctgggcactttggagactggtgtgtttaactcaagatcaagaccttttatgcgttgacagcctctcaagacccatggtcacacctggcagcttctggtagtggggcaaaagggttgcttgtgctggctcattttcctttagagctttccctttctgcacacatcccttttcttttcaaataaagcaaacccagagcacagggtctgatatgtgagtccacggggagtggactgtctgttcatctgtgctcagccacctctgcttcagcttcctctccataggctgagcagagatgtggtcagagtgaactcacattggaacagtacactcacggcaccctggagaggagcggtcactggttgctgagtgaattaaccgaatgtttgctgcttttctcctgcaacagttcattattcctccagcatgcctaggcagtggagagaatgtattttgcccaataataaaatgacatcctgcctct

SEQ ID NO: 332188 - DNA, 219 bp, Homo sapiens
ctgcaacagtgggagggaagagccagatgcaaactcgttctgcgagcccgaggttccgttctcatgatccttgctgtgatttctcttttgatgttggcaattttaaaatgacatcagtctatctggacctttttcctaaggctcttgctcagaccactcagtagatagccgccacctgcccagtgaggtgaatcaggcccattaggccatttgtcaggg

SEQ ID NO: 332189 - DNA, 5266 bp, Homo sapiens
gcggagtgaggacggtgacagccacgcgcgcgcgtacgcgcccgatgcagcgcggccccgtgaccctagtcggccgctgagaggcgcgcggagtctgggccgctgccgtctaggggtcccgtcccgaggcgtccccggcatctccggcccgaatcccggagtgccgggtcgcgcctgcaccgaaggtcccggctcctgtgccctccctgcagccgtcagggcccgtcccccaactcccctttccgctcaggcagggtcctcgcggcccatgctggccgctggggacccgcgcagcccagaccgttcccgggccggccagccggccaccatggtggccctgaggcctgtgcagcaactccaggggggctaaagggctcagagtgcaggccgtggggcgcgagggtcccgggcctgagccccgcgccatggccggggccatcgcttcccgcatgagcttcagctctctcaagaggaagcaacccaagacgttcaccgtgaggatcgtcaccatggacgccgagatggagttcaattgcgagatgaagtggaaagggaaggacctctttgatttggtgtgccggactctggggctccgagaaacctggttctttggactgcagtacacaatcaaggacacagtggcctggctcaaaatggacaagaaggtactggatcatgatgtttcaaaggaagaaccagtcacctttcacttcttggccaaattttatcctgagaatgctgaagaggagctggttcaggagatcacacaacatttattcttcttacaggtaaagaagcagattttagatgaaaagatctactgccctcctgaggcttctgtgctcctggcttcttacgccgtccaggccaagtatggtgactacgaccccagtgttcacaagcggggatttttggcccaagaggaattgcttccaaaaagggtaataaatctgtatcagatgactccggaaatgtgggaggagagaattactgcttggtacgcagagcaccgaggccgagccagggatgaagctgaaatggaatatctgaagatagctcaggacctggagatgtacggtgtgaactactttgcaatccggaataaaaagggcacagagctgctgcttggagtggatgccctggggcttcacatttatgaccctgagaacagactgacccccaagatctccttcccgtggaatgaaatccgaaacatctcgtacagtgacaaggagtttactattaaaccactggataagaaaattgatgtcttcaagtttaactcctcaaagcttcgtgttaataagctgattctccagctatgtatcgggaaccatgatctatttatgaggagaaggaaagccgattctttggaagttcagcagatgaaagcccaggccagggaggagaaggctagaaagcagatggagcggcagcgcctcgctcgagagaagcagatgagggaggaggctgaacgcacgagggatgagttggagaggaggctgctgcagatgaaagaagaagcaacaatggccaacgaagcactgatgcggtctgaggagacagctgacctgttggctgaaaaggcccagatcaccgaggaggaggcaaaacttctggcccagaaggccgcagaggctgagcaggaaatgcagcgcatcaaggccacagcgattcgcacggaggaggagaagcgcctgatggagcagaaggtgctggaagccgaggtgctggcactgaagatggctgaggagtcagagaggagggccaaagaggcagatcagctgaagcaggacctgcaggaagcacgcgaggcggagcgaagagccaagcagaagctcctggagattgccaccaagcccacgtacccgcccatgaacccaattccagcaccgttgcctcctgacataccaagcttcaacctcattggtgacagcctgtctttcgacttcaaagatactgacatgaagcggctttccatggagatagagaaagaaaaagtggaatacatggaaaagagcaagcatctgcaggagcagctcaatgaactcaagacagaaatcgaggccttgaaactgaaagagagggagacagctctggatattctgcacaatgagaactccgacaggggtggcagcagcaagcacaataccattaaaaagctcaccttgcagagcgccaagtcccgagtggccttctttgaagagctctagcaggtgacccagccaccccaggacctgccacttctcctgctaccgggaccgcgggatggaccagatatcaagagagccatccatagggagctggctgggggtttccgtgggagctccagaactttccccagctgagtgaagagcccagcccctcttatgtgcaattgccttgaactacgaccctgtagagatttctctcatggcgttctagttctctgacctgagtctttgttttaagaagtatttgtcttcctttgtctaatgtgggattcctgactcccttcgtccaaggcaccggtgtgtgtgtgtcttgcactccagagctgacctccaccgcccagcctgggaagtcactgtagggagtgagacactgaagccctgagaagccagtgccatcatccccaccccgcccagggttccggaacattcattcccccaccggtgaggacctggcatgcagcgaagcagcccagcccggcggatcccaggccagcacgcctgccggcttctcatcgtcagggagcccgcccagagctcgtgacgagcaagtgctgggtccccgccaggcaccccgaggcggcgctctggctggcagctggtggggaataggcagggcagctgtggctggggagagactttaggcagaagctgtgatgcaggctgactgccagccgaggggctgggtagtgccgtgcgggagctgatggtacagggcactcgctgtccccctccggccaccctagaccagggtccgagaggcaggcaggagccactcatgtcttccccattgcccgacgcccatagacgctccttcctgtgtggggctggggtactccctggtcgtactgcagtcagcacccgtaacccggctatgaccagggatctgtaagccctgtggctccacaggtgctgcttctcactggcccagactctgagctccaccggcccagtctgcacggcccatctgcttcaccttccctcccagccacgtgccagtggccacagcccacttcccaacccactgttgtacccaggcctcactttgctgttgcccttgtccctcttcgggccctgaattttctgttccctgggggccagccagggccctttgtgcccctcccagcacaggcctgatgcaggtgtccactcacaggtggcgctcacctaggctgtcacaggacccacctccatgccaggcaacagagggccacagaaccacccccacggctcactccttggtctggggccaccttcttgccctttctttttttttttttttttttttccgagatggagtctctctctgtcacccaggcttggagtgcagtgtcacgatctcagctcactgcaacctccgcctcccaggtacaagagattctcctgcctcagcctcccgagtagctgggactacaggcgtgtgccaccatgcctggctaatttttggtatttttagtagagatggggtttcgccatgttagccagactggtctcgaactcctgacctcaggtgatcctcccaccccggcttcccaaagttctgggattataggcgtgagccaccatgcccggtctcttctcagtcttgaagcccatccctggatttccaccaggagttactttcctcctgacctgtaaatttgttctttaacaatggctgcaggtgggagcatatggtggtttataaaaacgctgtcgggctttgtttccttctttagctgccgtgtctacttctgaagtctgggaagtgccaagccacgcggcctcaagggagctggctggtgtttgagctgtggcagaagcacctggggctccagggagcaggctgggaactgcaggaccttgctcagccaggagcacttccccctccttgaggcaggaatactgaggtgcctccccacagatggagaaggtggagaggaggatgggcctcaggagcatctcaagccccagtagcaggagaaagaaagaaagagatgcctggttttcacagactggttcctgtggctgggatgactgcatccttttttttttttttttgagacggagtttttgcctttgtcgcccaggctggagtgcaatggcgtgatctcggctcaccgcaacctccgcctcccggattcaagcaattctcctgcctcagcctcccgagtagctgggattacaggcacgcacctccacgtccggctaattttgtatttttagtggagacggggtttctccatgtcggtcaggctggtctcgaactcccgacctcaggtgatctgcccacctcggcctcccaaagtgctgggattacaggcatgagccaccgcgcttggccagactgcgtcctttttaagcgaacattttagggcctgggagtttgtcaagtaaggaagtctcaagcccaaagagcagcgtcctgaccatggtggtttcattacgagcccttctgctggctctcaggcagaagccccacagcaccgggaccattcatgaggtcactgcccagctcatgatgtccgtgaggctgtccttttggccagtagccgtgtgcagctgtgtggcacagatggcttcgttcatcctgatcaaggccccacctcagccacagcagtccccccaacctgtgttgtccaccctattattcatgtacctgccaggccctgctagatagcaccccgtggcattacataacacttcatgagtggctgtgtcttgtaattttggggacaggtttctctctttccctctcttttttttgtcaaaagcccagagactgacaaccagctgcagtgtctaagtgttcctcactgacagggtggggcctcaccacccctggagggagcagcgttggcagggagacagcctggcccagtgaccctgggcccaagccagcccctccagggctttcagggaagcgccatccattttcaaagatgtcaaacgtcacttcttcctgtagggcccgagtcctgcctcctatcagggccagatcatagaaggctattttctattctggggaacgattataacttaaatgattgttttaataaaaattctaagctggaaaa

SEQ ID NO: 332190 - DNA, 5396 bp, Homo sapiens
gcggagtgaggacggtgacagccacgcgcgcgcgtacgcgcccgatgcagcgcggccccgtgaccctagtcggccgctgagaggcgcgcggagtctgggccgctgccgtctaggggtcccgtcccgaggcgtccccggcatctccggcccgaatcccggagtgccgggtcgcgcctgcaccgaaggtcccggctcctgtgccctccctgcagccgtcagggcccgtcccccaactcccctttccgctcaggcagggtcctcgcggcccatgctggccgctggggacccgcgcagcccagaccgttcccgggccggccagccggccaccatggtggccctgaggcctgtgcagcaactccaggggggctaaagggctcagagtgcaggccgtggggcgcgagggtcccgggcctgagccccgcgccatggccggggccatcgcttcccgcatgagcttcagctctctcaagaggaagcaacccaagacgttcaccgtgaggatcgtcaccatggacgccgagatggagttcaattgcgagatgaagtggaaagggaaggacctctttgatttggtgtgccggactctggggctccgagaaacctggttctttggactgcagtacacaatcaaggacacagtggcctggctcaaaatggacaagaaggtactggatcatgatgtttcaaaggaagaaccagtcacctttcacttcttggccaaattttatcctgagaatgctgaagaggagctggttcaggagatcacacaacatttattcttcttacaggtaaagaagcagattttagatgaaaagatctactgccctcctgaggcttctgtgctcctggcttcttacgccgtccaggccaagtatggtgactacgaccccagtgttcacaagcggggatttttggcccaagaggaattgcttccaaaaagggtaataaatctgtatcagatgactccggaaatgtgggaggagagaattactgcttggtacgcagagcaccgaggccgagccagggatgaagctgaaatggaatatctgaagatagctcaggacctggagatgtacggtgtgaactactttgcaatccggaataaaaagggcacagagctgctgcttggagtggatgccctggggcttcacatttatgaccctgagaacagactgacccccaagatctccttcccgtggaatgaaatccgaaacatctcgtacagtgacaaggagtttactattaaaccactggataagaaaattgatgtcttcaagtttaactcctcaaagcttcgtgttaataagctgattctccagctatgtatcgggaaccatgatctatttatgaggagaaggaaagccgattctttggaagttcagcagatgaaagcccaggccagggaggagaaggctagaaagcagatggagcggcagcgcctcgctcgagagaagcagatgagggaggaggctgaacgcacgagggatgagttggagaggaggctgctgcagatgaaagaagaagcaacaatggccaacgaagcactgatgcggtctgaggagacagctgacctgttggctgaaaaggcccagatcaccgaggaggaggcaaaacttctggcccagaaggccgcagaggctgagcaggaaatgcagcgcatcaaggccacagcgattcgcacggaggaggagaagcgcctgatggagcagaaggtgctggaagccgaggtgctggcactgaagatggctgaggagtcagagaggagggccaaagaggcagatcagctgaagcaggacctgcaggaagcacgcgaggcggagcgaagagccaagcagaagctcctggagattgccaccaagcccacgtacccgcccatgaacccaattccagcaccgttgcctcctgacataccaagcttcaacctcattggtgacagcctgtctttcgacttcaaagatactgacatgaagcggctttccatggagatagagaaagaaaaagtggaatacatggaaaagagcaagcatctgcaggagcagctcaatgaactcaagacagaaatcgaggccttgaaactgaaagagagggagacagctctggatattctgcacaatgagaactccgacaggggtggcagcagcaagcacaataccattaaaaagctcaccttgcagagcgccaagtcccgagtggccttctttgaagagctctagcaggtgacccagccaccccaggacctgccacttctcctgctaccgggaccgcgggatggaccagatatcaagagagccatccatagggagctggctgggggtttccgtgggagctccagaactttccccagctgagtgaagagcccagcccctcttatgtgcaattgccttgaactacgaccctgtagagatttctctcatggcgttctagttctctgacctgagtctttgttttaagaagtatttgtcttcctttgtctaatgtgggattcctgactcccttcgtccaaggcaccggtgtgtgtgtgtcttgcactccagagctgacctccaccgcccagcctgggaagtcactgtagggagtgagacactgaagccctgagaagccagtgccatcatccccaccccgcccagggttccggaacattcattcccccaccggtgaggacctggcatgcagcgaagcagcccagcccggcggatcccaggccagcacgcctgccggcttctcatcgtcagggagcccgcccagagctcgtgacgagcaagtgctgggtccccgccaggcaccccgaggcggcgctctggctggcagctggtggggaataggcagggcagctgtggctggggagagactttaggcagaagctgtgatgcaggctgactgccagccgaggggctgggtagtgccgtgcgggagctgatggtacagggcactcgctgtccccctccggccaccctagaccagggtccgagaggcaggcaggagccactcatgtcttccccattgcccgacgcccatagacgctccttcctgtgtggggctggggtactccctggtcgtactgcagtcagcacccgtaacccggctatgaccagggatctgtaagccctgtggctccacaggtgctgcttctcactggcccagactctgagctccaccggcccagtctgcacggcccatctgcttcaccttccctcccagccacgtgccagtggccacagcccacttcccaacccactgttgtacccaggcctcactttgctgttgcccttgtccctcttcgggccctgaattttctgttccctgggggccagccagggccctttgtgcccctcccagcacaggcctgatgcaggtgtccactcacaggtggcgctcacctaggctgtcacaggacccacctccatgccaggcaacagagggccacagaaccacccccacggctcactccttggtctggggccaccttcttgccctttctttttttttttttttttttttccgagatggagtctctctctgtcacccaggtgggagtgtggtggcacaatctcggctcactgcaacctccacctcctgagttcaagcaattctcctgcctcagcctcccaagtagctgggactacaggcatgcaccaccacacttggccaatgttctgtatttttaatagggacggggttttgccatgttagctaggctggtctcaaactcacacctgggattacaggcatgagccactgcacccagccccttcttgccctttcttttctccatggctgatgctgctgtggccagccagggcccttgagatccttccagtttggctgttatgcaaagcaggtgatttgtcttaatcagataaaagatagaggctatgggggcctcaagatttttggagagcagaggtggtctctggcaattccatctggttttgagaaacttagcagctcacagagcacagagatcctgccttcttcctactatcaggctgacctaatggggttgggctgctcggcaactgcttgggtcaccttgccccaaggaaaccagccctgggtgccacccagccacttagggtctacagggtgggactccagacctagagcgtaagtatggatgttgtggccctgtgtcttcctagtgtgacccagccaggagcggaagcttcaggcgtttgtaaagtgaggtctggctctgcctcctccgttttttttttttttctggtttctgtttctgtttttttttttggaaatggagtctcgctctgtcgcccaggcttggagtgcagtgtcacgatctcagctcactgcaacctccgcctcccaggtacaagagattctcctgcctcagcctcccgagtagctgggactacaggcgtgtgccaccatgcctggctaatttttggtatttttagtagagatggggtttcgccatgttagccagactggtctcgaactcctgacctcaggtgatcctcccaccccggctcccgagtagctgggattacaggcacgcacctccacgtccggctaattttgtatttttagtggagacggggtttctccatgtcggtcaggctggtctcgaactcccgacctcaggtgatctgcccacctcggcctcccaaagtgctgggattacaggcatgagccaccgcgcttggccagactgcgtcctttttaagcgaacattttagggcctgggagtttgtcaagtaaggaagtctcaagcccaaagagcagcgtcctgaccatggtggtttcattacgagcccttctgctggctctcaggcagaagccccacagcaccgggaccattcatgaggtcactgcccagctcatgatgtccgtgaggctgtccttttggccagtagccgtgtgcagctgtgtggcacagatggcttcgttcatcctgatcaaggccccacctcagccacagcagtccccccaacctgtgttgtccaccctattattcatgtacctgccaggccctgctagatagcaccccgtggcattacataacacttcatgagtggctgtgtcttgtaattttggggacaggtttctctctttccctctcttttttttgtcaaaagcccagagactgacaaccagctgcagtgtctaagtgttcctcactgacagggtggggcctcaccacccctggagggagcagcgttggcagggagacagcctggcccagtgaccctgggcccaagccagcccctccagggctttcagggaagcgccatccattttcaaagatgtcaaacgtcacttcttcctgtagggcccgagtcctgcctcctatcagggccagatcatagaaggctattttctattctggggaacgattataacttaaatgattgttttaataaaaattctaagctggaaaa

SEQ ID NO: 332191 - DNA, 6082 bp, Homo sapiens
gcggagtgaggacggtgacagccacgcgcgcgcgtacgcgcccgatgcagcgcggccccgtgaccctagtcggccgctgagaggcgcgcggagtctgggccgctgccgtctaggggtcccgtcccgaggcgtccccggcatctccggcccgaatcccggagtgccgggtcgcgcctgcaccgaaggtcccggctcctgtgccctccctgcagccgtcagggcccgtcccccaactcccctttccgctcaggcagggtcctcgcggcccatgctggccgctggggacccgcgcagcccagaccgttcccgggccggccagccggccaccatggtggccctgaggcctgtgcagcaactccaggggggctaaagggctcagagtgcaggccgtggggcgcgagggtcccgggcctgagccccgcgccatggccggggccatcgcttcccgcatgagcttcagctctctcaagaggaagcaacccaagacgttcaccgtgaggatcgtcaccatggacgccgagatggagttcaattgcgagatgaagtggaaagggaaggacctctttgatttggtgtgccggactctggggctccgagaaacctggttctttggactgcagtacacaatcaaggacacagtggcctggctcaaaatggacaagaaggttgggctagaactcgatgaaactggtactggatcatgatgtttcaaaggaagaaccagtcacctttcacttcttggccaaattttatcctgagaatgctgaagaggagctggttcaggagatcacacaacatttattcttcttacaggtaaagaagcagattttagatgaaaagatctactgccctcctgaggcttctgtgctcctggcttcttacgccgtccaggccaagtatggtgactacgaccccagtgttcacaagcggggatttttggcccaagaggaattgcttccaaaaagggtaataaatctgtatcagatgactccggaaatgtgggaggagagaattactgcttggtacgcagagcaccgaggccgagccagggatgaagctgaaatggaatatctgaagatagctcaggacctggagatgtacggtgtgaactactttgcaatccggaataaaaagggcacagagctgctgcttggagtggatgccctggggcttcacatttatgaccctgagaacagactgacccccaagatctccttcccgtggaatgaaatccgaaacatctcgtacagtgacaaggagtttactattaaaccactggataagaaaattgatgtcttcaagtttaactcctcaaagcttcgtgttaataagctgattctccagctatgtatcgggaaccatgatctatttatgaggagaaggaaagccgattctttggaagttcagcagatgaaagcccaggccagggaggagaaggctagaaagcagatggagcggcagcgcctcgctcgagagaagcagatgagggaggaggctgaacgcacgagggatgagttggagaggaggctgctgcagatgaaagaagaagcaacaatggccaacgaagcactgatgcggtctgaggagacagctgacctgttggctgaaaaggcccagatcaccgaggaggaggcaaaacttctggcccagaaggccgcagaggctgagcaggaaatgcagcgcatcaaggccacagcgattcgcacggaggaggagaagcgcctgatggagcagaaggtgctggaagccgaggtgctggcactgaagatggctgaggagtcagagaggagggccaaagaggcagatcagctgaagcaggacctgcaggaagcacgcgaggcggagcgaagagccaagcagaagctcctggagattgccaccaagcccacgtacccgcccatgaacccaattccagcaccgttgcctcctgacataccaagcttcaacctcattggtgacagcctgtctttcgacttcaaagatactgacatgaagcggctttccatggagatagagaaagaaaaagtggaatacatggaaaagagcaagcatctgcaggagcagctcaatgaactcaagacagaaatcgaggccttgaaactgaaagagagggagacagctctggatattctgcacaatgagaactccgacaggggtggcagcagcaagcacaataccattaaaaagcctcaagcccaaggcagaagacctatctgcatttgagccctcaaactcaccttgcagagcgccaagtcccgagtggccttctttgaagagctctagcaggtgacccagccaccccaggacctgccacttctcctgctaccgggaccgcgggatggaccagatatcaagagagccatccatagggagctggctgggggtttccgtgggagctccagaactttccccagctgagtgaagagcccagcccctcttatgtgcaattgccttgaactacgaccctgtagagatttctctcatggcgttctagttctctgacctgagtctttgttttaagaagtatttgtcttcctttgtctaatgtgggattcctgactcccttcgtccaaggcaccggtgtgtgtgtgtcttgcactccagagctgacctccaccgcccagcctgggaagtcactgtagggagtgagacactgaagccctgagaagccagtgccatcatccccaccccgcccagggttccggaacattcattcccccaccggtgaggacctggcatgcagcgaagcagcccagcccggcggatcccaggccagcacgcctgccggcttctcatcgtcagggagcccgcccagagctcgtgacgagcaagtgctgggtccccgccaggcaccccgaggcggcgctctggctggcagctggtggggaataggcagggcagctgtggctggggagagactttaggcagaagctgtgatgcaggctgactgccagccgaggggctgggtagtgccgtgcgggagctgatggtacagggcactcgctgtccccctccggccaccctagaccagggtccgagaggcaggcaggagccactcatgtcttccccattgcccgacgcccatagacgctccttcctgtgtggggctggggtactccctggtcgtactgcagtcagcacccgtaacccggctatgaccagggatctgtaagccctgtggctccacaggtgctgcttctcactggcccagactctgagctccaccggcccagtctgcacggcccatctgcttcaccttccctcccagccacgtgccagtggccacagcccacttcccaacccactgttgtacccaggcctcactttgctgttgcccttgtccctcttcgggccctgaattttctgttccctgggggccagccagggccctttgtgcccctcccagcacaggcctgatgcaggtgtccactcacaggtggcgctcacctaggctgtcacaggacccacctccatgccaggcaacagagggccacagaaccacccccacggctcactccttggtctggggccaccttcttgccctttctttttttttttttttttttttccgagatggagtctctctctgtcacccaggtgggagtgtggtggcacaatctcggctcactgcaacctccacctcctgagttcaagcaattctcctgcctcagcctcccaagtagctgggactacaggcatgcaccaccacacttggccaatgttctgtatttttaatagggacggggttttgccatgttagctaggctggtctcaaactcacacctgggattacaggcatgagccactgcacccagccccttcttgccctttcttttctccatggctgatgctgctgtggccagccagggcccttgagatccttccagtttggctgttatgcaaagcaggtgatttgtcttaatcagataaaagatagaggctatgggggcctcaagatttttggagagcagaggtggtctctggcaattccatctggttttgagaaacttagcagctcacagagcacagagatcctgccttcttcctactatcaggctgacctaatggggttgggctgctcggcaactgcttgggtcaccttgccccaaggaaaccagccctgggtgccacccagccacttagggtctacagggtgggactccagacctagagcgtaagtatggatgttgtggccctgtgtcttcctagtgtgacccagccaggagcggaagcttcaggcgtttgtaaagtgaggtctggctctgcctcctccgttttttttttttttctggtttctgtttctgtttttttttttggaaatggagtctcgctctgtcgcccaggcttggagtgcagtgtcacgatctcagctcactgcaacctccgcctcccaggtacaagagattctcctgcctcagcctcccgagtagctgggactacaggcgtgtgccaccatgcctggctaatttttggtatttttagtagagatggggtttcgccatgttagccagactggtctcgaactcctgacctcaggtgatcctcccaccccggcttcccaaagttctgggattataggcgtgagccaccatgcccggtctcttctcagtcttgaagcccatccctggatttccaccaggagttactttcctcctgacctgtaaatttgttctttaacaatggctgcaggtgggagcatatggtggtttataaaaacgctgtcgggctttgtttccttctttagctgccgtgtctacttctgaagtctgggaagtgccaagccacgcggcctcaagggagctggctggtgtttgagctgtggcagaagcacctggggctccagggagcaggctgggaactgcaggaccttgctcagccaggagcacttccccctccttgaggcaggaatactgaggtgcctccccacagatggagaaggtggagaggaggatgggcctcaggagcatctcaagccccagtagcaggagaaagaaagaaagagatgcctggttttcacagactggttcctgtggctgggatgactgcatccttttttttttttttttgagacggagtttttgcctttgtcgcccaggctggagtgcaatggcgtgatctcggctcaccgcaacctccgcctcccggattcaagcaattctcctgcctcagcctcccgagtagctgggattacaggcacgcacctccacgtccggctaattttgtatttttagtggagacggggtttctccatgtcggtcaggctggtctcgaactcccgacctcaggtgatctgcccacctcggcctcccaaagtgctgggattacaggcatgagccaccgcgcttggccagactgcgtcctttttaagcgaacattttagggcctgggagtttgtcaagtaaggaagtctcaagcccaaagagcagcgtcctgaccatggtggtttcattacgagcccttctgctggctctcaggcagaagccccacagcaccgggaccattcatgaggtcactgcccagctcatgatgtccgtgaggctgtccttttggccagtagccgtgtgcagctgtgtggcacagatggcttcgttcatcctgatcaaggccccacctcagccacagcagtccccccaacctgtgttgtccaccctattattcatgtacctgccaggccctgctagatagcaccccgtggcattacataacacttcatgagtggctgtgtcttgtaattttggggacaggtttctctctttccctctcttttttttgtcaaaagcccagagactgacaaccagctgcagtgtctaagtgttcctcactgacagggtggggcctcaccacccctggagggagcagcgttggcagggagacagcctggcccagtgaccctgggcccaagccagcccctccagggctttcagggaagcgccatccattttcaaagatgtcaaacgtcacttcttcctgtagggcccgagtcctgcctcctatcagggccagatcatagaaggctattttctattctggggaacgattataacttaaatgattgttttaataaaaattctaagctggaaaa

SEQ ID NO: 332192 - DNA, 5931 bp, Homo sapiens
gcggagtgaggacggtgacagccacgcgcgcgcgtacgcgcccgatgcagcgcggccccgtgaccctagtcggccgctgagaggcgcgcggagtctgggccgctgccgtctaggggtcccgtcccgaggcgtccccggcatctccggcccgaatcccggagtgccgggtcgcgcctgcaccgaaggtcccggctcctgtgccctccctgcagccgtcagggcccgtcccccaactcccctttccgctcaggcagggtcctcgcggcccatgctggccgctggggacccgcgcagcccagaccgttcccgggccggccagccggccaccatggtggccctgaggcctgtgcagcaactccaggggggctaaagggctcagagtgcaggccgtggggcgcgagggtcccgggcctgagccccgcgccatggccggggccatcgcttcccgcatgagcttcagctctctcaagaggaagcaacccaagacgttcaccgtgaggatcgtcaccatggacgccgagatggagttcaattgcgaggtactggatcatgatgtttcaaaggaagaaccagtcacctttcacttcttggccaaattttatcctgagaatgctgaagaggagctggttcaggagatcacacaacatttattcttcttacaggtaaagaagcagattttagatgaaaagatctactgccctcctgaggcttctgtgctcctggcttcttacgccgtccaggccaagtatggtgactacgaccccagtgttcacaagcggggatttttggcccaagaggaattgcttccaaaaagggtaataaatctgtatcagatgactccggaaatgtgggaggagagaattactgcttggtacgcagagcaccgaggccgagccagggatgaagctgaaatggaatatctgaagatagctcaggacctggagatgtacggtgtgaactactttgcaatccggaataaaaagggcacagagctgctgcttggagtggatgccctggggcttcacatttatgaccctgagaacagactgacccccaagatctccttcccgtggaatgaaatccgaaacatctcgtacagtgacaaggagtttactattaaaccactggataagaaaattgatgtcttcaagtttaactcctcaaagcttcgtgttaataagctgattctccagctatgtatcgggaaccatgatctatttatgaggagaaggaaagccgattctttggaagttcagcagatgaaagcccaggccagggaggagaaggctagaaagcagatggagcggcagcgcctcgctcgagagaagcagatgagggaggaggctgaacgcacgagggatgagttggagaggaggctgctgcagatgaaagaagaagcaacaatggccaacgaagcactgatgcggtctgaggagacagctgacctgttggctgaaaaggcccagatcaccgaggaggaggcaaaacttctggcccagaaggccgcagaggctgagcaggaaatgcagcgcatcaaggccacagcgattcgcacggaggaggagaagcgcctgatggagcagaaggtgctggaagccgaggtgctggcactgaagatggctgaggagtcagagaggagggccaaagaggcagatcagctgaagcaggacctgcaggaagcacgcgaggcggagcgaagagccaagcagaagctcctggagattgccaccaagcccacgtacccgcccatgaacccaattccagcaccgttgcctcctgacataccaagcttcaacctcattggtgacagcctgtctttcgacttcaaagatactgacatgaagcggctttccatggagatagagaaagaaaaagtggaatacatggaaaagagcaagcatctgcaggagcagctcaatgaactcaagacagaaatcgaggccttgaaactgaaagagagggagacagctctggatattctgcacaatgagaactccgacaggggtggcagcagcaagcacaataccattaaaaagcctcaagcccaaggcagaagacctatctgcatttgagccctcaaactcaccttgcagagcgccaagtcccgagtggccttctttgaagagctctagcaggtgacccagccaccccaggacctgccacttctcctgctaccgggaccgcgggatggaccagatatcaagagagccatccatagggagctggctgggggtttccgtgggagctccagaactttccccagctgagtgaagagcccagcccctcttatgtgcaattgccttgaactacgaccctgtagagatttctctcatggcgttctagttctctgacctgagtctttgttttaagaagtatttgtcttcctttgtctaatgtgggattcctgactcccttcgtccaaggcaccggtgtgtgtgtgtcttgcactccagagctgacctccaccgcccagcctgggaagtcactgtagggagtgagacactgaagccctgagaagccagtgccatcatccccaccccgcccagggttccggaacattcattcccccaccggtgaggacctggcatgcagcgaagcagcccagcccggcggatcccaggccagcacgcctgccggcttctcatcgtcagggagcccgcccagagctcgtgacgagcaagtgctgggtccccgccaggcaccccgaggcggcgctctggctggcagctggtggggaataggcagggcagctgtggctggggagagactttaggcagaagctgtgatgcaggctgactgccagccgaggggctgggtagtgccgtgcgggagctgatggtacagggcactcgctgtccccctccggccaccctagaccagggtccgagaggcaggcaggagccactcatgtcttccccattgcccgacgcccatagacgctccttcctgtgtggggctggggtactccctggtcgtactgcagtcagcacccgtaacccggctatgaccagggatctgtaagccctgtggctccacaggtgctgcttctcactggcccagactctgagctccaccggcccagtctgcacggcccatctgcttcaccttccctcccagccacgtgccagtggccacagcccacttcccaacccactgttgtacccaggcctcactttgctgttgcccttgtccctcttcgggccctgaattttctgttccctgggggccagccagggccctttgtgcccctcccagcacaggcctgatgcaggtgtccactcacaggtggcgctcacctaggctgtcacaggacccacctccatgccaggcaacagagggccacagaaccacccccacggctcactccttggtctggggccaccttcttgccctttctttttttttttttttttttttccgagatggagtctctctctgtcacccaggtgggagtgtggtggcacaatctcggctcactgcaacctccacctcctgagttcaagcaattctcctgcctcagcctcccaagtagctgggactacaggcatgcaccaccacacttggccaatgttctgtatttttaatagggacggggttttgccatgttagctaggctggtctcaaactcacacctgggattacaggcatgagccactgcacccagccccttcttgccctttcttttctccatggctgatgctgctgtggccagccagggcccttgagatccttccagtttggctgttatgcaaagcaggtgatttgtcttaatcagataaaagatagaggctatgggggcctcaagatttttggagagcagaggtggtctctggcaattccatctggttttgagaaacttagcagctcacagagcacagagatcctgccttcttcctactatcaggctgacctaatggggttgggctgctcggcaactgcttgggtcaccttgccccaaggaaaccagccctgggtgccacccagccacttagggtctacagggtgggactccagacctagagcgtaagtatggatgttgtggccctgtgtcttcctagtgtgacccagccaggagcggaagcttcaggcgtttgtaaagtgaggtctggctctgcctcctccgttttttttttttttctggtttctgtttctgtttttttttttggaaatggagtctcgctctgtcgcccaggcttggagtgcagtgtcacgatctcagctcactgcaacctccgcctcccaggtacaagagattctcctgcctcagcctcccgagtagctgggactacaggcgtgtgccaccatgcctggctaatttttggtatttttagtagagatggggtttcgccatgttagccagactggtctcgaactcctgacctcaggtgatcctcccaccccggcttcccaaagttctgggattataggcgtgagccaccatgcccggtctcttctcagtcttgaagcccatccctggatttccaccaggagttactttcctcctgacctgtaaatttgttctttaacaatggctgcaggtgggagcatatggtggtttataaaaacgctgtcgggctttgtttccttctttagctgccgtgtctacttctgaagtctgggaagtgccaagccacgcggcctcaagggagctggctggtgtttgagctgtggcagaagcacctggggctccagggagcaggctgggaactgcaggaccttgctcagccaggagcacttccccctccttgaggcaggaatactgaggtgcctccccacagatggagaaggtggagaggaggatgggcctcaggagcatctcaagccccagtagcaggagaaagaaagaaagagatgcctggttttcacagactggttcctgtggctgggatgactgcatccttttttttttttttttgagacggagtttttgcctttgtcgcccaggctggagtgcaatggcgtgatctcggctcaccgcaacctccgcctcccggattcaagcaattctcctgcctcagcctcccgagtagctgggattacaggcacgcacctccacgtccggctaattttgtatttttagtggagacggggtttctccatgtcggtcaggctggtctcgaactcccgacctcaggtgatctgcccacctcggcctcccaaagtgctgggattacaggcatgagccaccgcgcttggccagactgcgtcctttttaagcgaacattttagggcctgggagtttgtcaagtaaggaagtctcaagcccaaagagcagcgtcctgaccatggtggtttcattacgagcccttctgctggctctcaggcagaagccccacagcaccgggaccattcatgaggtcactgcccagctcatgatgtccgtgaggctgtccttttggccagtagccgtgtgcagctgtgtggcacagatggcttcgttcatcctgatcaaggccccacctcagccacagcagtccccccaacctgtgttgtccaccctattattcatgtacctgccaggccctgctagatagcaccccgtggcattacataacacttcatgagtggctgtgtcttgtaattttggggacaggtttctctctttccctctcttttttttgtcaaaagcccagagactgacaaccagctgcagtgtctaagtgttcctcactgacagggtggggcctcaccacccctggagggagcagcgttggcagggagacagcctggcccagtgaccctgggcccaagccagcccctccagggctttcagggaagcgccatccattttcaaagatgtcaaacgtcacttcttcctgtagggcccgagtcctgcctcctatcagggccagatcatagaaggctattttctattctggggaacgattataacttaaatgattgttttaataaaaattctaagctggaaaa

SEQ ID NO: 332193 - DNA, 5808 bp, Homo sapiens
gcggagtgaggacggtgacagccacgcgcgcgcgtacgcgcccgatgcagcgcggccccgtgaccctagtcggccgctgagaggcgcgcggagtctgggccgctgccgtctaggggtcccgtcccgaggcgtccccggcatctccggcccgaatcccggagtgccgggtcgcgcctgcaccgaaggtcccggctcctgtgccctccctgcagccgtcagggcccgtcccccaactcccctttccgctcaggcagggtcctcgcggcccatgctggccgctggggacccgcgcagcccagaccgttcccgggccggccagccggccaccatggtggccctgaggcctgtgcagcaactccaggggggctaaagggctcagagtgcaggccgtggggcgcgagggtcccgggcctgagccccgcgccatggccggggccatcgcttcccgcatgagcttcagctctctcaagaggaagcaacccaagacgttcaccgtgaggatcgtcaccatggacgccgagatggagttcaattgcgaggtaaagaagcagattttagatgaaaagatctactgccctcctgaggcttctgtgctcctggcttcttacgccgtccaggccaagtatggtgactacgaccccagtgttcacaagcggggatttttggcccaagaggaattgcttccaaaaagggtaataaatctgtatcagatgactccggaaatgtgggaggagagaattactgcttggtacgcagagcaccgaggccgagccagggatgaagctgaaatggaatatctgaagatagctcaggacctggagatgtacggtgtgaactactttgcaatccggaataaaaagggcacagagctgctgcttggagtggatgccctggggcttcacatttatgaccctgagaacagactgacccccaagatctccttcccgtggaatgaaatccgaaacatctcgtacagtgacaaggagtttactattaaaccactggataagaaaattgatgtcttcaagtttaactcctcaaagcttcgtgttaataagctgattctccagctatgtatcgggaaccatgatctatttatgaggagaaggaaagccgattctttggaagttcagcagatgaaagcccaggccagggaggagaaggctagaaagcagatggagcggcagcgcctcgctcgagagaagcagatgagggaggaggctgaacgcacgagggatgagttggagaggaggctgctgcagatgaaagaagaagcaacaatggccaacgaagcactgatgcggtctgaggagacagctgacctgttggctgaaaaggcccagatcaccgaggaggaggcaaaacttctggcccagaaggccgcagaggctgagcaggaaatgcagcgcatcaaggccacagcgattcgcacggaggaggagaagcgcctgatggagcagaaggtgctggaagccgaggtgctggcactgaagatggctgaggagtcagagaggagggccaaagaggcagatcagctgaagcaggacctgcaggaagcacgcgaggcggagcgaagagccaagcagaagctcctggagattgccaccaagcccacgtacccgcccatgaacccaattccagcaccgttgcctcctgacataccaagcttcaacctcattggtgacagcctgtctttcgacttcaaagatactgacatgaagcggctttccatggagatagagaaagaaaaagtggaatacatggaaaagagcaagcatctgcaggagcagctcaatgaactcaagacagaaatcgaggccttgaaactgaaagagagggagacagctctggatattctgcacaatgagaactccgacaggggtggcagcagcaagcacaataccattaaaaagcctcaagcccaaggcagaagacctatctgcatttgagccctcaaactcaccttgcagagcgccaagtcccgagtggccttctttgaagagctctagcaggtgacccagccaccccaggacctgccacttctcctgctaccgggaccgcgggatggaccagatatcaagagagccatccatagggagctggctgggggtttccgtgggagctccagaactttccccagctgagtgaagagcccagcccctcttatgtgcaattgccttgaactacgaccctgtagagatttctctcatggcgttctagttctctgacctgagtctttgttttaagaagtatttgtcttcctttgtctaatgtgggattcctgactcccttcgtccaaggcaccggtgtgtgtgtgtcttgcactccagagctgacctccaccgcccagcctgggaagtcactgtagggagtgagacactgaagccctgagaagccagtgccatcatccccaccccgcccagggttccggaacattcattcccccaccggtgaggacctggcatgcagcgaagcagcccagcccggcggatcccaggccagcacgcctgccggcttctcatcgtcagggagcccgcccagagctcgtgacgagcaagtgctgggtccccgccaggcaccccgaggcggcgctctggctggcagctggtggggaataggcagggcagctgtggctggggagagactttaggcagaagctgtgatgcaggctgactgccagccgaggggctgggtagtgccgtgcgggagctgatggtacagggcactcgctgtccccctccggccaccctagaccagggtccgagaggcaggcaggagccactcatgtcttccccattgcccgacgcccatagacgctccttcctgtgtggggctggggtactccctggtcgtactgcagtcagcacccgtaacccggctatgaccagggatctgtaagccctgtggctccacaggtgctgcttctcactggcccagactctgagctccaccggcccagtctgcacggcccatctgcttcaccttccctcccagccacgtgccagtggccacagcccacttcccaacccactgttgtacccaggcctcactttgctgttgcccttgtccctcttcgggccctgaattttctgttccctgggggccagccagggccctttgtgcccctcccagcacaggcctgatgcaggtgtccactcacaggtggcgctcacctaggctgtcacaggacccacctccatgccaggcaacagagggccacagaaccacccccacggctcactccttggtctggggccaccttcttgccctttctttttttttttttttttttttccgagatggagtctctctctgtcacccaggtgggagtgtggtggcacaatctcggctcactgcaacctccacctcctgagttcaagcaattctcctgcctcagcctcccaagtagctgggactacaggcatgcaccaccacacttggccaatgttctgtatttttaatagggacggggttttgccatgttagctaggctggtctcaaactcacacctgggattacaggcatgagccactgcacccagccccttcttgccctttcttttctccatggctgatgctgctgtggccagccagggcccttgagatccttccagtttggctgttatgcaaagcaggtgatttgtcttaatcagataaaagatagaggctatgggggcctcaagatttttggagagcagaggtggtctctggcaattccatctggttttgagaaacttagcagctcacagagcacagagatcctgccttcttcctactatcaggctgacctaatggggttgggctgctcggcaactgcttgggtcaccttgccccaaggaaaccagccctgggtgccacccagccacttagggtctacagggtgggactccagacctagagcgtaagtatggatgttgtggccctgtgtcttcctagtgtgacccagccaggagcggaagcttcaggcgtttgtaaagtgaggtctggctctgcctcctccgttttttttttttttctggtttctgtttctgtttttttttttggaaatggagtctcgctctgtcgcccaggcttggagtgcagtgtcacgatctcagctcactgcaacctccgcctcccaggtacaagagattctcctgcctcagcctcccgagtagctgggactacaggcgtgtgccaccatgcctggctaatttttggtatttttagtagagatggggtttcgccatgttagccagactggtctcgaactcctgacctcaggtgatcctcccaccccggcttcccaaagttctgggattataggcgtgagccaccatgcccggtctcttctcagtcttgaagcccatccctggatttccaccaggagttactttcctcctgacctgtaaatttgttctttaacaatggctgcaggtgggagcatatggtggtttataaaaacgctgtcgggctttgtttccttctttagctgccgtgtctacttctgaagtctgggaagtgccaagccacgcggcctcaagggagctggctggtgtttgagctgtggcagaagcacctggggctccagggagcaggctgggaactgcaggaccttgctcagccaggagcacttccccctccttgaggcaggaatactgaggtgcctccccacagatggagaaggtggagaggaggatgggcctcaggagcatctcaagccccagtagcaggagaaagaaagaaagagatgcctggttttcacagactggttcctgtggctgggatgactgcatccttttttttttttttttgagacggagtttttgcctttgtcgcccaggctggagtgcaatggcgtgatctcggctcaccgcaacctccgcctcccggattcaagcaattctcctgcctcagcctcccgagtagctgggattacaggcacgcacctccacgtccggctaattttgtatttttagtggagacggggtttctccatgtcggtcaggctggtctcgaactcccgacctcaggtgatctgcccacctcggcctcccaaagtgctgggattacaggcatgagccaccgcgcttggccagactgcgtcctttttaagcgaacattttagggcctgggagtttgtcaagtaaggaagtctcaagcccaaagagcagcgtcctgaccatggtggtttcattacgagcccttctgctggctctcaggcagaagccccacagcaccgggaccattcatgaggtcactgcccagctcatgatgtccgtgaggctgtccttttggccagtagccgtgtgcagctgtgtggcacagatggcttcgttcatcctgatcaaggccccacctcagccacagcagtccccccaacctgtgttgtccaccctattattcatgtacctgccaggccctgctagatagcaccccgtggcattacataacacttcatgagtggctgtgtcttgtaattttggggacaggtttctctctttccctctcttttttttgtcaaaagcccagagactgacaaccagctgcagtgtctaagtgttcctcactgacagggtggggcctcaccacccctggagggagcagcgttggcagggagacagcctggcccagtgaccctgggcccaagccagcccctccagggctttcagggaagcgccatccattttcaaagatgtcaaacgtcacttcttcctgtagggcccgagtcctgcctcctatcagggccagatcatagaaggctattttctattctggggaacgattataacttaaatgattgttttaataaaaattctaagctggaaaa

SEQ ID NO: 332194 - DNA, 5675 bp, Homo sapiens
gcggagtgaggacggtgacagccacgcgcgcgcgtacgcgcccgatgcagcgcggccccgtgaccctagtcggccgctgagaggcgcgcggagtctgggccgctgccgtctaggggtcccgtcccgaggcgtccccggcatctccggcccgaatcccggagtgccgggtcgcgcctgcaccgaaggtcccggctcctgtgccctccctgcagccgtcagggacctctttgatttggtgtgccggactctggggctccgagaaacctggttctttggactgcagtacacaatcaaggacacagtggcctggctcaaaatggacaagaaggtactggatcatgatgtttcaaaggaagaaccagtcacctttcacttcttggccaaattttatcctgagaatgctgaagaggagctggttcaggagatcacacaacatttattcttcttacaggtaaagaagcagattttagatgaaaagatctactgccctcctgaggcttctgtgctcctggcttcttacgccgtccaggccaagtatggtgactacgaccccagtgttcacaagcggggatttttggcccaagaggaattgcttccaaaaagggtaataaatctgtatcagatgactccggaaatgtgggaggagagaattactgcttggtacgcagagcaccgaggccgagccagggatgaagctgaaatggaatatctgaagatagctcaggacctggagatgtacggtgtgaactactttgcaatccggaataaaaagggcacagagctgctgcttggagtggatgccctggggcttcacatttatgaccctgagaacagactgacccccaagatctccttcccgtggaatgaaatccgaaacatctcgtacagtgacaaggagtttactattaaaccactggataagaaaattgatgtcttcaagtttaactcctcaaagcttcgtgttaataagctgattctccagctatgtatcgggaaccatgatctatttatgaggagaaggaaagccgattctttggaagttcagcagatgaaagcccaggccagggaggagaaggctagaaagcagatggagcggcagcgcctcgctcgagagaagcagatgagggaggaggctgaacgcacgagggatgagttggagaggaggctgctgcagatgaaagaagaagcaacaatggccaacgaagcactgatgcggtctgaggagacagctgacctgttggctgaaaaggcccagatcaccgaggaggaggcaaaacttctggcccagaaggccgcagaggctgagcaggaaatgcagcgcatcaaggccacagcgattcgcacggaggaggagaagcgcctgatggagcagaaggtgctggaagccgaggtgctggcactgaagatggctgaggagtcagagaggagggccaaagaggcagatcagctgaagcaggacctgcaggaagcacgcgaggcggagcgaagagccaagcagaagctcctggagattgccaccaagcccacgtacccgcccatgaacccaattccagcaccgttgcctcctgacataccaagcttcaacctcattggtgacagcctgtctttcgacttcaaagatactgacatgaagcggctttccatggagatagagaaagaaaaagtggaatacatggaaaagagcaagcatctgcaggagcagctcaatgaactcaagacagaaatcgaggccttgaaactgaaagagagggagacagctctggatattctgcacaatgagaactccgacaggggtggcagcagcaagcacaataccattaaaaagctcaccttgcagagcgccaagtcccgagtggccttctttgaagagctctagcaggtgacccagccaccccaggacctgccacttctcctgctaccgggaccgcgggatggaccagatatcaagagagccatccatagggagctggctgggggtttccgtgggagctccagaactttccccagctgagtgaagagcccagcccctcttatgtgcaattgccttgaactacgaccctgtagagatttctctcatggcgttctagttctctgacctgagtctttgttttaagaagtatttgtcttcctttgtctaatgtgggattcctgactcccttcgtccaaggcaccggtgtgtgtgtgtcttgcactccagagctgacctccaccgcccagcctgggaagtcactgtagggagtgagacactgaagccctgagaagccagtgccatcatccccaccccgcccagggttccggaacattcattcccccaccggtgaggacctggcatgcagcgaagcagcccagcccggcggatcccaggccagcacgcctgccggcttctcatcgtcagggagcccgcccagagctcgtgacgagcaagtgctgggtccccgccaggcaccccgaggcggcgctctggctggcagctggtggggaataggcagggcagctgtggctggggagagactttaggcagaagctgtgatgcaggctgactgccagccgaggggctgggtagtgccgtgcgggagctgatggtacagggcactcgctgtccccctccggccaccctagaccagggtccgagaggcaggcaggagccactcatgtcttccccattgcccgacgcccatagacgctccttcctgtgtggggctggggtactccctggtcgtactgcagtcagcacccgtaacccggctatgaccagggatctgtaagccctgtggctccacaggtgctgcttctcactggcccagactctgagctccaccggcccagtctgcacggcccatctgcttcaccttccctcccagccacgtgccagtggccacagcccacttcccaacccactgttgtacccaggcctcactttgctgttgcccttgtccctcttcgggccctgaattttctgttccctgggggccagccagggccctttgtgcccctcccagcacaggcctgatgcaggtgtccactcacaggtggcgctcacctaggctgtcacaggacccacctccatgccaggcaacagagggccacagaaccacccccacggctcactccttggtctggggccaccttcttgccctttctttttttttttttttttttttccgagatggagtctctctctgtcacccaggtgggagtgtggtggcacaatctcggctcactgcaacctccacctcctgagttcaagcaattctcctgcctcagcctcccaagtagctgggactacaggcatgcaccaccacacttggccaatgttctgtatttttaatagggacggggttttgccatgttagctaggctggtctcaaactcacacctgggattacaggcatgagccactgcacccagccccttcttgccctttcttttctccatggctgatgctgctgtggccagccagggcccttgagatccttccagtttggctgttatgcaaagcaggtgatttgtcttaatcagataaaagatagaggctatgggggcctcaagatttttggagagcagaggtggtctctggcaattccatctggttttgagaaacttagcagctcacagagcacagagatcctgccttcttcctactatcaggctgacctaatggggttgggctgctcggcaactgcttgggtcaccttgccccaaggaaaccagccctgggtgccacccagccacttagggtctacagggtgggactccagacctagagcgtaagtatggatgttgtggccctgtgtcttcctagtgtgacccagccaggagcggaagcttcaggcgtttgtaaagtgaggtctggctctgcctcctccgttttttttttttttctggtttctgtttctgtttttttttttggaaatggagtctcgctctgtcgcccaggcttggagtgcagtgtcacgatctcagctcactgcaacctccgcctcccaggtacaagagattctcctgcctcagcctcccgagtagctgggactacaggcgtgtgccaccatgcctggctaatttttggtatttttagtagagatggggtttcgccatgttagccagactggtctcgaactcctgacctcaggtgatcctcccaccccggcttcccaaagttctgggattataggcgtgagccaccatgcccggtctcttctcagtcttgaagcccatccctggatttccaccaggagttactttcctcctgacctgtaaatttgttctttaacaatggctgcaggtgggagcatatggtggtttataaaaacgctgtcgggctttgtttccttctttagctgccgtgtctacttctgaagtctgggaagtgccaagccacgcggcctcaagggagctggctggtgtttgagctgtggcagaagcacctggggctccagggagcaggctgggaactgcaggaccttgctcagccaggagcacttccccctccttgaggcaggaatactgaggtgcctccccacagatggagaaggtggagaggaggatgggcctcaggagcatctcaagccccagtagcaggagaaagaaagaaagagatgcctggttttcacagactggttcctgtggctgggatgactgcatccttttttttttttttttgagacggagtttttgcctttgtcgcccaggctggagtgcaatggcgtgatctcggctcaccgcaacctccgcctcccggattcaagcaattctcctgcctcagcctcccgagtagctgggattacaggcacgcacctccacgtccggctaattttgtatttttagtggagacggggtttctccatgtcggtcaggctggtctcgaactcccgacctcaggtgatctgcccacctcggcctcccaaagtgctgggattacaggcatgagccaccgcgcttggccagactgcgtcctttttaagcgaacattttagggcctgggagtttgtcaagtaaggaagtctcaagcccaaagagcagcgtcctgaccatggtggtttcattacgagcccttctgctggctctcaggcagaagccccacagcaccgggaccattcatgaggtcactgcccagctcatgatgtccgtgaggctgtccttttggccagtagccgtgtgcagctgtgtggcacagatggcttcgttcatcctgatcaaggccccacctcagccacagcagtccccccaacctgtgttgtccaccctattattcatgtacctgccaggccctgctagatagcaccccgtggcattacataacacttcatgagtggctgtgtcttgtaattttggggacaggtttctctctttccctctcttttttttgtcaaaagcccagagactgacaaccagctgcagtgtctaagtgttcctcactgacagggtggggcctcaccacccctggagggagcagcgttggcagggagacagcctggcccagtgaccctgggcccaagccagcccctccagggctttcagggaagcgccatccattttcaaagatgtcaaacgtcacttcttcctgtagggcccgagtcctgcctcctatcagggccagatcatagaaggctattttctattctggggaacgattataacttaaatgattgttttaataaaaattctaagctggaaaa

SEQ ID NO: 332195 - DNA, 5085 bp, Homo sapiens
gcggagtgaggacggtgacagccacgcgcgcgcgtacgcgcccgatgcagcgcggccccgtgaccctagtcggccgctgagaggcgcgcggagtctgggccgctgccgtctaggggtcccgtcccgaggcgtccccggcatctccggcccgaatcccggagtgccgggtcgcgcctgcaccgaaggtcccggctcctgtgccctccctgcagccgtcagggcccgtcccccaactcccctttccgctcaggcagggtcctcgcggcccatgctggccgctggggacccgcgcagcccagaccgttcccgggccggccagccggccaccatggtggccctgaggcctgtgcagcaactccaggggggctaaagggctcagagtgcaggccgtggggcgcgagggtcccgggcctgagccccgcgccatggccggggccatcgcttcccgcatgagcttcagctctctcaagaggaagcaacccaagacgttcaccgtgaggatcgtcaccatggacgccgagatggagttcaattgcgagatgaagtggaaagggaaggacctctttgatttggtgtgccggactctggggctccgagaaacctggttctttggactgcagtacacaatcaaggacacagtggcctggctcaaaatggacaagaaggtactggatcatgatgtttcaaaggaagaaccagtcacctttcacttcttggccaaattttatcctgagaatgctgaagaggagctggttcaggagatcacacaacatttattcttcttacaggtaaagaagcagattttagatgaaaagatctactgccctcctgaggcttctgtgctcctggcttcttacgccgtccaggccaagtatggtgactacgaccccagtgttcacaagcggggatttttggcccaagaggaattgcttccaaaaagggtaataaatctgtatcagatgactccggaaatgtgggaggagagaattactgcttggtacgcagagcaccgaggccgagccagggatgaagctgaaatggaatatctgaagatagctcaggacctggagatgtacggtgtgaactactttgcaatccggaataaaaagggcacagagctgctgcttggagtggatgccctggggcttcacatttatgaccctgagaacagactgacccccaagatctccttcccgtggaatgaaatccgaaacatctcgtacagtgacaaggagctcaccttgcagagcgccaagtcccgagtggccttctttgaagagctctagcaggtgacccagccaccccaggacctgccacttctcctgctaccgggaccgcgggatggaccagatatcaagagagccatccatagggagctggctgggggtttccgtgggagctccagaactttccccagctgagtgaagagcccagcccctcttatgtgcaattgccttgaactacgaccctgtagagatttctctcatggcgttctagttctctgacctgagtctttgttttaagaagtatttgtcttcctttgtctaatgtgggattcctgactcccttcgtccaaggcaccggtgtgtgtgtgtcttgcactccagagctgacctccaccgcccagcctgggaagtcactgtagggagtgagacactgaagccctgagaagccagtgccatcatccccaccccgcccagggttccggaacattcattcccccaccggtgaggacctggcatgcagcgaagcagcccagcccggcggatcccaggccagcacgcctgccggcttctcatcgtcagggagcccgcccagagctcgtgacgagcaagtgctgggtccccgccaggcaccccgaggcggcgctctggctggcagctggtggggaataggcagggcagctgtggctggggagagactttaggcagaagctgtgatgcaggctgactgccagccgaggggctgggtagtgccgtgcgggagctgatggtacagggcactcgctgtccccctccggccaccctagaccagggtccgagaggcaggcaggagccactcatgtcttccccattgcccgacgcccatagacgctccttcctgtgtggggctggggtactccctggtcgtactgcagtcagcacccgtaacccggctatgaccagggatctgtaagccctgtggctccacaggtgctgcttctcactggcccagactctgagctccaccggcccagtctgcacggcccatctgcttcaccttccctcccagccacgtgccagtggccacagcccacttcccaacccactgttgtacccaggcctcactttgctgttgcccttgtccctcttcgggccctgaattttctgttccctgggggccagccagggccctttgtgcccctcccagcacaggcctgatgcaggtgtccactcacaggtggcgctcacctaggctgtcacaggacccacctccatgccaggcaacagagggccacagaaccacccccacggctcactccttggtctggggccaccttcttgccctttctttttttttttttttttttttccgagatggagtctctctctgtcacccaggtgggagtgtggtggcacaatctcggctcactgcaacctccacctcctgagttcaagcaattctcctgcctcagcctcccaagtagctgggactacaggcatgcaccaccacacttggccaatgttctgtatttttaatagggacggggttttgccatgttagctaggctggtctcaaactcacacctgggattacaggcatgagccactgcacccagccccttcttgccctttcttttctccatggctgatgctgctgtggccagccagggcccttgagatccttccagtttggctgttatgcaaagcaggtgatttgtcttaatcagataaaagatagaggctatgggggcctcaagatttttggagagcagaggtggtctctggcaattccatctggttttgagaaacttagcagctcacagagcacagagatcctgccttcttcctactatcaggctgacctaatggggttgggctgctcggcaactgcttgggtcaccttgccccaaggaaaccagccctgggtgccacccagccacttagggtctacagggtgggactccagacctagagcgtaagtatggatgttgtggccctgtgtcttcctagtgtgacccagccaggagcggaagcttcaggcgtttgtaaagtgaggtctggctctgcctcctccgttttttttttttttctggtttctgtttctgtttttttttttggaaatggagtctcgctctgtcgcccaggcttggagtgcagtgtcacgatctcagctcactgcaacctccgcctcccaggtacaagagattctcctgcctcagcctcccgagtagctgggactacaggcgtgtgccaccatgcctggctaatttttggtatttttagtagagatggggtttcgccatgttagccagactggtctcgaactcctgacctcaggtgatcctcccaccccggcttcccaaagttctgggattataggcgtgagccaccatgcccggtctcttctcagtcttgaagcccatccctggatttccaccaggagttactttcctcctgacctgtaaatttgttctttaacaatggctgcaggtgggagcatatggtggtttataaaaacgctgtcgggctttgtttccttctttagctgccgtgtctacttctgaagtctgggaagtgccaagccacgcggcctcaagggagctggctggtgtttgagctgtggcagaagcacctggggctccagggagcaggctgggaactgcaggaccttgctcagccaggagcacttccccctccttgaggcaggaatactgaggtgcctccccacagatggagaaggtggagaggaggatgggcctcaggagcatctcaagccccagtagcaggagaaagaaagaaagagatgcctggttttcacagactggttcctgtggctgggatgactgcatccttttttttttttttttgagacggagtttttgcctttgtcgcccaggctggagtgcaatggcgtgatctcggctcaccgcaacctccgcctcccggattcaagcaattctcctgcctcagcctcccgagtagctgggattacaggcacgcacctccacgtccggctaattttgtatttttagtggagacggggtttctccatgtcggtcaggctggtctcgaactcccgacctcaggtgatctgcccacctcggcctcccaaagtgctgggattacaggcatgagccaccgcgcttggccagactgcgtcctttttaagcgaacattttagggcctgggagtttgtcaagtaaggaagtctcaagcccaaagagcagcgtcctgaccatggtggtttcattacgagcccttctgctggctctcaggcagaagccccacagcaccgggaccattcatgaggtcactgcccagctcatgatgtccgtgaggctgtccttttggccagtagccgtgtgcagctgtgtggcacagatggcttcgttcatcctgatcaaggccccacctcagccacagcagtccccccaacctgtgttgtccaccctattattcatgtacctgccaggccctgctagatagcaccccgtggcattacataacacttcatgagtggctgtgtcttgtaattttggggacaggtttctctctttccctctcttttttttgtcaaaagcccagagactgacaaccagctgcagtgtctaagtgttcctcactgacagggtggggcctcaccacccctggagggagcagcgttggcagggagacagcctggcccagtgaccctgggcccaagccagcccctccagggctttcagggaagcgccatccattttcaaagatgtcaaacgtcacttcttcctgtagggcccgagtcctgcctcctatcagggccagatcatagaaggctattttctattctggggaacgattataacttaaatgattgttttaataaaaattctaagctggaaaa

SEQ ID NO: 332196 - DNA, 4722 bp, Homo sapiens
gcggagtgaggacggtgacagccacgcgcgcgcgtacgcgcccgatgcagcgcggccccgtgaccctagtcggccgctgagaggcgcgcggagtctgggccgctgccgtctaggggtcccgtcccgaggcgtccccggcatctccggcccgaatcccggagtgccgggtcgcgcctgcaccgaaggtcccggctcctgtgccctccctgcagccgtcagggcccgtcccccaactcccctttccgctcaggcagggtcctcgcggcccatgctggccgctggggacccgcgcagcccagaccgttcccgggccggccagccggccaccatggtggccctgaggcctgtgcagcaactccaggggggctaaagggctcagagtgcaggccgtggggcgcgagggtcccgggcctgagccccgcgccatggccggggccatcgcttcccgcatgagcttcagctctctcaagaggaagcaacccaagacgttcaccgtgaggatcgtcaccatggacgccgagatggagttcaattgcgagatgaagtggaaagggaaggacctctttgatttggtgtgccggactctggggctccgagaaacctggttctttggactgcagtacacaatcaaggacacagtggcctggctcaaaatggacaagaaggtactggatcatgatgtttcaaaggaagaaccagtcacctttcacttcttggccaaattttatcctgagaatgctgaagaggagctggttcaggagatcacacaacatttattcttcttacaggtaaagaagcagattttagatgaaaagatctactgccctcctgaggcttctgtgctcctggcttcttacgccgtccaggccaagctcaccttgcagagcgccaagtcccgagtggccttctttgaagagctctagcaggtgacccagccaccccaggacctgccacttctcctgctaccgggaccgcgggatggaccagatatcaagagagccatccatagggagctggctgggggtttccgtgggagctccagaactttccccagctgagtgaagagcccagcccctcttatgtgcaattgccttgaactacgaccctgtagagatttctctcatggcgttctagttctctgacctgagtctttgttttaagaagtatttgtcttcctttgtctaatgtgggattcctgactcccttcgtccaaggcaccggtgtgtgtgtgtcttgcactccagagctgacctccaccgcccagcctgggaagtcactgtagggagtgagacactgaagccctgagaagccagtgccatcatccccaccccgcccagggttccggaacattcattcccccaccggtgaggacctggcatgcagcgaagcagcccagcccggcggatcccaggccagcacgcctgccggcttctcatcgtcagggagcccgcccagagctcgtgacgagcaagtgctgggtccccgccaggcaccccgaggcggcgctctggctggcagctggtggggaataggcagggcagctgtggctggggagagactttaggcagaagctgtgatgcaggctgactgccagccgaggggctgggtagtgccgtgcgggagctgatggtacagggcactcgctgtccccctccggccaccctagaccagggtccgagaggcaggcaggagccactcatgtcttccccattgcccgacgcccatagacgctccttcctgtgtggggctggggtactccctggtcgtactgcagtcagcacccgtaacccggctatgaccagggatctgtaagccctgtggctccacaggtgctgcttctcactggcccagactctgagctccaccggcccagtctgcacggcccatctgcttcaccttccctcccagccacgtgccagtggccacagcccacttcccaacccactgttgtacccaggcctcactttgctgttgcccttgtccctcttcgggccctgaattttctgttccctgggggccagccagggccctttgtgcccctcccagcacaggcctgatgcaggtgtccactcacaggtggcgctcacctaggctgtcacaggacccacctccatgccaggcaacagagggccacagaaccacccccacggctcactccttggtctggggccaccttcttgccctttctttttttttttttttttttttccgagatggagtctctctctgtcacccaggtgggagtgtggtggcacaatctcggctcactgcaacctccacctcctgagttcaagcaattctcctgcctcagcctcccaagtagctgggactacaggcatgcaccaccacacttggccaatgttctgtatttttaatagggacggggttttgccatgttagctaggctggtctcaaactcacacctgggattacaggcatgagccactgcacccagccccttcttgccctttcttttctccatggctgatgctgctgtggccagccagggcccttgagatccttccagtttggctgttatgcaaagcaggtgatttgtcttaatcagataaaagatagaggctatgggggcctcaagatttttggagagcagaggtggtctctggcaattccatctggttttgagaaacttagcagctcacagagcacagagatcctgccttcttcctactatcaggctgacctaatggggttgggctgctcggcaactgcttgggtcaccttgccccaaggaaaccagccctgggtgccacccagccacttagggtctacagggtgggactccagacctagagcgtaagtatggatgttgtggccctgtgtcttcctagtgtgacccagccaggagcggaagcttcaggcgtttgtaaagtgaggtctggctctgcctcctccgttttttttttttttctggtttctgtttctgtttttttttttggaaatggagtctcgctctgtcgcccaggcttggagtgcagtgtcacgatctcagctcactgcaacctccgcctcccaggtacaagagattctcctgcctcagcctcccgagtagctgggactacaggcgtgtgccaccatgcctggctaatttttggtatttttagtagagatggggtttcgccatgttagccagactggtctcgaactcctgacctcaggtgatcctcccaccccggcttcccaaagttctgggattataggcgtgagccaccatgcccggtctcttctcagtcttgaagcccatccctggatttccaccaggagttactttcctcctgacctgtaaatttgttctttaacaatggctgcaggtgggagcatatggtggtttataaaaacgctgtcgggctttgtttccttctttagctgccgtgtctacttctgaagtctgggaagtgccaagccacgcggcctcaagggagctggctggtgtttgagctgtggcagaagcacctggggctccagggagcaggctgggaactgcaggaccttgctcagccaggagcacttccccctccttgaggcaggaatactgaggtgcctccccacagatggagaaggtggagaggaggatgggcctcaggagcatctcaagccccagtagcaggagaaagaaagaaagagatgcctggttttcacagactggttcctgtggctgggatgactgcatccttttttttttttttttgagacggagtttttgcctttgtcgcccaggctggagtgcaatggcgtgatctcggctcaccgcaacctccgcctcccggattcaagcaattctcctgcctcagcctcccgagtagctgggattacaggcacgcacctccacgtccggctaattttgtatttttagtggagacggggtttctccatgtcggtcaggctggtctcgaactcccgacctcaggtgatctgcccacctcggcctcccaaagtgctgggattacaggcatgagccaccgcgcttggccagactgcgtcctttttaagcgaacattttagggcctgggagtttgtcaagtaaggaagtctcaagcccaaagagcagcgtcctgaccatggtggtttcattacgagcccttctgctggctctcaggcagaagccccacagcaccgggaccattcatgaggtcactgcccagctcatgatgtccgtgaggctgtccttttggccagtagccgtgtgcagctgtgtggcacagatggcttcgttcatcctgatcaaggccccacctcagccacagcagtccccccaacctgtgttgtccaccctattattcatgtacctgccaggccctgctagatagcaccccgtggcattacataacacttcatgagtggctgtgtcttgtaattttggggacaggtttctctctttccctctcttttttttgtcaaaagcccagagactgacaaccagctgcagtgtctaagtgttcctcactgacagggtggggcctcaccacccctggagggagcagcgttggcagggagacagcctggcccagtgaccctgggcccaagccagcccctccagggctttcagggaagcgccatccattttcaaagatgtcaaacgtcacttcttcctgtagggcccgagtcctgcctcctatcagggccagatcatagaaggctattttctattctggggaacgattataacttaaatgattgttttaataaaaattctaagctggaaaa

SEQ ID NO: 332197 - DNA, 5563 bp, Homo sapiens
gcggagtgaggacggtgacagccacgcgcgcgcgtacgcgcccgatgcagcgcggccccgtgaccctagtcggccgctgagaggcgcgcggagtctgggccgctgccgtctaggggtcccgtcccgaggcgtccccggcatctccggcccgaatcccggagtgccgggtcgcgcctgcaccgaaggtcccggctcctgtgccctccctgcagccgtcagggcccgtcccccaactcccctttccgctcaggcagggtcctcgcggcccatgctggccgctggggacccgcgcagcccagaccgttcccgggccggccagccggccaccatggtggccctgaggcctgtgcagcaactccaggggggctaaagggctcagagtgcaggccgtggggcgcgagggtcccgggcctgagccccgcgccatggccggggccatcgcttcccgcatgagcttcagctctctcaagaggaagcaacccaagacgttcaccgtgaggatcgtcaccatggacgccgagatggagttcaattgcgagatgaagtggaaagggaaggacctctttgatttggtgtgccggactctggggctccgagaaacctggttctttggactgcagtacacaatcaaggacacagtggcctggctcaaaatggacaagaaggtactggatcatgatgtttcaaaggaagaaccagtcacctttcacttcttggccaaattttatcctgagaatgctgaagaggagctggttcaggagatcacacaacatttattcttcttacaggtaaagaagcagattttagatgaaaagatctactgccctcctgaggcttctgtgctcctggcttcttacgccgtccaggccaagtatggtgactacgaccccagtgttcacaagcggggatttttggcccaagaggaattgcttccaaaaagggtaataaatctgtatcagatgactccggaaatgtgggaggagagaattactgcttggtacgcagagcaccgaggccgagccagggatgaagctgaaatggaatatctgaagatagctcaggacctggagatgtacggtgtgaactactttgcaatccggaataaaaagggcacagagctgctgcttggagtggatgccctggggcttcacatttatgaccctgagaacagactgacccccaagatctccttcccgtggaatgaaatccgaaacatctcgtacagtgacaaggagtttactattaaaccactggataagaaaattgatgtcttcaagtttaactcctcaaagcttcgtgttaataagctgattctccagctatgtatcgggaaccatgatctatttatgaggagaaggaaagccgattctttggaagttcagcagatgaaagcccaggccagggaggagaaggctagaaagcagatggagcggcagcgcctcgctcgagagaagcagatgagggaggaggctgaacgcacgagggatgagttggagaggaggctgctgcagatgaaagaagaagcaacaatggccaacgaagcactgatgcggtctgaggagacagctgacctgttggctgaaaaggcccagatcaccgaggaggaggcaaaacttctggcccagaaggccgcagaggctgagcaggaaatgcagcgcatcaaggccacagcgattcgcacggaggaggagaagcgcctgatggagcagaaggtgctggaagccgaggtgctggcactgaagatggctgaggagtcagagaggagggccaaagaggcagatcagctgaagcaggacctgcaggaagcacgcgaggcggagcgaagagccaagcagaagctcctggagattgccaccaagcccacgtacccgcccatgaacccaattccagcaccgttgcctcctgacataccaagcttcaacctcattggtgacagcctgtctttcgacttcaaagatactgacatgaagcggctttccatggagatagagaaagaaaaagtggaatacatggaaaagagcaagcatctgcaggagcagctcaatgaactcaagacagaaatcgaggccttgaaactgaaagagagggagacagctctggatattctgcacaatgagaactccgacaggggtggcagcagcaagcacaataccattaaaaagctcaccttgcagagcgccaagtcccgagtggccttctttgaagagctctagcaggtgacccagccaccccaggacctgccacttctcctgctaccgggaccgcgggatggaccagatatcaagagagccatccatagggagctggctgggggtttccgtgggagctccagaactttccccagctgagtgaagagcccagcccctcttatgtgcaattgccttgaactacgaccctgtagagatttctctcatggcgttctagttctctgacctgagtctttgttttaagaagtatttgtcttcctttgtctaatgtgggattcctgactcccttcgtccaaggcaccggtgtgtgtgtgtcttgcactccagagctgacctccaccgcccagcctgggaagtcactgtagggagtgagacactgaagccctgagaagccagtgccatcatccccaccccgcccagggttccggaacattcattcccccaccggtgaggacctggcatgcagcgaagcagcccagcccggcggatcccaggccagcacgcctgccggcttctcatcgtcagggagcccgcccagagctcgtgacgagcaagtgctgggtccccgccaggcaccccgaggcggcgctctggctggcagctggtggggaataggcagggcagctgtggctggggagagactttaggcagaagctgtgatgcaggctgactgccagccgaggggctgggtagtgccgtgcgggagctgatggtacagggcactcgctgtccccctccggccaccctagaccagggtccgagaggcaggcaggagccactcatgtcttccccattgcccgacgcccatagacgctccttcctgtgtggggctggggtactccctggtcgtactgcagtcagcacccgtaacccggctatgaccagggatctgtaagccctgtggctccacaggtgctgcttctcactggcccagactctgagctccaccggcccagtctgcacggcccatctgcttcaccttccctcccagccacgtgccagtggccacagcccacttcccaacccactgttgtacccaggcctcactttgctgttgcccttgtccctcttcgggccctgaattttctgttccctgggggccagccagggccctttgtgcccctcccagcacaggcctgatgcaggtgtccactcacaggtggcgctcacctaggctgtcacaggacccacctccatgccaggcaacagagggccacagaaccacccccacggctcactccttggtctggggccaccttcttgccctttctttttttttttttttttttttccgagatggagtctctctctgtcacccaggtgggagtgtggtggcacaatctcggctcactgcaacctccacctcctgagttcaagcaattctcctgcctcagcctcccaagtagctgggactacaggcatgcaccaccacacttggccaatgttctgtatttttaatagggacggggttttgccatgttagctaggctggtctcaaactcacacctgggattacaggcatgagccactgcacccagccccttcttgccctttcttttctccatggctgatgctgctgtggccagccagggcccttgagatccttccagtttggctgttatgcaaagcaggtgatttgtcttaatcagataaaagatagaggctatgggggcctcaagatttttggagagcagaggtggtctctggcaattccatctggttttgagaaacttagcagctcacagagcacagagatcctgccttcttcctactatcaggctgacctaatggggttgggctgctcggcaactgcttgggtcaccttgccccaaggaaaccagccctgggtgccacccagccacttagggtctacagggtgggactccagacctagagcgtaagtatggatgttgtggccctgtgtcttcctagtgtgacccagccaggagcggaagcttcaggcgtttgtaaagtgaggtctggctctgcctcctccgttttttttttttttctggtttctgtttctgtttttttttttggaaatggagtctcgctctgtcgcccaggcttggagtgcagtgtcacgatctcagctcactgcaacctccgcctcccaggtacaagagattctcctgcctcagcctcccgagtagctgggactacaggcgtgtgccaccatgcctggctaatttttggtatttttagtagagatggggtttcgccatgttagccagactggtctcgaactcctgacctcaggtgatcctcccaccccggcttcccaaagttctgggattataggcgtgagccaccatgcccggtctcttctcagtcttgaagcccatccctggatttccaccaggagttactttcctcctgacctgtaaatttgttctttaacaatggctgcaggtgggagcatatggtggtttataaaaacgctgtcgggctttgtttccttctttagctgccgtgtctacttctgaagtctgggaagtgccaagccacgcggcctcaagggagctggctggtgtttgagctgtggcagaagcacctggggctccagggagcaggctgggaactgcaggaccttgctcagccaggagcacttccccctccttgaggcaggaatactgaggtgcctccccacagatggagaaggtggagaggaggatgggcctcaggagcatctcaagccccagtagcaggagaaagaaagaaagagatgcctggttttcacagactggttcctgtggctgggatgactgcatccttttttttttttttttgagacggagtttttgcctttgtcgcccaggctggagtgcaatggcgtgatctcggctcaccgcaacctccgcctcccggattcaagcaattctcctgcctcagcctcccgagtagctgggattacaggcacgcacctccacgtccggctaattttgtatttttagtggagacggggtttctccatgtcggtcaggctggtctcgaactcccgacctcaggtgatctgcccacctcggcctcccaaagtgctgggattacaggcatgagccaccgcgcttggccagactgcgtcctttttaagcgaacattttagggcctgggagtttgtcaagtaaggaagtctcaagcccaaagagcagcgtcctgaccatggtggtttcattacgagcccttctgctgggctttcagggaagcgccatccattttcaaagatgtcaaacgtcacttcttcctgtagggcccgagtcctgcctcctatcagggccagatcatagaaggctattttctattctggggaacgattataacttaaatgattgttttaataaaaattctaagctggaaaa

SEQ ID NO: 332198 - DNA, 5173 bp, Homo sapiens
gcggagtgaggacggtgacagccacgcgcgcgcgtacgcgcccgatgcagcgcggccccgtgaccctagtcggccgctgagaggcgcgcggagtctgggccgctgccgtctaggggtcccgtcccgaggcgtccccggcatctccggcccgaatcccggagtgccgggtcgcgcctgcaccgaaggtcccggctcctgtgccctccctgcagccgtcagggcccgtcccccaactcccctttccgctcaggcagggtcctcgcggcccatgctggccgctggggacccgcgcagcccagaccgttcccgggccggccagccggccaccatggtggccctgaggcctgtgcagcaactccaggggggctaaagggctcagagtgcaggccgtggggcgcgagggtcccgggcctgagccccgcgccatggccggggccatcgcttcccgcatgagcttcagctctctcaagaggaagcaacccaagacgttcaccgtgaggatcgtcaccatggacgccgagatggagttcaattgcgagatgaagtggaaagggaaggacctctttgatttggtgtgccggactctggggctccgagaaacctggttctttggactgcagtacacaatcaaggacacagtggcctggctcaaaatggacaagaaggtactggatcatgatgtttcaaaggaagaaccagtcacctttcacttcttggccaaattttatcctgagaatgctgaagaggagctggttcaggagatcacacaacatttattcttcttacaggtaaagaagcagattttagatgaaaagatctactgccctcctgaggcttctgtgctcctggcttcttacgccgtccaggccaagtatggtgactacgaccccagtgttcacaagcggggatttttggcccaagaggaattgcttccaaaaagggtaataaatctgtatcagatgactccggaaatgtgggaggagagaattactgcttggtacgcagagcaccgaggccgagccagggatgaagctgaaatggaatatctgaagatagctcaggacctggagatgtacggtgtgaactactttgcaatccggaataaaaagggcacagagctgctgcttggagtggatgccctggggcttcacatttatgaccctgagaacagactgacccccaagatctccttcccgtggaatgaaatccgaaacatctcgtacagtgacaaggagtttactattaaaccactggataagaaaattgatgtcttcaagtttaactcctcaaagcttcgtgttaataagctgattctccagctatgtatcgggaaccatgatctatttatgaggagaaggaaagccgattctttggaagttcagcagatgaaagcccaggccagggaggagaaggctagaaagcagatggagcggcagcgcctcgctcgagagaagcagatgagggaggaggctgaacgcacgagggatgagttggagaggaggctgctgcagatgaaagaagaagcaacaatggccaacgaagcactgatgcggtctgaggagacagctgacctgttggctgaaaaggcccagatcaccgaggaggaggcaaaacttctggcccagaaggccgcagaggctgagcaggaaatgcagcgcatcaaggccacagcgattcgcacggaggaggagaagcgcctgatggagcagaaggtgctggaagccgaggtgctggcactgaagatggctgaggagtcagagaggagggccaaagaggcagatcagctgaagcaggacctgcaggaagcacgcgaggcggagcgaagagccaagcagaagctcctggagattgccaccaagcccacgtacccgcccatgaacccaattccagcaccgttgcctcctgacataccaagcttcaacctcattggtgacagcctgtctttcgacttcaaagatactgacatgaagcggctttccatggagatagagaaagaaaaagtggaatacatggaaaagagcaagcatctgcaggagcagctcaatgaactcaagacagaaatcgaggccttgaaactgaaagagagggagacagctctggatattctgcacaatgagaactccgacaggggtggcagcagcaagcacaataccattaaaaagctcaccttgcagagcgccaagtcccgagtggccttctttgaagagctctagcaggtgacccagccaccccaggacctgccacttctcctgctaccgggaccgcgggatggaccagatatcaagagagccatccatagggagctggctgggggtttccgtgggagctccagaactttccccagctgagtgaagagcccagcccctcttatgtgcaattgccttgaactacgaccctgtagagatttctctcatggcgttctagttctctgacctgagtctttgttttaagaagtatttgtcttcctttgtctaatgtgggattcctgactcccttcgtccaaggcaccggtgtgtgtgtgtcttgcactccagagctgacctccaccgcccagcctgggaagtcactgtagggagtgagacactgaagccctgagaagccagtgccatcatccccaccccgcccagggttccggaacattcattcccccaccggtgaggacctggcatgcagcgaagcagcccagcccggcggatcccaggccagcacgcctgccggcttctcatcgtcagggagcccgcccagagctcgtgacgagcaagtgctgggtccccgccaggcaccccgaggcggcgctctggctggcagctggtggggaataggcagggcagctgtggctggggagagactttaggcagaagctgtgatgcaggctgactgccagccgaggggctgggtagtgccgtgcgggagctgatggtacagggcactcgctgtccccctccggccaccctagaccagggtccgagaggcaggcaggagccactcatgtcttccccattgcccgacgcccatagacgctccttcctgtgtggggctggggtactccctggtcgtactgcagtcagcacccgtaacccggctatgaccagggatctgtaagccctgtggctccacaggtgctgcttctcactggcccagactctgagctccaccggcccagtctgcacggcccatctgcttcaccttccctcccagccacgtgccagtggccacagcccacttcccaacccactgttgtacccaggcctcactttgctgttgcccttgtccctcttcgggccctgaattttctgttccctgggggccagccagggccctttgtgcccctcccagcacaggcctgatgcaggtgtccactcacaggtggcgctcacctaggctgtcacaggacccacctccatgccaggcaacagagggccacagaaccacccccacggctcactccttggtctggggccaccttcttgccctttctttttttttttttttttttttccgagatggagtctctctctgtcacccaggtgggagtgtggtggcacaatctcggctcactgcaacctccacctcctgagttcaagcaattctcctgcctcagcctcccaagtagctgggactacaggcatgcaccaccacacttggccaatgttctgtatttttaatagggacggggttttgccatgttagctaggctggtctcaaactcacacctgggattacaggcatgagccactgcacccagccccttcttgccctttcttttctccatggctgatgctgctgtggccagccagggcccttgagatccttccagtttggctgttatgcaaagcaggtgatttgtcttaatcagataaaagatagaggctatgggggcctcaagatttttggagagcagaggtggtctctggcaattccatctggttttgagaaacttagcagctcacagagcacagagatcctgccttcttcctactatcaggctgacctaatggggttgggctgctcggcaactgcttgggtcaccttgccccaaggaaaccagccctgggtgccacccagccacttagggtctacagggtgggactccagacctagagcgtaagtatggatgttgtggccctgtgtcttcctagtgtgacccagccaggagcggaagcttcaggcgtttgtaaagtgaggtctggctctgcctcctccgttttttttttttttctggtttctgtttctgtttttttttttggaaatggagtctcgctctgtcgcccaggcttggagtgcagtgtcacgatctcagctcactgcaacctccgcctcccaggtacaagagattctcctgcctcagcctcccgagtagctgggactacaggcgtgtgccaccatgcctggctaatttttggtatttttagtagagatggggtttcgccatgttagccagactggtctcgaactcctgacctcaggtgatcctcccaccccggcttcccaaagttctgggattataggcgtgagccaccatgcccggtctcttctcagtcttgaagcccatccctggatttccaccaggagttactttcctcctgacctgtaaatttgttctttaacaatggctgcaggtgggagcatatggtggtttataaaaacgctgtcgggctttgtttccttctttagctgccgtgtctacttctgaagtctgggaagtgccaagccacgcggcctcaagggagctggctggtgtttgagctgtggcagaagcacctggggctccagggagcaggctgggaactgcaggaccttgctcagccaggagcacttccccctccttgaggcaggaatactgaggtgcctccccacagatggagaaggtggagaggaggatgggcctcaggagcatctcaagccccagtagcaggagaaagaaagaaagagatgcctggttttcacagactggttcctgtggctgggatgactgcatcctttttatattatatattagggaatgggagattcagggccttagggacgacccaggatgggacgggaacagggcgagggatctagggaatcacggaaaccatcgcgacaccgggatacaagcaagtcatcccgcaaacagccccacagagaaccggggatcaacaggccgcaaacacacgacggaaaaaaggga

SEQ ID NO: 332199 - DNA, 2445 bp, Homo sapiens
tggccaacatggtgaaaccctgtctctactaaaaatacaaaaattactgggactacaggcatgcaccaccacacttggccaatgttctgtatttttaatagggacggggttttgccatgttagctaggctggtctcaaactcacacctgggattacaggcatgagccactgcacccagccccttcttgccctttcttttctccatggctgatgctgctgtggccagccagggcccttgagatccttccagtttggctgttatgcaaagcaggtgatttgtcttaatcagataaaagatagaggctatgggggcctcaagatttttggagagcagaggtggtctctggcaattccatctggttttgagaaacttagcagctcacagagcacagagatcctgccttcttcctactatcaggctgacctaatggggttgggctgctcggcaactgcttgggtcaccttgccccaaggaaaccagccctgggtgccacccagccacttagggtctacagggtgggactccagacctagagcgtaagtatggatgttgtggccctgtgtcttcctagtgtgacccagccaggagcggaagcttcaggcgtttgtaaagtgaggtctggctctgcctcctccgttttttttttttttctggtttctgtttctgtttttttttttggaaatggagtctcgctctgtcgcccaggcttggagtgcagtgtcacgatctcagctcactgcaacctccgcctcccaggtacaagagattctcctgcctcagcctcccgagtagctgggactacaggcgtgtgccaccatgcctggctaatttttggtatttttagtagagatggggtttcgccatgttagccagactggtctcgaactcctgacctcaggtgatcctcccaccccggcttcccaaagttctgggattataggcgtgagccaccatgcccggtctcttctcagtcttgaagcccatccctggatttccaccaggagttactttcctcctgacctgtaaatttgttctttaacaatggctgcaggtgggagcatatggtggtttataaaaacgctgtcgggctttgtttccttctttagctgccgtgtctacttctgaagtctgggaagtgccaagccacgcggcctcaagggagctggctggtgtttgagctgtggcagaagcacctggggctccagggagcaggctgggaactgcaggaccttgctcagccaggagcacttccccctccttgaggcaggaatactgaggtgcctccccacagatggagaaggtggagaggaggatgggcctcaggagcatctcaagccccagtagcaggagaaagaaagaaagagatgcctggttttcacagactggttcctgtggctgggatgactgcatccttttttttttttttttgagacggagtttttgcctttgtcgcccaggctggagtgcaatggcgtgatctcggctcaccgcaacctccgcctcccggattcaagcaattctcctgcctcagcctcccgagtagctgggattacaggcacgcacctccacgtccggctaattttgtatttttagtggagacggggtttctccatgtcggtcaggctggtctcgaactcccgacctcaggtgatctgcccacctcggcctcccaaagtgctgggattacaggcatgagccaccgcgcttggccagactgcgtcctttttaagcgaacattttagggcctgggagtttgtcaagtaaggaagtctcaagcccaaagagcagcgtcctgaccatggtggtttcattacgagcccttctgctggctctcaggcagaagccccacagcaccgggaccattcatgaggtcactgcccagctcatgatgtccgtgaggctgtccttttggccagtagccgtgtgcagctgtgtggcacagatggcttcgttcatcctgatcaaggccccacctcagccacagcagtccccccaacctgtgttgtccaccctattattcatgtacctgccaggccctgctagatagcaccccgtggcattacataacacttcatgagtggctgtgtcttgtaattttggggacaggtttctctctttccctctcttttttttgtcaaaagcccagagactgacaaccagctgcagtgtctaagtgttcctcactgacagggtggggcctcaccacccctggagggagcagcgttggcagggagacagcctggcccagtgaccctgggcccaagccagcccctccagggctttcagggaagcgccatccattttcaaagatgtcaaacgtcacttcttcctgtagggcccgagtcctgcctcctatcagggccagatcatagaaggctattttctattctggggaacgattataacttaaatgattgttttaataaaaattctaagctggaaaa

SEQ ID NO: 332200 - DNA, 3303 bp, Homo sapiens
gcggagtgaggacggtgacagccacgcgcgcgcgtacgcgcccgatgcagcgcggccccgtgaccctagtcggccgctgagaggcgcgcggagtctgggccgctgccgtctaggggtcccgtcccgaggcgtccccggcatctccggcccgaatcccggagtgccgggtcgcgcctgcaccgaaggtcccggctcctgtgccctccctgcagccgtcagggcccgtcccccaactcccctttccgctcaggcagggtcctcgcggcccatgctggccgctggggacccgcgcagcccagaccgttcccgggccggccagccggccaccatggtggccctgaggcctgtgcagcaactccaggggggctaaagggctcagagtgcaggccgtggggcgcgagggtcccgggcctgagccccgcgccatggccggggccatcgcttcccgcatgagcttcagctctctcaagaggaagcaacccaagacgttcaccgtgaggatcgtcaccatggacgccgagatggagttcaattgcgagatgaagtggaaagggaaggacctctttgatttggtgtgccggactctggggctccgagaaacctggttctttggactgcagtacacaatcaaggacacagtggcctggctcaaaatggacaagaaggtactggatcatgatgtttcaaaggaagaaccagtcacctttcacttcttggccaaattttatcctgagaatgctgaagaggagctggttcaggagatcacacaacatttattcttcttacaggtaaagaagcagattttagatgaaaagatctactgccctcctgaggcttctgtgctcctggcttcttacgccgtccaggccaagtatggtgactacgaccccagtgttcacaagcggggatttttggcccaagaggaattgcttccaaaaagggtaataaatctgtatcagatgactccggaaatgtgggaggagagaattactgcttggtacgcagagcaccgaggccgagccagggatgaagctgaaatggaatatctgaagatagctcaggacctggagatgtacggtgtgaactactttgcaatccggaataaaaagggcacagagctgctgcttggagtggatgccctggggcttcacatttatgaccctgagaacagactgacccccaagatctccttcccgtggaatgaaatccgaaacatctcgtacagtgacaaggagtttactattaaaccactggataagaaaattgatgtcttcaagtttaactcctcaaagcttcgtgttaataagctgattctccagctatgtatcgggaaccatgatctatttatgaggagaaggaaagccgattctttggaagttcagcagatgaaagcccaggccagggaggagaaggctagaaagcagatggagcggcagcgcctcgctcgagagaagcagatgagggaggaggctgaacgcacgagggatgagttggagaggaggctgctgcagatgaaagaagaagcaacaatggccaacgaagcactgatgcggtctgaggagacagctgacctgttggctgaaaaggcccagatcaccgaggaggaggcaaaacttctggcccagaaggccgcagaggctgagcaggaaatgcagcgcatcaaggccacagcgattcgcacggaggaggagaagcgcctgatggagcagaaggtgctggaagccgaggtgctggcactgaagatggctgaggagtcagagaggagggccaaagaggcagatcagctgaagcaggacctgcaggaagcacgcgaggcggagcgaagagccaagcagaagctcctggagattgccaccaagcccacgtacccgcccatgaacccaattccagcaccgttgcctcctgacataccaagcttcaacctcattggtgacagcctgtctttcgacttcaaagatactgacatgaagcggctttccatggagatagagaaagaaaaagtggaatacatggaaaagagcaagcatctgcaggagcagctcaatgaactcaagacagaaatcgaggccttgaaactgaaagagagggagacagctctggatattctgcacaatgagaactccgacaggggtggcagcagcaagcacaataccattaaaaagcctcaagcccaaggcagaagacctatctgcatttgagccctcaaataggttgttcccaggtactctctatgtggtgatggtgctgccctctgtgatactaacccgtgcatgagcttgcctgtctctgtcctcgggccacactgagcccttacgagggcaggtggtgcctgggtactggccgcagcatgctttgagtctaaaagtaggcacccaccctgtgaagccagaccagcctccagggccccagaagactgcctcgttccgaagagcatgtcatggggctgtaggaccagccattcttcccatctcgggtcattgttgggctggggaaggttatggcttcttgtccagtcaggtgtgtctaaaagtcctttgtcttggtggcatactcctagcatggaaatggggtcaatctgggcactttggagactggtgtgtttaactcaagatcaagaccttttatgcgttgacagcctctcaagacccatggtcacacctggcagcttctggtagtggggcaaaagggttgcttgtgctggctcattttcctttagagctttccctttctgcacacatcccttttcttttcaaataaagcaaacccagagcacagggtctgatatgtgagtccacggggagtggactgtctgttcatctgtgctcagccacctctgcttcagcttcctctccataggctgagcagagatgtggtcagagtgaactcacattggaacagtacactcacggcaccctggagaggagcggtcactggttgctgagtgaattaaccgaatgtttgctgcttttctcctgcaacagttcattattcctccagcatgcctaggcagtggagagaatgtattttgcccaataataaaatgacatcctgcctctacttctcacctaatccccagtagtacccatgccaacaagccccacaccacctgacagcagcataggatgtgtcctttggagtcttccctgcagtttctgctcatagagtggaataagctcattggaacctttctaacaaaaagagatctggcataagatagatcctacttgtggtcgttatcccatcaagagaggtcagctgttaaagtccctgatagatcttattaaaaggtacacttgagctgtc

SEQ ID NO: 332201 - DNA, 1442 bp, Homo sapiens
gcggagtgaggacggtgacagccacgcgcgcgcgtacgcgcccgatgcagcgcggccccgtgaccctagtcggccgctgagaggcgcgcggagtctgggccgctgccgtctaggggtcccgtcccgaggcgtccccggcatctccggcccgaatcccggagtgccgggtcgcgcctgcaccgaaggtcccggctcctgtgccctccctgcagccgtcagggcccgtcccccaactcccctttccgctcaggcagggtcctcgcggcccatgctggccgctggggacccgcgcagcccagaccgttcccgggccggccagccggccaccatggtggccctgaggcctgtgcagcaactccaggggggctaaagggctcagagtgcaggccgtggggcgcgagggtcccgggcctgagccccgcgccatggccggggccatcgcttcccgcatgagcttcagctctctcaagaggaagcaacccaagacgttcaccgtgaggatcgtcaccatggacgccgagatggagttcaattgcgagatgaagtggaaagggaaggacctctttgatttggtgtgccggactctggggctccgagaaacctggttctttggactgcagtacacaatcaaggacacagtggcctggctcaaaatggacaagaaggtactggatcatgatgtttcaaaggaagaaccagtcacctttcacttcttggccaaattttatcctgagaatgctgaagaggagctggttcaggagatcacacaacatttattcttcttacaggtaaagaagcagattttagatgaaaagatctactgccctcctgaggcttctgtgctcctggcttcttacgccgtccaggccaagtatggtgactacgaccccagtgttcacaagcggggatttttggcccaagaggaattgcttccaaaaagggtaataaatctgtatcagatgactccggaaatgtgggaggagagaattactgcttggtacgcagagcaccgaggccgagccagggatgaagctgaaatggaatatctgaagatagctcaggacctggagatgtacggtgtgaactactttgcaatccggaataaaaagggcacagagctgctgcttggagtggatgccctggggcttcacatttatgaccctgagaacagactgacccccaagatctccttcccgtggaatgaaatccgaaacatctcgtacagtgacaaggagtttactattaaaccactggataagaaaattgatgtcttcaagtttaactcctcaaagcttcgtgttaataagctgattctccagctatgtatcgggaaccatgatctatttatgaggagaaggaaagccgattctttggaagttcagcagatgaaagcccaggccagggaggagaaggctagaaagcaggtgagcacaaccttgttt

SEQ ID NO: 332202 - DNA, 699 bp, Homo sapiens
catgatccttgctgtgatttctcttttgatgttggcaattttaaaatgacatcagtctatctggacctttttcctaaggctcttgctcagaccactcagtagatagccgccacctgcccagtgaggtgaatcaggcccattaggccatttgtcaggggaaggaacagaggagcagcggagggccccgccggccagtgccacagggcagcctgcaaagcaggtagacaggttttcaggcagcttttgctgctttgggtccctcagggattaatacacaaaaagggccccttgggtattcagtggcagatttctcttgagagcagataaagtcgctaataacaaattggatttgttcattggggtggacttggcctttcgttccacctctgtgtaggataagtgtgtggatagtgctcccactgtgcacatcaccatatggcatttgggtgcagctgtccctagccagactgcagaaaagcttgatctgggccggacgcggtggcttatgcctgtaatcccagcactttgggaggccgaggcaggcggatcacgaagtcaagagattgagaccatcctggccaacatggtgaaaccctgtctctactaaaaatacaaaaattagctgggcgtggtggcatgcgcctgtagttccagctactcaggaggctgaggcaggagaatcacttaaacccaggaggc

SEQ ID NO: 332203 - DNA, 485 bp, Homo sapiens
tgataaatttagtgggaaaaaaatttaatgcacgccttgcaaaggcttctttgagggtagcacaggaggaagtgccaatatagtgtgtttgtcttttgctctgcaattctgcaggtactggatcatgatgtttcaaaggaagaaccagtcacctttcacttcttggccaaattttatcctgagaatgctgaagaggagctggttcaggagatcacacaacatttattcttcttacaggtacatcagtcaaggctaccccccagttctgagagaacttgcccaggagtggttgcagagttggcctcagagttgaccacaaacacctttgtattgcaaaaatattctacctctggaaggtcagcccctttggttctgtaatggaaaaaaggcttcagaacagaactatacttgagtgatgaaaattggtgtcagatgaaattgtgaaggtgtgatggtgaagaatggatacaagtagctacctaact

SEQ ID NO: 332204 - DNA, 6057 bp, Homo sapiens
gcggagtgaggacggtgacagccacgcgcgcgcgtacgcgcccgatgcagcgcggccccgtgaccctagtcggccgctgagaggcgcgcggagtctgggccgctgccgtctaggggtcccgtcccgaggcgtccccggcatctccggcccgaatcccggagtgccgggtcgcgcctgcaccgaaggtcccggctcctgtgccctccctgcagccgtcagggcccgtcccccaactcccctttccgctcaggcagggtcctcgcggcccatgctggccgctggggacccgcgcagcccagaccgttcccgggccggccagccggccaccatggtggccctgaggcctgtgcagcaactccaggggggctaaagggctcagagtgcaggccgtggggcgcgagggtcccgggcctgagccccgcgccatggccggggccatcgcttcccgcatgagcttcagctctctcaagaggaagcaacccaagacgttcaccgtgaggatcgtcaccatggacgccgagatggagttcaattgcgagatgaagtggaaagggaaggacctctttgatttggtgtgccggactctggggctccgagaaacctggttctttggactgcagtacacaatcaaggacacagtggcctggctcaaaatggacaagaaggtactggatcatgatgtttcaaaggaagaaccagtcacctttcacttcttggccaaattttatcctgagaatgctgaagaggagctggttcaggagatcacacaacatttattcttcttacaggtaaagaagcagattttagatgaaaagatctactgccctcctgaggcttctgtgctcctggcttcttacgccgtccaggccaagtatggtgactacgaccccagtgttcacaagcggggatttttggcccaagaggaattgcttccaaaaagggtaataaatctgtatcagatgactccggaaatgtgggaggagagaattactgcttggtacgcagagcaccgaggccgagccagggatgaagctgaaatggaatatctgaagatagctcaggacctggagatgtacggtgtgaactactttgcaatccggaataaaaagggcacagagctgctgcttggagtggatgccctggggcttcacatttatgaccctgagaacagactgacccccaagatctccttcccgtggaatgaaatccgaaacatctcgtacagtgacaaggagtttactattaaaccactggataagaaaattgatgtcttcaagtttaactcctcaaagcttcgtgttaataagctgattctccagctatgtatcgggaaccatgatctatttatgaggagaaggaaagccgattctttggaagttcagcagatgaaagcccaggccagggaggagaaggctagaaagcagatggagcggcagcgcctcgctcgagagaagcagatgagggaggaggctgaacgcacgagggatgagttggagaggaggctgctgcagatgaaagaagaagcaacaatggccaacgaagcactgatgcggtctgaggagacagctgacctgttggctgaaaaggcccagatcaccgaggaggaggcaaaacttctggcccagaaggccgcagaggctgagcaggaaatgcagcgcatcaaggccacagcgattcgcacggaggaggagaagcgcctgatggagcagaaggtgctggaagccgaggtgctggcactgaagatggctgaggagtcagagaggagggccaaagaggcagatcagctgaagcaggacctgcaggaagcacgcgaggcggagcgaagagccaagcagaagctcctggagattgccaccaagcccacgtacccgcccatgaacccaattccagcaccgttgcctcctgacataccaagcttcaacctcattggtgacagcctgtctttcgacttcaaagatactgacatgaagcggctttccatggagatagagaaagaaaaagtggaatacatggaaaagagcaagcatctgcaggagcagctcaatgaactcaagacagaaatcgaggccttgaaactgaaagagagggagacagctctggatattctgcacaatgagaactccgacaggggtggcagcagcaagcacaataccattaaaaagcctcaagcccaaggcagaagacctatctgcatttgagccctcaaactcaccttgcagagcgccaagtcccgagtggccttctttgaagagctctagcaggtgacccagccaccccaggacctgccacttctcctgctaccgggaccgcgggatggaccagatatcaagagagccatccatagggagctggctgggggtttccgtgggagctccagaactttccccagctgagtgaagagcccagcccctcttatgtgcaattgccttgaactacgaccctgtagagatttctctcatggcgttctagttctctgacctgagtctttgttttaagaagtatttgtcttcctttgtctaatgtgggattcctgactcccttcgtccaaggcaccggtgtgtgtgtgtcttgcactccagagctgacctccaccgcccagcctgggaagtcactgtagggagtgagacactgaagccctgagaagccagtgccatcatccccaccccgcccagggttccggaacattcattcccccaccggtgaggacctggcatgcagcgaagcagcccagcccggcggatcccaggccagcacgcctgccggcttctcatcgtcagggagcccgcccagagctcgtgacgagcaagtgctgggtccccgccaggcaccccgaggcggcgctctggctggcagctggtggggaataggcagggcagctgtggctggggagagactttaggcagaagctgtgatgcaggctgactgccagccgaggggctgggtagtgccgtgcgggagctgatggtacagggcactcgctgtccccctccggccaccctagaccagggtccgagaggcaggcaggagccactcatgtcttccccattgcccgacgcccatagacgctccttcctgtgtggggctggggtactccctggtcgtactgcagtcagcacccgtaacccggctatgaccagggatctgtaagccctgtggctccacaggtgctgcttctcactggcccagactctgagctccaccggcccagtctgcacggcccatctgcttcaccttccctcccagccacgtgccagtggccacagcccacttcccaacccactgttgtacccaggcctcactttgctgttgcccttgtccctcttcgggccctgaattttctgttccctgggggccagccagggccctttgtgcccctcccagcacaggcctgatgcaggtgtccactcacaggtggcgctcacctaggctgtcacaggacccacctccatgccaggcaacagagggccacagaaccacccccacggctcactccttggtctggggccaccttcttgccctttctttttttttttttttttttttccgagatggagtctctctctgtcacccaggtgggagtgtggtggcacaatctcggctcactgcaacctccacctcctgagttcaagcaattctcctgcctcagcctcccaagtagctgggactacaggcatgcaccaccacacttggccaatgttctgtatttttaatagggacggggttttgccatgttagctaggctggtctcaaactcacacctgggattacaggcatgagccactgcacccagccccttcttgccctttcttttctccatggctgatgctgctgtggccagccagggcccttgagatccttccagtttggctgttatgcaaagcaggtgatttgtcttaatcagataaaagatagaggctatgggggcctcaagatttttggagagcagaggtggtctctggcaattccatctggttttgagaaacttagcagctcacagagcacagagatcctgccttcttcctactatcaggctgacctaatggggttgggctgctcggcaactgcttgggtcaccttgccccaaggaaaccagccctgggtgccacccagccacttagggtctacagggtgggactccagacctagagcgtaagtatggatgttgtggccctgtgtcttcctagtgtgacccagccaggagcggaagcttcaggcgtttgtaaagtgaggtctggctctgcctcctccgttttttttttttttctggtttctgtttctgtttttttttttggaaatggagtctcgctctgtcgcccaggcttggagtgcagtgtcacgatctcagctcactgcaacctccgcctcccaggtacaagagattctcctgcctcagcctcccgagtagctgggactacaggcgtgtgccaccatgcctggctaatttttggtatttttagtagagatggggtttcgccatgttagccagactggtctcgaactcctgacctcaggtgatcctcccaccccggcttcccaaagttctgggattataggcgtgagccaccatgcccggtctcttctcagtcttgaagcccatccctggatttccaccaggagttactttcctcctgacctgtaaatttgttctttaacaatggctgcaggtgggagcatatggtggtttataaaaacgctgtcgggctttgtttccttctttagctgccgtgtctacttctgaagtctgggaagtgccaagccacgcggcctcaagggagctggctggtgtttgagctgtggcagaagcacctggggctccagggagcaggctgggaactgcaggaccttgctcagccaggagcacttccccctccttgaggcaggaatactgaggtgcctccccacagatggagaaggtggagaggaggatgggcctcaggagcatctcaagccccagtagcaggagaaagaaagaaagagatgcctggttttcacagactggttcctgtggctgggatgactgcatccttttttttttttttttgagacggagtttttgcctttgtcgcccaggctggagtgcaatggcgtgatctcggctcaccgcaacctccgcctcccggattcaagcaattctcctgcctcagcctcccgagtagctgggattacaggcacgcacctccacgtccggctaattttgtatttttagtggagacggggtttctccatgtcggtcaggctggtctcgaactcccgacctcaggtgatctgcccacctcggcctcccaaagtgctgggattacaggcatgagccaccgcgcttggccagactgcgtcctttttaagcgaacattttagggcctgggagtttgtcaagtaaggaagtctcaagcccaaagagcagcgtcctgaccatggtggtttcattacgagcccttctgctggctctcaggcagaagccccacagcaccgggaccattcatgaggtcactgcccagctcatgatgtccgtgaggctgtccttttggccagtagccgtgtgcagctgtgtggcacagatggcttcgttcatcctgatcaaggccccacctcagccacagcagtccccccaacctgtgttgtccaccctattattcatgtacctgccaggccctgctagatagcaccccgtggcattacataacacttcatgagtggctgtgtcttgtaattttggggacaggtttctctctttccctctcttttttttgtcaaaagcccagagactgacaaccagctgcagtgtctaagtgttcctcactgacagggtggggcctcaccacccctggagggagcagcgttggcagggagacagcctggcccagtgaccctgggcccaagccagcccctccagggctttcagggaagcgccatccattttcaaagatgtcaaacgtcacttcttcctgtagggcccgagtcctgcctcctatcagggccagatcatagaaggctattttctattctggggaacgattataacttaaatgattgttttaataaaaattctaagctggaaaa

SEQ ID NO: 332205 - DNA, 2172 bp, Homo sapiens
gcggagtgaggacggtgacagccacgcgcgcgcgtacgcgcccgatgcagcgcggccccgtgaccctagtcggccgctgagaggcgcgcggagtctgggccgctgccgtctaggggtcccgtcccgaggcgtccccggcatctccggcccgaatcccggagtgccgggtcgcgcctgcaccgaaggtcccggctcctgtgccctccctgcagccgtcagggcccgtcccccaactcccctttccgctcaggcagggtcctcgcggcccatgctggccgctggggacccgcgcagcccagaccgttcccgggccggccagccggccaccatggtggccctgaggcctgtgcagcaactccaggggggctaaagggctcagagtgcaggccgtggggcgcgagggtcccgggcctgagccccgcgccatggccggggccatcgcttcccgcatgagcttcagctctctcaagaggaagcaacccaagacgttcaccgtgaggatcgtcaccatggacgccgagatggagttcaattgcgaggtaaagaagcagattttagatgaaaagatctactgccctcctgaggcttctgtgctcctggcttcttacgccgtccaggccaagtatggtgactacgaccccagtgttcacaagcggggatttttggcccaagaggaattgcttccaaaaagggtaataaatctgtatcagatgactccggaaatgtgggaggagagaattactgcttggtacgcagagcaccgaggccgagccagggatgaagctgaaatggaatatctgaagatagctcaggacctggagatgtacggtgtgaactactttgcaatccggaataaaaagggcacagagctgctgcttggagtggatgccctggggcttcacatttatgaccctgagaacagactgacccccaagatctccttcccgtggaatgaaatccgaaacatctcgtacagtgacaaggagtttactattaaaccactggataagaaaattgatgtcttcaagtttaactcctcaaagcttcgtgttaataagctgattctccagctatgtatcgggaaccatgatctatttatgaggagaaggaaagccgattctttggaagttcagcagatgaaagcccaggccagggaggagaaggctagaaagcagatggagcggcagcgcctcgctcgagagaagcagatgagggaggaggctgaacgcacgagggatgagttggagaggaggctgctgcagatgaaagaagaagcaacaatggccaacgaagcactgatgcggtctgaggagacagctgacctgttggctgaaaaggcccagatcaccgaggaggaggcaaaacttctggcccagaaggccgcagaggctgagcaggaaatgcagcgcatcaaggccacagcgattcgcacggaggaggagaagcgcctgatggagcagaaggtgctggaagccgaggtgctggcactgaagatggctgaggagtcagagaggagggccaaagaggcagatcagctgaagcaggacctgcaggaagcacgcgaggcggagcgaagagccaagcagaagctcctggagattgccaccaagcccacgtacccgcccatgaacccaattccagcaccgttgcctcctgacataccaagcttcaacctcattggtgacagcctgtctttcgacttcaaagatactgacatgaagcggctttccatggagatagagaaagaaaaagtggaatacatggaaaagagcaagcatctgcaggagcagctcaatgaactcaagacagaaatcgaggccttgaaactgaaagagagggagacagctctggatattctgcacaatgagaactccgacaggggtggcagcagcaagcacaataccattaaaaagcctcaagcccaaggcagaagacctatctgcatttgagccctcaaacttcctctccataggctgagcagagatgtggtcagagtgaactcacattggaacagtacactcacggcaccctggagaggagcggtcactggttgctgagtgaattaaccgaatgtttgctgcttttctcctgcaacagttcattattcctccagcatgcctaggcagtggagagaatgtattttgcccaataataaaatgacatcctgcctct

SEQ ID NO: 332206 - DNA, 6173 bp, Homo sapiens
  misc_feature (631)..(631): n is a, c, g, or t
  misc_feature (641)..(641): n is a, c, g, or t
gcggagtgaggacggtgacagccacgcgcgcgcgtacgcgcccgatgcagcgcggccccgtgaccctagtcggccgctgagaggcgcgcggagtctgggccgctgccgtctaggggtcccgtcccgaggcgtccccggcatctccggcccgaatcccggagtgccgggtcgcgcctgcaccgaaggtcccggctcctgtgccctccctgcagccgtcagggcccgtcccccaactcccctttccgctcaggcagggtcctcgcggcccatgctggccgctggggacccgcgcagcccagaccgttcccgggccggccagccggccaccatggtggccctgaggcctgtgcagcaactccaggggggctaaagggctcagagtgcaggccgtggggcgcgagggtcccgggcctgagccccgcgccatggccggggccatcgcttcccgcatgagcttcagctctctcaagaggaagcaacccaagacgttcaccgtgaggatcgtcaccatggacgccgagatggagttcaattgcgagtcttgctctgtcaccctagctggagtgcagtggcgtgatcttggtttactgcaacctctgcctcccaagttcaagcgattctcctgcctcancttcccaagnagctgggactacagatgaagtggaaagggaaggacctctttgatttggtgtgccggactctggggctccgagaaacctggttctttggactgcagtacacaatcaaggacacagtggcctggctcaaaatggacaagaaggtactggatcatgatgtttcaaaggaagaaccagtcacctttcacttcttggccaaattttatcctgagaatgctgaagaggagctggttcaggagatcacacaacatttattcttcttacaggtaaagaagcagattttagatgaaaagatctactgccctcctgaggcttctgtgctcctggcttcttacgccgtccaggccaagtatggtgactacgaccccagtgttcacaagcggggatttttggcccaagaggaattgcttccaaaaagggtaataaatctgtatcagatgactccggaaatgtgggaggagagaattactgcttggtacgcagagcaccgaggccgagccagggatgaagctgaaatggaatatctgaagatagctcaggacctggagatgtacggtgtgaactactttgcaatccggaataaaaagggcacagagctgctgcttggagtggatgccctggggcttcacatttatgaccctgagaacagactgacccccaagatctccttcccgtggaatgaaatccgaaacatctcgtacagtgacaaggagtttactattaaaccactggataagaaaattgatgtcttcaagtttaactcctcaaagcttcgtgttaataagctgattctccagctatgtatcgggaaccatgatctatttatgaggagaaggaaagccgattctttggaagttcagcagatgaaagcccaggccagggaggagaaggctagaaagcagatggagcggcagcgcctcgctcgagagaagcagatgagggaggaggctgaacgcacgagggatgagttggagaggaggctgctgcagatgaaagaagaagcaacaatggccaacgaagcactgatgcggtctgaggagacagctgacctgttggctgaaaaggcccagatcaccgaggaggaggcaaaacttctggcccagaaggccgcagaggctgagcaggaaatgcagcgcatcaaggccacagcgattcgcacggaggaggagaagcgcctgatggagcagaaggtgctggaagccgaggtgctggcactgaagatggctgaggagtcagagaggagggccaaagaggcagatcagctgaagcaggacctgcaggaagcacgcgaggcggagcgaagagccaagcagaagctcctggagattgccaccaagcccacgtacccgcccatgaacccaattccagcaccgttgcctcctgacataccaagcttcaacctcattggtgacagcctgtctttcgacttcaaagatactgacatgaagcggctttccatggagatagagaaagaaaaagtggaatacatggaaaagagcaagcatctgcaggagcagctcaatgaactcaagacagaaatcgaggccttgaaactgaaagagagggagacagctctggatattctgcacaatgagaactccgacaggggtggcagcagcaagcacaataccattaaaaagcctcaagcccaaggcagaagacctatctgcatttgagccctcaaactcaccttgcagagcgccaagtcccgagtggccttctttgaagagctctagcaggtgacccagccaccccaggacctgccacttctcctgctaccgggaccgcgggatggaccagatatcaagagagccatccatagggagctggctgggggtttccgtgggagctccagaactttccccagctgagtgaagagcccagcccctcttatgtgcaattgccttgaactacgaccctgtagagatttctctcatggcgttctagttctctgacctgagtctttgttttaagaagtatttgtcttcctttgtctaatgtgggattcctgactcccttcgtccaaggcaccggtgtgtgtgtgtcttgcactccagagctgacctccaccgcccagcctgggaagtcactgtagggagtgagacactgaagccctgagaagccagtgccatcatccccaccccgcccagggttccggaacattcattcccccaccggtgaggacctggcatgcagcgaagcagcccagcccggcggatcccaggccagcacgcctgccggcttctcatcgtcagggagcccgcccagagctcgtgacgagcaagtgctgggtccccgccaggcaccccgaggcggcgctctggctggcagctggtggggaataggcagggcagctgtggctggggagagactttaggcagaagctgtgatgcaggctgactgccagccgaggggctgggtagtgccgtgcgggagctgatggtacagggcactcgctgtccccctccggccaccctagaccagggtccgagaggcaggcaggagccactcatgtcttccccattgcccgacgcccatagacgctccttcctgtgtggggctggggtactccctggtcgtactgcagtcagcacccgtaacccggctatgaccagggatctgtaagccctgtggctccacaggtgctgcttctcactggcccagactctgagctccaccggcccagtctgcacggcccatctgcttcaccttccctcccagccacgtgccagtggccacagcccacttcccaacccactgttgtacccaggcctcactttgctgttgcccttgtccctcttcgggccctgaattttctgttccctgggggccagccagggccctttgtgcccctcccagcacaggcctgatgcaggtgtccactcacaggtggcgctcacctaggctgtcacaggacccacctccatgccaggcaacagagggccacagaaccacccccacggctcactccttggtctggggccaccttcttgccctttctttttttttttttttttttttccgagatggagtctctctctgtcacccaggtgggagtgtggtggcacaatctcggctcactgcaacctccacctcctgagttcaagcaattctcctgcctcagcctcccaagtagctgggactacaggcatgcaccaccacacttggccaatgttctgtatttttaatagggacggggttttgccatgttagctaggctggtctcaaactcacacctgggattacaggcatgagccactgcacccagccccttcttgccctttcttttctccatggctgatgctgctgtggccagccagggcccttgagatccttccagtttggctgttatgcaaagcaggtgatttgtcttaatcagataaaagatagaggctatgggggcctcaagatttttggagagcagaggtggtctctggcaattccatctggttttgagaaacttagcagctcacagagcacagagatcctgccttcttcctactatcaggctgacctaatggggttgggctgctcggcaactgcttgggtcaccttgccccaaggaaaccagccctgggtgccacccagccacttagggtctacagggtgggactccagacctagagcgtaagtatggatgttgtggccctgtgtcttcctagtgtgacccagccaggagcggaagcttcaggcgtttgtaaagtgaggtctggctctgcctcctccgttttttttttttttctggtttctgtttctgtttttttttttggaaatggagtctcgctctgtcgcccaggcttggagtgcagtgtcacgatctcagctcactgcaacctccgcctcccaggtacaagagattctcctgcctcagcctcccgagtagctgggactacaggcgtgtgccaccatgcctggctaatttttggtatttttagtagagatggggtttcgccatgttagccagactggtctcgaactcctgacctcaggtgatcctcccaccccggcttcccaaagttctgggattataggcgtgagccaccatgcccggtctcttctcagtcttgaagcccatccctggatttccaccaggagttactttcctcctgacctgtaaatttgttctttaacaatggctgcaggtgggagcatatggtggtttataaaaacgctgtcgggctttgtttccttctttagctgccgtgtctacttctgaagtctgggaagtgccaagccacgcggcctcaagggagctggctggtgtttgagctgtggcagaagcacctggggctccagggagcaggctgggaactgcaggaccttgctcagccaggagcacttccccctccttgaggcaggaatactgaggtgcctccccacagatggagaaggtggagaggaggatgggcctcaggagcatctcaagccccagtagcaggagaaagaaagaaagagatgcctggttttcacagactggttcctgtggctgggatgactgcatccttttttttttttttttgagacggagtttttgcctttgtcgcccaggctggagtgcaatggcgtgatctcggctcaccgcaacctccgcctcccggattcaagcaattctcctgcctcagcctcccgagtagctgggattacaggcacgcacctccacgtccggctaattttgtatttttagtggagacggggtttctccatgtcggtcaggctggtctcgaactcccgacctcaggtgatctgcccacctcggcctcccaaagtgctgggattacaggcatgagccaccgcgcttggccagactgcgtcctttttaagcgaacattttagggcctgggagtttgtcaagtaaggaagtctcaagcccaaagagcagcgtcctgaccatggtggtttcattacgagcccttctgctggctctcaggcagaagccccacagcaccgggaccattcatgaggtcactgcccagctcatgatgtccgtgaggctgtccttttggccagtagccgtgtgcagctgtgtggcacagatggcttcgttcatcctgatcaaggccccacctcagccacagcagtccccccaacctgtgttgtccaccctattattcatgtacctgccaggccctgctagatagcaccccgtggcattacataacacttcatgagtggctgtgtcttgtaattttggggacaggtttctctctttccctctcttttttttgtcaaaagcccagagactgacaaccagctgcagtgtctaagtgttcctcactgacagggtggggcctcaccacccctggagggagcagcgttggcagggagacagcctggcccagtgaccctgggcccaagccagcccctccagggctttcagggaagcgccatccattttcaaagatgtcaaacgtcacttcttcctgtagggcccgagtcctgcctcctatcagggccagatcatagaaggctattttctattctggggaacgattataacttaaatgattgttttaataaaaattctaagctggaaaa

SEQ ID NO: 332207 - DNA, 5934 bp, Homo sapiens
gcggagtgaggacggtgacagccacgcgcgcgcgtacgcgcccgatgcagcgcggccccgtgaccctagtcggccgctgagaggcgcgcggagtctgggccgctgccgtctaggggtcccgtcccgaggcgtccccggcatctccggcccgaatcccggagtgccgggtcgcgcctgcaccgaaggtcccggctcctgtgccctccctgcagccgtcagggcccgtcccccaactcccctttccgctcaggcagggtcctcgcggcccatgctggccgctggggacccgcgcagcccagaccgttcccgggccggccagccggccaccatggtggccctgaggcctgtgcagcaactccaggggggctaaagggctcagagtgcaggccgtggggcgcgagggtcccgggcctgagccccgcgccatggccggggccatcgcttcccgcatgagcttcagctctctcaagaggaagcaacccaagacgttcaccgtgaggatcgtcaccatggacgccgagatggagttcaattgcgagatgaagtggaaagggaaggacctctttgatttggtgtgccggactctggggctccgagaaacctggttctttggactgcagtacacaatcaaggacacagtggcctggctcaaaatggacaagaaggtaaagaagcagattttagatgaaaagatctactgccctcctgaggcttctgtgctcctggcttcttacgccgtccaggccaagtatggtgactacgaccccagtgttcacaagcggggatttttggcccaagaggaattgcttccaaaaagggtaataaatctgtatcagatgactccggaaatgtgggaggagagaattactgcttggtacgcagagcaccgaggccgagccagggatgaagctgaaatggaatatctgaagatagctcaggacctggagatgtacggtgtgaactactttgcaatccggaataaaaagggcacagagctgctgcttggagtggatgccctggggcttcacatttatgaccctgagaacagactgacccccaagatctccttcccgtggaatgaaatccgaaacatctcgtacagtgacaaggagtttactattaaaccactggataagaaaattgatgtcttcaagtttaactcctcaaagcttcgtgttaataagctgattctccagctatgtatcgggaaccatgatctatttatgaggagaaggaaagccgattctttggaagttcagcagatgaaagcccaggccagggaggagaaggctagaaagcagatggagcggcagcgcctcgctcgagagaagcagatgagggaggaggctgaacgcacgagggatgagttggagaggaggctgctgcagatgaaagaagaagcaacaatggccaacgaagcactgatgcggtctgaggagacagctgacctgttggctgaaaaggcccagatcaccgaggaggaggcaaaacttctggcccagaaggccgcagaggctgagcaggaaatgcagcgcatcaaggccacagcgattcgcacggaggaggagaagcgcctgatggagcagaaggtgctggaagccgaggtgctggcactgaagatggctgaggagtcagagaggagggccaaagaggcagatcagctgaagcaggacctgcaggaagcacgcgaggcggagcgaagagccaagcagaagctcctggagattgccaccaagcccacgtacccgcccatgaacccaattccagcaccgttgcctcctgacataccaagcttcaacctcattggtgacagcctgtctttcgacttcaaagatactgacatgaagcggctttccatggagatagagaaagaaaaagtggaatacatggaaaagagcaagcatctgcaggagcagctcaatgaactcaagacagaaatcgaggccttgaaactgaaagagagggagacagctctggatattctgcacaatgagaactccgacaggggtggcagcagcaagcacaataccattaaaaagcctcaagcccaaggcagaagacctatctgcatttgagccctcaaactcaccttgcagagcgccaagtcccgagtggccttctttgaagagctctagcaggtgacccagccaccccaggacctgccacttctcctgctaccgggaccgcgggatggaccagatatcaagagagccatccatagggagctggctgggggtttccgtgggagctccagaactttccccagctgagtgaagagcccagcccctcttatgtgcaattgccttgaactacgaccctgtagagatttctctcatggcgttctagttctctgacctgagtctttgttttaagaagtatttgtcttcctttgtctaatgtgggattcctgactcccttcgtccaaggcaccggtgtgtgtgtgtcttgcactccagagctgacctccaccgcccagcctgggaagtcactgtagggagtgagacactgaagccctgagaagccagtgccatcatccccaccccgcccagggttccggaacattcattcccccaccggtgaggacctggcatgcagcgaagcagcccagcccggcggatcccaggccagcacgcctgccggcttctcatcgtcagggagcccgcccagagctcgtgacgagcaagtgctgggtccccgccaggcaccccgaggcggcgctctggctggcagctggtggggaataggcagggcagctgtggctggggagagactttaggcagaagctgtgatgcaggctgactgccagccgaggggctgggtagtgccgtgcgggagctgatggtacagggcactcgctgtccccctccggccaccctagaccagggtccgagaggcaggcaggagccactcatgtcttccccattgcccgacgcccatagacgctccttcctgtgtggggctggggtactccctggtcgtactgcagtcagcacccgtaacccggctatgaccagggatctgtaagccctgtggctccacaggtgctgcttctcactggcccagactctgagctccaccggcccagtctgcacggcccatctgcttcaccttccctcccagccacgtgccagtggccacagcccacttcccaacccactgttgtacccaggcctcactttgctgttgcccttgtccctcttcgggccctgaattttctgttccctgggggccagccagggccctttgtgcccctcccagcacaggcctgatgcaggtgtccactcacaggtggcgctcacctaggctgtcacaggacccacctccatgccaggcaacagagggccacagaaccacccccacggctcactccttggtctggggccaccttcttgccctttctttttttttttttttttttttccgagatggagtctctctctgtcacccaggtgggagtgtggtggcacaatctcggctcactgcaacctccacctcctgagttcaagcaattctcctgcctcagcctcccaagtagctgggactacaggcatgcaccaccacacttggccaatgttctgtatttttaatagggacggggttttgccatgttagctaggctggtctcaaactcacacctgggattacaggcatgagccactgcacccagccccttcttgccctttcttttctccatggctgatgctgctgtggccagccagggcccttgagatccttccagtttggctgttatgcaaagcaggtgatttgtcttaatcagataaaagatagaggctatgggggcctcaagatttttggagagcagaggtggtctctggcaattccatctggttttgagaaacttagcagctcacagagcacagagatcctgccttcttcctactatcaggctgacctaatggggttgggctgctcggcaactgcttgggtcaccttgccccaaggaaaccagccctgggtgccacccagccacttagggtctacagggtgggactccagacctagagcgtaagtatggatgttgtggccctgtgtcttcctagtgtgacccagccaggagcggaagcttcaggcgtttgtaaagtgaggtctggctctgcctcctccgttttttttttttttctggtttctgtttctgtttttttttttggaaatggagtctcgctctgtcgcccaggcttggagtgcagtgtcacgatctcagctcactgcaacctccgcctcccaggtacaagagattctcctgcctcagcctcccgagtagctgggactacaggcgtgtgccaccatgcctggctaatttttggtatttttagtagagatggggtttcgccatgttagccagactggtctcgaactcctgacctcaggtgatcctcccaccccggcttcccaaagttctgggattataggcgtgagccaccatgcccggtctcttctcagtcttgaagcccatccctggatttccaccaggagttactttcctcctgacctgtaaatttgttctttaacaatggctgcaggtgggagcatatggtggtttataaaaacgctgtcgggctttgtttccttctttagctgccgtgtctacttctgaagtctgggaagtgccaagccacgcggcctcaagggagctggctggtgtttgagctgtggcagaagcacctggggctccagggagcaggctgggaactgcaggaccttgctcagccaggagcacttccccctccttgaggcaggaatactgaggtgcctccccacagatggagaaggtggagaggaggatgggcctcaggagcatctcaagccccagtagcaggagaaagaaagaaagagatgcctggttttcacagactggttcctgtggctgggatgactgcatccttttttttttttttttgagacggagtttttgcctttgtcgcccaggctggagtgcaatggcgtgatctcggctcaccgcaacctccgcctcccggattcaagcaattctcctgcctcagcctcccgagtagctgggattacaggcacgcacctccacgtccggctaattttgtatttttagtggagacggggtttctccatgtcggtcaggctggtctcgaactcccgacctcaggtgatctgcccacctcggcctcccaaagtgctgggattacaggcatgagccaccgcgcttggccagactgcgtcctttttaagcgaacattttagggcctgggagtttgtcaagtaaggaagtctcaagcccaaagagcagcgtcctgaccatggtggtttcattacgagcccttctgctggctctcaggcagaagccccacagcaccgggaccattcatgaggtcactgcccagctcatgatgtccgtgaggctgtccttttggccagtagccgtgtgcagctgtgtggcacagatggcttcgttcatcctgatcaaggccccacctcagccacagcagtccccccaacctgtgttgtccaccctattattcatgtacctgccaggccctgctagatagcaccccgtggcattacataacacttcatgagtggctgtgtcttgtaattttggggacaggtttctctctttccctctcttttttttgtcaaaagcccagagactgacaaccagctgcagtgtctaagtgttcctcactgacagggtggggcctcaccacccctggagggagcagcgttggcagggagacagcctggcccagtgaccctgggcccaagccagcccctccagggctttcagggaagcgccatccattttcaaagatgtcaaacgtcacttcttcctgtagggcccgagtcctgcctcctatcagggccagatcatagaaggctattttctattctggggaacgattataacttaaatgattgttttaataaaaattctaagctggaaaa

SEQ ID NO: 332208 - DNA, 5925 bp, Homo sapiens
gcggagtgaggacggtgacagccacgcgcgcgcgtacgcgcccgatgcagcgcggccccgtgaccctagtcggccgctgagaggcgcgcggagtctgggccgctgccgtctaggggtcccgtcccgaggcgtccccggcatctccggcccgaatcccggagtgccgggtcgcgcctgcaccgaaggtcccggctcctgtgccctccctgcagccgtcagggcccgtcccccaactcccctttccgctcaggcagggtcctcgcggcccatgctggccgctggggacccgcgcagcccagaccgttcccgggccggccagccggccaccatggtggccctgaggcctgtgcagcaactccaggggggctaaagggctcagagtgcaggccgtggggcgcgagggtcccgggcctgagccccgcgccatggccggggccatcgcttcccgcatgagcttcagctctctcaagaggaagcaacccaagacgttcaccgtgaggatcgtcaccatggacgccgagatggagttcaattgcgagatgaagtggaaagggaaggacctctttgatttggtgtgccggactctggggctccgagaaacctggttctttggactgcagtacacaatcaaggacacagtggcctggctcaaaatggacaagaaggtactggatcatgatgtttcaaaggaagaaccagtcacctttcacttcttggccaaattttatcctgagaatgctgaagaggagctggttcaggagatcacacaacatttattcttcttacaggtaaagaagcagattttagatgaaaagatctactgccctcctgaggcttctgtgctcctggcttcttacgccgtccaggccaagtatggtgactacgaccccagtgttcacaagcggggatttttggcccaagaggaattgcttccaaaaagggtaataaatctgtatcagatgactccggaaatgtgggaggagagaattactgcttggtacgcagagcaccgaggccgagccagggatgaagctgaaatggaatatctgaagatagctcaggacctggagatgtacggtgtgaactactttgcaatccggaataaaaagggcacagagctgctgcttggagtggatgccctggggcttcacatttatgaccctgagaacagactgacccccaagatctccttcccgtggaatgaaatccgaaacatctcgtacagtgacaaggagtttactattaaaccactggataagaaaattgatgtcttcaagtttaactcctcaaagcttcgtgttaataagctgattctccagctatgtatcgggaaccatgatctatttatgaggagaaggaaagccgattctttggaagttcagcagatgaaagcccaggccagggaggagaaggctagaaagcagatgaaagaagaagcaacaatggccaacgaagcactgatgcggtctgaggagacagctgacctgttggctgaaaaggcccagatcaccgaggaggaggcaaaacttctggcccagaaggccgcagaggctgagcaggaaatgcagcgcatcaaggccacagcgattcgcacggaggaggagaagcgcctgatggagcagaaggtgctggaagccgaggtgctggcactgaagatggctgaggagtcagagaggagggccaaagaggcagatcagctgaagcaggacctgcaggaagcacgcgaggcggagcgaagagccaagcagaagctcctggagattgccaccaagcccacgtacccgcccatgaacccaattccagcaccgttgcctcctgacataccaagcttcaacctcattggtgacagcctgtctttcgacttcaaagatactgacatgaagcggctttccatggagatagagaaagaaaaagtggaatacatggaaaagagcaagcatctgcaggagcagctcaatgaactcaagacagaaatcgaggccttgaaactgaaagagagggagacagctctggatattctgcacaatgagaactccgacaggggtggcagcagcaagcacaataccattaaaaagctcaccttgcagagcgccaagtcccgagtggccttctttgaagagctctagcaggtgacccagccaccccaggacctgccacttctcctgctaccgggaccgcgggatggaccagatatcaagagagccatccatagggagctggctgggggtttccgtgggagctccagaactttccccagctgagtgaagagcccagcccctcttatgtgcaattgccttgaactacgaccctgtagagatttctctcatggcgttctagttctctgacctgagtctttgttttaagaagtatttgtcttcctttgtctaatgtgggattcctgactcccttcgtccaaggcaccggtgtgtgtgtgtcttgcactccagagctgacctccaccgcccagcctgggaagtcactgtagggagtgagacactgaagccctgagaagccagtgccatcatccccaccccgcccagggttccggaacattcattcccccaccggtgaggacctggcatgcagcgaagcagcccagcccggcggatcccaggccagcacgcctgccggcttctcatcgtcagggagcccgcccagagctcgtgacgagcaagtgctgggtccccgccaggcaccccgaggcggcgctctggctggcagctggtggggaataggcagggcagctgtggctggggagagactttaggcagaagctgtgatgcaggctgactgccagccgaggggctgggtagtgccgtgcgggagctgatggtacagggcactcgctgtccccctccggccaccctagaccagggtccgagaggcaggcaggagccactcatgtcttccccattgcccgacgcccatagacgctccttcctgtgtggggctggggtactccctggtcgtactgcagtcagcacccgtaacccggctatgaccagggatctgtaagccctgtggctccacaggtgctgcttctcactggcccagactctgagctccaccggcccagtctgcacggcccatctgcttcaccttccctcccagccacgtgccagtggccacagcccacttcccaacccactgttgtacccaggcctcactttgctgttgcccttgtccctcttcgggccctgaattttctgttccctgggggccagccagggccctttgtgcccctcccagcacaggcctgatgcaggtgtccactcacaggtggcgctcacctaggctgtcacaggacccacctccatgccaggcaacagagggccacagaaccacccccacggctcactccttggtctggggccaccttcttgccctttctttttttttttttttttttttccgagatggagtctctctctgtcacccaggtgggagtgtggtggcacaatctcggctcactgcaacctccacctcctgagttcaagcaattctcctgcctcagcctcccaagtagctgggactacaggcatgcaccaccacacttggccaatgttctgtatttttaatagggacggggttttgccatgttagctaggctggtctcaaactcacacctgggattacaggcatgagccactgcacccagccccttcttgccctttcttttctccatggctgatgctgctgtggccagccagggcccttgagatccttccagtttggctgttatgcaaagcaggtgatttgtcttaatcagataaaagatagaggctatgggggcctcaagatttttggagagcagaggtggtctctggcaattccatctggttttgagaaacttagcagctcacagagcacagagatcctgccttcttcctactatcaggctgacctaatggggttgggctgctcggcaactgcttgggtcaccttgccccaaggaaaccagccctgggtgccacccagccacttagggtctacagggtgggactccagacctagagcgtaagtatggatgttgtggccctgtgtcttcctagtgtgacccagccaggagcggaagcttcaggcgtttgtaaagtgaggtctggctctgcctcctccgttttttttttttttctggtttctgtttctgtttttttttttggaaatggagtctcgctctgtcgcccaggcttggagtgcagtgtcacgatctcagctcactgcaacctccgcctcccaggtacaagagattctcctgcctcagcctcccgagtagctgggactacaggcgtgtgccaccatgcctggctaatttttggtatttttagtagagatggggtttcgccatgttagccagactggtctcgaactcctgacctcaggtgatcctcccaccccggcttcccaaagttctgggattataggcgtgagccaccatgcccggtctcttctcagtcttgaagcccatccctggatttccaccaggagttactttcctcctgacctgtaaatttgttctttaacaatggctgcaggtgggagcatatggtggtttataaaaacgctgtcgggctttgtttccttctttagctgccgtgtctacttctgaagtctgggaagtgccaagccacgcggcctcaagggagctggctggtgtttgagctgtggcagaagcacctggggctccagggagcaggctgggaactgcaggaccttgctcagccaggagcacttccccctccttgaggcaggaatactgaggtgcctccccacagatggagaaggtggagaggaggatgggcctcaggagcatctcaagccccagtagcaggagaaagaaagaaagagatgcctggttttcacagactggttcctgtggctgggatgactgcatccttttttttttttttttgagacggagtttttgcctttgtcgcccaggctggagtgcaatggcgtgatctcggctcaccgcaacctccgcctcccggattcaagcaattctcctgcctcagcctcccgagtagctgggattacaggcacgcacctccacgtccggctaattttgtatttttagtggagacggggtttctccatgtcggtcaggctggtctcgaactcccgacctcaggtgatctgcccacctcggcctcccaaagtgctgggattacaggcatgagccaccgcgcttggccagactgcgtcctttttaagcgaacattttagggcctgggagtttgtcaagtaaggaagtctcaagcccaaagagcagcgtcctgaccatggtggtttcattacgagcccttctgctggctctcaggcagaagccccacagcaccgggaccattcatgaggtcactgcccagctcatgatgtccgtgaggctgtccttttggccagtagccgtgtgcagctgtgtggcacagatggcttcgttcatcctgatcaaggccccacctcagccacagcagtccccccaacctgtgttgtccaccctattattcatgtacctgccaggccctgctagatagcaccccgtggcattacataacacttcatgagtggctgtgtcttgtaattttggggacaggtttctctctttccctctcttttttttgtcaaaagcccagagactgacaaccagctgcagtgtctaagtgttcctcactgacagggtggggcctcaccacccctggagggagcagcgttggcagggagacagcctggcccagtgaccctgggcccaagccagcccctccagggctttcagggaagcgccatccattttcaaagatgtcaaacgtcacttcttcctgtagggcccgagtcctgcctcctatcagggccagatcatagaaggctattttctattctggggaacgattataacttaaatgattgttttaataaaaattctaagctggaaaa

SEQ ID NO: 332209 - DNA, 5031 bp, Homo sapiens
gcggagtgaggacggtgacagccacgcgcgcgcgtacgcgcccgatgcagcgcggccccgtgaccctagtcggccgctgagaggcgcgcggagtctgggccgctgccgtctaggggtcccgtcccgaggcgtccccggcatctccggcccgaatcccggagtgccgggtcgcgcctgcaccgaaggtcccggctcctgtgccctccctgcagccgtcagggcccgtcccccaactcccctttccgctcaggcagggtcctcgcggcccatgctggccgctggggacccgcgcagcccagaccgttcccgggccggccagccggccaccatggtggccctgaggcctgtgcagcaactccaggggggctaaagggctcagagtgcaggccgtggggcgcgagggtcccgggcctgagccccgcgccatggccggggccatcgcttcccgcatgagcttcagctctctcaagaggaagcaacccaagacgttcaccgtgaggatcgtcaccatggacgccgagatggagttcaattgcgaggtaaagaagcagattttagatgaaaagatctactgccctcctgaggcttctgtgctcctggcttcttacgccgtccaggccaagaataaaaagggcacagagctgctgcttggagtggatgccctggggcttcacatttatgaccctgagaacagactgacccccaagatctccttcccgtggaatgaaatccgaaacatctcgtacagtgacaaggagtttactattaaaccactggataagaaaattgatgtcttcaagtttaactcctcaaagcttcgtgttaataagctgattctccagctatgtatcgggaaccatgatctatttatgaggagaaggaaagccgattctttggaagttcagcagatgaaagcccaggccagggaggagaaggctagaaagcagggccaaagaggcagatcagctgaagcaggacctgcaggaagcacgcgaggcggagcgaagagccaagcagaagctcctggagattgccaccaagcccacgtacccgcccatgaacccaattccagcaccgttgcctcctgacataccaagcttcaacctcattggtgacagcctgtctttcgacttcaaagatactgacatgaagcggctttccatggagatagagaaagaaaactcaccttgcagagcgccaagtcccgagtggccttctttgaagagctctagcaggtgacccagccaccccaggacctgccacttctcctgctaccgggaccgcgggatggaccagatatcaagagagccatccatagggagctggctgggggtttccgtgggagctccagaactttccccagctgagtgaagagcccagcccctcttatgtgcaattgccttgaactacgaccctgtagagatttctctcatggcgttctagttctctgacctgagtctttgttttaagaagtatttgtcttcctttgtctaatgtgggattcctgactcccttcgtccaaggcaccggtgtgtgtgtgtcttgcactccagagctgacctccaccgcccagcctgggaagtcactgtagggagtgagacactgaagccctgagaagccagtgccatcatccccaccccgcccagggttccggaacattcattcccccaccggtgaggacctggcatgcagcgaagcagcccagcccggcggatcccaggccagcacgcctgccggcttctcatcgtcagggagcccgcccagagctcgtgacgagcaagtgctgggtccccgccaggcaccccgaggcggcgctctggctggcagctggtggggaataggcagggcagctgtggctggggagagactttaggcagaagctgtgatgcaggctgactgccagccgaggggctgggtagtgccgtgcgggagctgatggtacagggcactcgctgtccccctccggccaccctagaccagggtccgagaggcaggcaggagccactcatgtcttccccattgcccgacgcccatagacgctccttcctgtgtggggctggggtactccctggtcgtactgcagtcagcacccgtaacccggctatgaccagggatctgtaagccctgtggctccacaggtgctgcttctcactggcccagactctgagctccaccggcccagtctgcacggcccatctgcttcaccttccctcccagccacgtgccagtggccacagcccacttcccaacccactgttgtacccaggcctcactttgctgttgcccttgtccctcttcgggccctgaattttctgttccctgggggccagccagggccctttgtgcccctcccagcacaggcctgatgcaggtgtccactcacaggtggcgctcacctaggctgtcacaggacccacctccatgccaggcaacagagggccacagaaccacccccacggctcactccttggtctggggccaccttcttgccctttctttttttttttttttttttttccgagatggagtctctctctgtcacccaggtgggagtgtggtggcacaatctcggctcactgcaacctccacctcctgagttcaagcaattctcctgcctcagcctcccaagtagctgggactacaggcatgcaccaccacacttggccaatgttctgtatttttaatagggacggggttttgccatgttagctaggctggtctcaaactcacacctgggattacaggcatgagccactgcacccagccccttcttgccctttcttttctccatggctgatgctgctgtggccagccagggcccttgagatccttccagtttggctgttatgcaaagcaggtgatttgtcttaatcagataaaagatagaggctatgggggcctcaagatttttggagagcagaggtggtctctggcaattccatctggttttgagaaacttagcagctcacagagcacagagatcctgccttcttcctactatcaggctgacctaatggggttgggctgctcggcaactgcttgggtcaccttgccccaaggaaaccagccctgggtgccacccagccacttagggtctacagggtgggactccagacctagagcgtaagtatggatgttgtggccctgtgtcttcctagtgtgacccagccaggagcggaagcttcaggcgtttgtaaagtgaggtctggctctgcctcctccgttttttttttttttctggtttctgtttctgtttttttttttggaaatggagtctcgctctgtcgcccaggcttggagtgcagtgtcacgatctcagctcactgcaacctccgcctcccaggtacaagagattctcctgcctcagcctcccgagtagctgggactacaggcgtgtgccaccatgcctggctaatttttggtatttttagtagagatggggtttcgccatgttagccagactggtctcgaactcctgacctcaggtgatcctcccaccccggcttcccaaagttctgggattataggcgtgagccaccatgcccggtctcttctcagtcttgaagcccatccctggatttccaccaggagttactttcctcctgacctgtaaatttgttctttaacaatggctgcaggtgggagcatatggtggtttataaaaacgctgtcgggctttgtttccttctttagctgccgtgtctacttctgaagtctgggaagtgccaagccacgcggcctcaagggagctggctggtgtttgagctgtggcagaagcacctggggctccagggagcaggctgggaactgcaggaccttgctcagccaggagcacttccccctccttgaggcaggaatactgaggtgcctccccacagatggagaaggtggagaggaggatgggcctcaggagcatctcaagccccagtagcaggagaaagaaagaaagagatgcctggttttcacagactggttcctgtggctgggatgactgcatccttttttttttttttttgagacggagtttttgcctttgtcgcccaggctggagtgcaatggcgtgatctcggctcaccgcaacctccgcctcccggattcaagcaattctcctgcctcagcctcccgagtagctgggattacaggcacgcacctccacgtccggctaattttgtatttttagtggagacggggtttctccatgtcggtcaggctggtctcgaactcccgacctcaggtgatctgcccacctcggcctcccaaagtgctgggattacaggcatgagccaccgcgcttggccagactgcgtcctttttaagcgaacattttagggcctgggagtttgtcaagtaaggaagtctcaagcccaaagagcagcgtcctgaccatggtggtttcattacgagcccttctgctggctctcaggcagaagccccacagcaccgggaccattcatgaggtcactgcccagctcatgatgtccgtgaggctgtccttttggccagtagccgtgtgcagctgtgtggcacagatggcttcgttcatcctgatcaaggccccacctcagccacagcagtccccccaacctgtgttgtccaccctattattcatgtacctgccaggccctgctagatagcaccccgtggcattacataacacttcatgagtggctgtgtcttgtaattttggggacaggtttctctctttccctctcttttttttgtcaaaagcccagagactgacaaccagctgcagtgtctaagtgttcctcactgacagggtggggcctcaccacccctggagggagcagcgttggcagggagacagcctggcccagtgaccctgggcccaagccagcccctccagggctttcagggaagcgccatccattttcaaagatgtcaaacgtcacttcttcctgtagggcccgagtcctgcctcctatcagggccagatcatagaaggctattttctattctggggaacgattataacttaaatgattgttttaataaaaattctaagctggaaaa

SEQ ID NO: 332210 - DNA, 4310 bp, Homo sapiens
gcggagtgaggacggtgacagccacgcgcgcgcgtacgcgcccgatgcagcgcggccccgtgaccctagtcggccgctgagaggcgcgcggagtctgggccgctgccgtctaggggtcccgtcccgaggcgtccccggcatctccggcccgaatcccggagtgccgggtcgcgcctgcaccgaaggtcccggctcctgtgccctccctgcagccgtcagggcccgtcccccaactcccctttccgctcaggcagggtcctcgcggcccatgctggccgctggggacccgcgcagcccagaccgttcccgggccggccagccggccaccatggtggccctgaggcctgtgcagcaactccaggggggctaaagggctcagagtgcaggccgtggggcgcgagggtcccgggcctgagccccgcgccatggccggggccatcgcttcccgcatgagcttcagctctctcaagaggaagcaacccaagacgttcaccgtgaggatcgtcaccatggacgccgagatggagttcaattgcgagatgaagtggaaagggaaggacctctttgatttggtgtgccggactctggggctccgagaaacctggttctttggactgcagtacacaatcaaggacacagtggcctggctcaaaatggacaagaaggtactggatcatgatgtttcaaaggaagaaccagtcacctttcacttcttggccaaattttatcctgagaatgctgaagaggagctggttcaggagatcacacaacatttattcttcttacaggtaaagaagcagattttagatgaaaagatctactgccctcctgaggcttctgtgctcctggcttcttacgccgtccaggccaagtatggtgactacgaccccagtgttcacaagcggggatttttggcccaagaggaattgcttccaaaaagggtaataaatctgtatcagatgactccggaaatgtgggaggagagaattactgcttggtacgcagagcaccgaggccgagccagggatgaagctgaaatggaatatctgaagatagctcaggacctggagatgtacggtgtgaactactttgcaatccggaataaaaagggcacagagctgctgcttggagtggatgccctggggcttcacatttatgaccctgagaacagactgacccccaagatctccttcccgtggaatgaaatccgaaacatctcgtacagtgacaaggagtttactattaaaccactggataagaaaattgatgtcttcaagtttaactcctcaaagcttcgtgttaataagctgattctccagctatgtatcgggaaccatgatctatttatgaggagaaggaaagccgattctttggaagttcagcagatgaaagcccaggccagggaggagaaggctagaaagcagatggagcggcagcgcctcgctcgagagaagcagatgagggaggaggctgaacgcacgagggatgagttggagaggaggctgctgcagatgaaagaagaagcaacaatggccaacgaagcactgatgcggtctgaggagacagctgacctgttggctgaaaaggcccagatcaccgaggaggaggcaaaacttctggcccagaaggccgcagaggctgagcaggaaatgcagcgcatcaaggccacagcgattcgcacggaggaggagaagcgcctgatggagcagaaggtgctggaagccgaggtgctggcactgaagatggctgaggagtcagagaggagggccaaagaggcagatcagctgaagcaggacctgcaggaagcacgcgaggcggagcgaagagccaagcagaagctcctggagattgccaccaagcccacgtacccgcccatgaacccaattccagcaccgttgcctcctgacataccaagcttcaacctcattggtgacagcctgtctttcgacttcaaagatactgacatgaagcggctttccatggagatagagaaagaaaaagtggaatacatggaaaagagcaagcatctgcaggagcagctcaatgaactcaagacagaaatcgaggccttgaaactgaaagagagggagacagctctggatattctgcacaatgagaactccgacaggggtggcagcagcaagcacaataccattaaaaagctcaccttgcagagcgccaagtcccgagtggccttctttgaagagctctagcaggtgacccagccaccccaggacctgccacttctcctgctaccgggaccgcgggatggaccagatatcaagagagccatccatagggagctggctgggggtttccgtgggagctccagaactttccccagctgagtgaagagcccagcccctcttatgtgcaattgccttgaactacgaccctgtagagatttctctcatggcgttctagttctctgacctgagtctttgttttaagaagtatttgtcttcctttgtctaatgtgggattcctgactcccttcgtccaaggcaccggtgtgtgtgtgtcttgcactccagagctgacctccaccgcccagcctgggaagtcactgtagggagtgagacactgaagccctgagaagccagtgccatcatccccaccccgcccagggttccggaacattcattcccccaccggtgaggacctggcatgcagcgaagcagcccagcccggcggatcccaggccagcacgcctgccggcttctcatcgtcagggagcccgcccagagctcgtgacgagcaagtgctgggtccccgccaggcaccccgaggcggcgctctggctggcagctggtggggaataggcagggcagctgtggctggggagagactttaggcagaagctgtgatgcaggctgactgccagccgaggggctgggtagtgccgtgcgggagctgatggtacagggcactcgctgtccccctccggccaccctagaccagggtccgagaggcaggcaggagccactcatgtcttccccattgcccgacgcccatagacgctccttcctgtgtggggctggggtactccctggtcgtactgcagtcagcacccgtaacccggctatgaccagggatctgtaagccctgtggctccacaggtgctgcttctcactggcccagactctgagctccaccggcccagtctgcacggcccatctgcttcaccttccctcccagccacgtgccagtggccacagcccacttcccaacccactgttgtacccaggcctcactttgctgttgcccttgtccctcttcgggccctgaattttctgttccctgggggccagccagggccctttgtgcccctcccagcacaggcctgatgcaggtgtccactcacaggtggcgctcacctaggctgtcacaggacccacctccatgccaggcaacagagggccacagaaccacccccacggctcactccttggtctggggccaccttcttgccctttctttttttttttttttttttttccgagatggagtctctctctgtcacccaggtgggagtgtggtggcacaatctcggctcactgcaacctccacctcctgagttcaagcaattctcctgcctcagcctcccaagtagctgggactacaggcatgcaccaccacacttggccaatgttctgtatttttaatagggacggggttttgccatgttagctaggctggtctcaaactcacacctgggattacaggcatgagccactgcacccagccccttcttgccctttcttttctccatggctgatgctgctgtggccagccagggcccttgagatccttccagtttggctgttatgcaaagcaggtgatttgtcttaatcagataaaagatagaggctatgggggcctcaagatttttggagagcagaggtggtctctggcaattccatctggttttgagaaacttagcagctcacagagcacagagatcctgccttcttcctactatcaggctgacctaatggggttgggctgctcggcaactgcttgggtcaccttgccccaaggaaaccagccctgggtgccacccagccacttagggtctacagggtgggactccagacctagagcgtaagtatggatgttgtggccctgtgtcttcctagtgtgacccagccaggagcggaaggtgaagcagatgggccgtgcagactgggccggtggagctcagagtctgggccagtgagaagcagcacctgtggagccacagggcttacagatcctggtcatagccgggttacgggtgctgactgcagtacgaccagggagtaccccag

SEQ ID NO: 332211 - DNA, 2581 bp, Homo sapiens
gcggagtgaggacggtgacagccacgcgcgcgcgtacgcgcccgatgcagcgcggccccgtgaccctagtcggccgctgagaggcgcgcggagtctgggccgctgccgtctaggggtcccgtcccgaggcgtccccggcatctccggcccgaatcccggagtgccgggtcgcgcctgcaccgaaggtcccggctcctgtgccctccctgcagccgtcagggcccgtcccccaactcccctttccgctcaggcagggtcctcgcggcccatgctggccgctggggacccgcgcagcccagaccgttcccgggccggccagccggccaccatggtggccctgaggcctgtgcagcaactccaggggggctaaagggctcagagtgcaggccgtggggcgcgagggtcccgggcctgagccccgcgccatggccggggccatcgcttcccgcatgagcttcagctctctcaagaggaagcaacccaagacgttcaccgtgaggatcgtcaccatggacgccgagatggagttcaattgcgagatgaagtggaaagggaaggacctctttgatttggtgtgccggactctggggctccgagaaacctggttctttggactgcagtacacaatcaaggacacagtggcctggctcaaaatggacaagaaggtactggatcatgatgtttcaaaggaagaaccagtcacctttcacttcttggccaaattttatcctgagaatgctgaagaggagctggttcaggagatcacacaacatttattcttcttacaggtaaagaagcagattttagatgaaaagatctactgccctcctgaggcttctgtgctcctggcttcttacgccgtccaggccaagtatggtgactacgaccccagtgttcacaagcggggatttttggcccaagaggaattgcttccaaaaagggtaataaatctgtatcagatgactccggaaatgtgggaggagagaattactgcttggtacgcagagcaccgaggccgagccagggatgaagctgaaatggaatatctgaagatagctcaggacctggagatgtacggtgtgaactactttgcaatccggaataaaaagggcacagagctgctgcttggagtggatgccctggggcttcacatttatgaccctgagaacagactgacccccaagatctccttcccgtggaatgaaatccgaaacatctcgtacagtgacaaggagtttactattaaaccactggataagaaaattgatgtcttcaagtttaactcctcaaagcttcgtgttaataagctgattctccagctatgtatcgggaaccatgatctatttatgaggagaaggaaagccgattctttggaagttcagcagatgaaagcccaggccagggaggagaaggctagaaagcagatgaaagaagaagcaacaatggccaacgaagcactgatgcggtctgaggagacagctgacctgttggctgaaaaggcccagatcaccgaggaggaggcaaaacttctggcccagaaggccgcagaggctgagcaggaaatgcagcgcatcaaggccacagcgattcgcacggaggaggagaagcgcctgatggagcagaaggtgctggaagccgaggtgctggcactgaagatggctgaggagtcagagaggagggccaaagaggcagatcagctgaagcaggacctgcaggaagcacgcgaggcggagcgaagagccaagcagaagctcctggagattgccaccaagcccacgtacccgcccatgaacccaattccagcaccgttgcctcctgacataccaagcttcaacctcattggtgacagcctgtctttcgacttcaaagatactgacatgaagcggctttccatggagatagagaaagaaaaagtggaatacatggaaaagagcaagcatctgcaggagcagctcaatgaactcaagacagaaatcgaggccttgaaactgaaagagagggagacagctctggatattctgcacaatgagaactccgacaggggtggcagcagcaagcacaataccattaaaaagcctcaagcccaaggcagaagacctatctgcatttgagccctcaaacttcctctccataggctgagcagagatgtggtcagagtgaactcacattggaacagtacactcacggcaccctggagaggagcggtcactggttgctgagtgaattaaccgaatgtttgctgcttttctcctgcaacagttcattattcctccagcatgcctaggcagtggagagaatgtattttgcccaataataaaatgacatcctgcctctacttctcacctaatccccagtagtacccatgccaacaagccccacaccacctgacagcagcataggatgtgtcctttggagtcttccctgcagtttctgctcatagagtggaataagctcattggaacctttctaacaaaaagagatctggcataagatagatcctacttgtggtcgttatcccatcaagagaggtcagctgttaaagtccctgatagatcttattaaaaggtacacttgagctgtc

SEQ ID NO: 332212 - DNA, 1340 bp, Homo sapiens
gcggagtgaggacggtgacagccacgcgcgcgcgtacgcgcccgatgcagcgcggccccgtgaccctagtcggccgctgagaggcgcgcggagtctgggccgctgccgtctaggggtcccgtcccgaggcgtccccggcatctccggcccgaatcccggagtgccgggtcgcgcctgcaccgaaggtcccggctcctgtgccctccctgcagccgtcagggcccgtcccccaactcccctttccgctcaggcagggtcctcgcggcccatgctggccgctggggacccgcgcagcccagaccgttcccgggccggccagccggccaccatggtggccctgaggcctgtgcagcaactccaggggggctaaagggctcagagtgcaggccgtggggcgcgagggtcccgggcctgagccccgcgccatggccggggccatcgcttcccgcatgagcttcagctctctcaagaggaagcaacccaagacgttcaccgtgaggatcgtcaccatggacgccgagatggagttcaattgcgagatgaagtggaaagggaaggacctctttgatttggtgtgccggactctggggctccgagaaacctggttctttggactgcagtacacaatcaaggacacagtggcctggctcaaaatggacaagaaggtactggatcatgatgtttcaaaggaagaaccagtcacctttcacttcttggccaaattttatcctgagaatgctgaagaggagctggttcaggagatcacacaacatttattcttcttacaggtaaagaagcagattttagatgaaaagatctactgccctcctgaggcttctgtgctcctggcttcttacgccgtccaggccaagtatggtgactacgaccccagtgttcacaagcggggatttttggcccaagaggaattgcttccaaaaagggtaataaatctgtatcagatgactccggaaatgtgggaggagagaattactgcttggtacgcagagcaccgaggccgagccagggatgaagctgaaatggaatatctgaagatagctcaggacctggagatgtacggtgtgaactactttgcaatccggaataaaaagggcacagagctgctgcttggagtggatgccctggggcttcacatttatgaccctgagaacagactgacccccaagatctccttcccgtggaatgaaatccgaaacatctcgtacagtgacaaggagccaaaggcatgggatggacaaaaatgcctgcccccgtgaaactggttggggagggcagttccccagcatccataaagtaataaagtcactgtgtgtaggcccgga

SEQ ID NO: 332213 - DNA, 1476 bp, Homo sapiens
tgcgaaggttctggacactgctcagggaagagcctgctacggtggactgtgagactcagtgcactgtcctcctcccagcgaccccacgctggaccccctgccggaccctccacccttcggcccccaagcttcccaggggcttcctttggactggactgtccctgctcatccattctcctgccacccccagacctcctcagctccaggttgccacctcctctcgccagagtgatgaggtcccggcttctgctctccgtggcccatctgcccacaattcgggagaccacggaggagatgctgcttgggggtcctggacaggagcccccaccctctcctagcctggatgactacgtgaggtctatatctcgactggcacagcccacctctgtgctggacaaggccacggcccagggccaacccaggccaccccacaggccagcccaggcctgccggaagggccgccctgctgtgtccctgcgagacatcaccgcacgtttcagtggccagcagcccacactgcccatggctgatactgtggaccccctggactggctttttggggagtcccaggaaaagcagccaagccagagggacctgccaaggaggactggcccctctgctggcctctggggtccacatagacagatggacagcagcaagcccatgggggcccccagagggaggctctgtgaagccaggatgcctgggcattccctggcaagaccaccgcaggatgggcagcagagctctgacctaagaagctggacttttgggcagtctgcccaagccatggcctcccgccaccgcccccgccccagcagtgtcctcagaacactctactcgcacctcccggtgatccatgaactctgacccctccccagtaaaggcttctgtagagagaaaaaaaaaaaaaaaaaaaaaaaaaaaaaaaaaaaaaaaaaaaaaaaaaaaaaaaaaaaaaaaaaaaaaaaaaaaaaaaaaaaaaggggggggcgggggaaaaaaaacccccagggggggacacaaacgaagacccgacaccccaaccagtaattggtaaaacaaggagggggccacacaaaacagagggaggcaaaatataataagacacaagaggcaaaggagcgcgtgataaaaaaaagagaaaaagaagagaggaacaaagaggcaaaaagggagcactaggatgaaacagaaacacataaacaggacggagggggaggaagaaaacaatgtatgtgggcccacaacacaactaccaccagagaaaaaaataatagaacgaggcatcgatagggggggagatataaaagaaaaaaatcgagagagaggagtataaagggaggagataaaaaaagaatgggaacaaaatgaggagagaagacgagaaacaaacatgtaaggaacaaaagaaaaaatataatctaaggagagaaaatatttataaccagcgggacggatattcaatactaagaa

SEQ ID NO: 332214 - DNA, 2132 bp, Homo sapiens
tgcgaaggttctggacactgctcagggaagagcctgctacggtggactgtgagactcagtgcactgtcctcctcccagcgaccccacgctggaccccctgccggaccctccacccttcggcccccaagcttcccaggggcttcctttggactggactgtccctgctcatccattctcctgccacccccagacctcctcagctccaggttgccacctcctctcgccagagtgatgaggtcccggcttctgctctccgtggcccatctgcccacaattcgggagaccacggaggagatgctgcttgggggtcctggacaggagcccccaccctctcctagcctggatgactacgtgaggtctatatctcgactggcacagcccacctctgtgctggacaaggccacggcccagggccaacccaggccaccccacaggccagcccaggcctgccggaagggccgccctgctgtgtccctgcgagacatcaccgcacgtttcagtggccagcagcccacactgcccatggctgatactgtggaccccctggactggctttttggggagtcccaggaaaagcagccaagccagagggacctgccaaggaggactggcccctctgctggcctctggggtccacatagacagatggacagcagcaagcccatgggggcccccagagggaggctctgtgaagccaggatgcctgggcattccctggcaagaccaccgcaggatgggcagcagagctctgacctaagaagctggacttttgggcagtctgcccaagccatggcctcccgccaccgcccccgccccagcagtgtcctcagaacactctactcgcacctcccggtgatccatgaactctgacccctccccagtaaaggcttctgtagagagcatgctgggtctgcatctcctctcgtctcctccatggtggtcactgcccctggcaggtctctgaaagggaaatgcttttctgcagaggcccctgcttgggcagttcacagtgagaccgaccccctctgaatatgataacagcctgtttcacatgaggagatgttaccaatcccgttcgctctgacccttgctggctgatcaccttgagcaacttacttaacatctgtgttcctcagtttctcatgggtaatatagggataattactggcacctgcctcccaggccattctgacgtgtaaccgcatataggagcccactggctgagtagctaccatcatcgctggtggggaaactggtggtaggggtgtgagggtagtgggggtgtcagccccccaggtgtttcagaacaaggcctcgggcactcccaagtctgcctcttggctcccaccctcaaagcccatgttctgtgaggcccaagagaacacatggagtcttagcaaatgcactaatgtattccgggggactgtcacctggcaccactggggcactctgctggctacaactcatacgtcctgtggtggcattgggagagttcccccatgatgagggccaagatagaatctgtaccactcagtgctaccatccccacccctacaccacttccacacaggggcctcatggcatggtcagggtcccagctgtgggtgagagcagggcactgtccagctgtccactggggaagtcaagatgtcctaaggcccaggccagggcatctggagtctgaaggaccctagttcctagaggcatctggcagcaagaaggtgaggcatcagggaacgggaatcaggctgggactgatcagaggtgaagggacagagagaggagaggaggaagattgagctgggggcaacagccaagctcacctgggcaggtctctgccacctccttgctctgtgagctgtcagtctaggttattctctttttttgtggctatttttaattgctttggatttgttaaatgttttctgtcttctgttaagtgtgttttctctggagatagaatgtaaaccatattaaaaggaaaaagtttcagacaagcaattacccagtttccttatctataaaatggggacatcagcaatgttcttcacaccctgcaagggctgggaattgcgcatgtgaacttggagctgcatttatgagcactgtagacaaatgtttgtatctgtcac

SEQ ID NO: 332215 - DNA, 583 bp, Homo sapiens
tgcgaaggttctggacactgctcagggaagagcctgctacggtggactgtgagactcagtgcactgtcctcctcccagcgaccccacgctggaccccctgccggaccctccacccttcggcccccaagcttcccaggggcttcctttggactggactgtccctgctcatccggtcagggtcccagctgtgggtgagagcagggcactgtccagctgtccactggggaagtcaagatgtcctaaggcccaggccagggcatctggagtctgaaggaccctagttcctagaggcatctggcagcaagaaggtgaggcatcagggaacgggaatcaggctgggactgatcagaggtgaagggacagagagaggagaggaggaagattgagctgggggcaacagccaagctcacctgggcaggtctctgccacctccttgctctgtgagctgtcagtctaggttattctctttttttgtggctatttttaattgctttggatttgttaaatgttttctgtcttctgttaagtgtgttttctctggagatagaatgtaaaccatattaaaaggaaaaagtttcagaca

SEQ ID NO: 332216 - DNA, 459 bp, Homo sapiens
gcctccctatgggttagagaccagggctgtctgtagagggctttgcatttataaagggattcaggggttatttcatgcatttcctacaacatcccggccagggagtcaagatgtcctaaggcccaggccagggcatctggagtctgaaggaccctagttcctagaggcatctggcagcaagaaggtgaggcatcagggaacgggaatcaggctgggactgatcagaggtgaagggacagagagaggagaggaggaagattgagctgggggcaacagccaagctcacctgggcaggtctctgccacctccttgctctgtgagctgtcagtctaggttattctctttttttgtggctatttttaattgctttggatttgttaaatgttttctgtcttctgttaagtgtgttttctctggagatagaatgtaaaccatattaaaaggaaaaagtttcagaca

SEQ ID NO: 332217 - DNA, 2054 bp, Homo sapiens
tgcgaaggttctggacactgctcagggaagagcctgctacggtggactgtgagactcagtgcactgtcctcctcccagcgaccccacgctggaccccctgccggaccctccacccttcggcccccaagcttcccaggggcttcctttggactggactgtccctgctcatccattctcctgccacccccagacctcctcagctccaggttgccacctcctctcgccagagtgatgaggtcccggcttctgctctccgtggcccatctgcccacaattcgggagaccacggaggagatgctgcttgggggtcctggacaggagcccccaccctctcctagcctggatgactacgtgaggtctatatctcgactggcacagcccacctctgtgctggacaaggccacggcccagggccaacccaggccaccccacaggccagcccaggcctgccggaagggccgccctgctgtgtccctgcgagacatcaccgcacgtttcagtggccagcagcccacactgcccatggctgatactgtggaccccctggactggctttttggggagtcccaggaaaagcagccaagccagagggacctgccaaggaggactggcccctctgctggcctctggggtccacatagacagatggacagcagcaagcccatgggggcccccagagggaggctctgtgaagccaggatgcctgggcattccctggcaagaccaccgcaggatgggcagcagagctctgacctaagaagctggacttttgggcagtctgcccaagccatggcctcccgccaccgcccccgccccagcagtgtcctcagaacactctactcgcacctcccggtgatccatgaactctgacccctccccagtaaaggcttctgtagagagcatgctgggtctgcatctcctctcgtctcctccatggtggtcactgcccctggcaggtctctgaaagggaaatgcttttctgcagaggcccctgcttgggcagttcacagtgagaccgaccccctctgaatatgataacagcctgtttcacatgaggagatgttaccaatcccgttcgctctgacccttgctggctgatcaccttgagcaacttacttaacatctgtgttcctcagtttctcatgggtaatatagggataattactggcacctgcctcccaggccattctgacgtgtaaccgcatataggagcccactggctgagtagctaccatcatcgctggtggggaaactggtggtaggggtgtgagggtagtgggggtgtcagccccccaggtgtttcagaacaaggcctcgggcactcccaagtctgcctcttggctcccaccctcaaagcccatgttctgtgaggcccaagagaacacatggagtcttagcaaatgcactaatgtattccgggggactgtcacctggcaccactggggcactctgctggctacaactcatacgtcctgtggtggcattgggagagttcccccatgatgagggccaagatagaatctgtaccactcagtgctaccatccccacccctacaccacttccacacaggggcctcatggcatggtcagggtcccagctgtgggtgagagcagggcactgtccagctgtccactggggaagtcaagatgtcctaaggcccaggccagggcatctggagtctgaaggaccctagttcctagaggcatctggcagcaagaaggtgaggcatcagggaacgggaatcaggctgggactgatcagaggtgaagggacagagagaggagaggaggaagattgagctgggggcaacagccaagctcacctgggcaggtctctgccacctccttgctctgtgagctgtcagtctaggttattctctttttttgtggctatttttaattgctttggatttgttaaatgttttctgtcttctgttaagtgtgttttctctggagatagaatgtaaaccatattaaaaggaaaaagtttcagacatgcccattataagacaaactcaagggggggcccggtgcccaatacgccctatagtgag

SEQ ID NO: 332218 - DNA, 1558 bp, Homo sapiens
tgcgaaggttctggacactgctcagggaagagcctgctacggtggactgtgagactcagtgcactgtcctcctcccagcgaccccacgctggaccccctgccggaccctccacccttcggcccccaagcttcccaggggcttcctttggactggactgtccctgctcatccattctcctgccacccccagacctcctcagctccaggttgccacctcctctcgccagagtgatgaggtcccggcttctgctctccgtggcccatctgcccacaattcgggagaccacggaggagatgctgcttgggggtcctggacaggagcccccaccctctcctagcctggatgactacgtgaggtctatatctcgactggcacagcccacctctgtgctggacaaggccacggcccagggccaacccaggccaccccacaggccagcccaggcctgccggaagggccgccctgctgtgtccctgcgagacatcaccgcacgtttcagtggccagcagcccacactgcccatggctgatactgtggaccccctggactggctttttggggagtcccaggaaaagcagccaagccagagggacctgccaaggaggactggcccctctgctggcctctggggtccacatagacagatggacagcagcaagcccatgggggcccccagagggaggctctgtgaagccaggatgcctgggcattccctggcaagaccaccgcaggatgggcagcagagctctgacctaagaagctggacttttgggcagtctgcccaagccatggcctcccgccaccgcccccgccccagcagtgtcctcagaacactctactcgcacctcccggtgatccatgaactctgacccctccccagtaaaggcttctgtagagagcatgctgggtctgcatctcctctcgtctcctccatggtggtcactgcccctggcaggtctctgaaagggaaatgcttttctgcagaggcccctgcttgggcagttcacagtgagaccgaccccctctgaatatgataacagcctgtttcacatgaggagatgttaccaatcccgttcgctctgacccttgctggctgatcaccttgagcaacttacttaacatctgtgttcctcagtttctcatggggtcagggtcccagctgtgggtgagagcagggcactgtccagctgtccactggggaagtcaagatgtcctaaggcccaggccagggcatctggagtctgaaggaccctagttcctagaggcatctggcagcaagaaggtgaggcatcagggaacgggaatcaggctgggactgatcagaggtgaagggacagagagaggagaggaggaagattgagctgggggcaacagccaagctcacctgggcaggtctctgccacctccttgctctgtgagctgtcagtctaggttattctctttttttgtggctatttttaattgctttggatttgttaaatgttttctgtcttctgttaagtgtgttttctctggagatagaatgtaaaccatattaaaaggaaaaagtttcagaca

SEQ ID NO: 332219 - DNA, 843 bp, Homo sapiens
tgcgaaggttctggacactgctcagggaagagcctgctacggtggactgtgagactcagtgcactgtcctcctcccagcgaccccacgctggaccccctgccggaccctccacccttcggcccccaagcttcccaggggcttcctttggactggactgtccctgctcatccattctcctgccacccccagacctcctcagctccaggttgccacctcctctcgccagagtgatgaggtcccggcttctgctctccgtggcccatctgcccacaattcgggagaccacggaggagatgctgcttgggggtcctggacaggagcccccaccctctcctagcctggatgactacagtcaagatgtcctaaggcccaggccagggcatctggagtctgaaggaccctagttcctagaggcatctggcagcaagaaggtgaggcatcagggaacgggaatcaggctgggactgatcagaggtgaagggacagagagaggagaggaggaagattgagctgggggcaacagccaagctcacctgggcaggtctctgccacctccttgctctgtgagctgtcagtctaggttattctctttttttgtggctatttttaattgctttggatttgttaaatgttttctgtcttctgttaagtgtgttttctctggagatagaatgtaaaccatattaaaaggaaaaagtttcagacaagcaattacccagtttccttatctataaaatggggacatcagcaatgttcttcacaccctgcaagggctgggaattgcgcatgtgaacttggagctgcatttatgagcactgtagacaaatgtttgtatctgtcac

SEQ ID NO: 332220 - DNA, 649 bp, Homo sapiens
actcagtgcactgtcctcctcccagcgaccccacgctggaccccctgccggaccctccacccttcggcccccaagcttcccaggggcttcctttggactggactgtccctgctcatccattctcctgccacccccagacctcctcagctccaggtaagagagagcagctgcccttgggtttgagacaaaacacaagggctttgtttatttttgagggcaattcccagcctgaacttgcacagcctccctatgggttagagaccagggctgtctgtagagggctttgcatttataaagggattcaggggttatttcatgcatttcctacaacatcccggccaggggtatttataaccctgttttatggatgggtaagtggaggcctggagaggtggccttgccaaaggtcccatggtcagtgcgtggccgatcctggttttaaacccagccttcctctgaccagtgtttgttaggttaggttctcttatctgtgcacattctgaaacgataatgataaaatcttaagcctttggggtttttaacctgaacaggaagaaaagatcccagcagtcggagctctggtctgggctctgtagacttcaaattgctctcagggcaccggattcctacaggcagccccagaggagtg

SEQ ID NO: 332221 - DNA, 1996 bp, Homo sapiens
tgcgaaggttctggacactgctcagggaagagcctgctacggtggactgtgagactcagtgcactgtcctcctcccagcgaccccacgctggaccccctgccggaccctccacccttcggcccccaagcttcccaggggcttcctttggactggactgtccctgctcatccattctcctgccacccccagacctcctcagctccaggttgccacctcctctcgccagagtgatgaggtcccggcttctgctctccgtggcccatctgcccacaattcgggagaccacggaggagatgctgcttgggggtcctggacaggagcccccaccctctcctagcctggatgactacgtgaggtctatatctcgactggcacagcccacctctgtgctggacaaggccacggcccagggccaacccaggccaccccacaggccagcccaggcctgccggaagggccgccctgctgtgtccctgcgagacatcaccgcacgtttcagtggccagcagcccacactgcccatggctgatactgtggaccccctggactggctttttggggagtcccaggaaaagcagccaagccagagggacctgccaaggaggactggcccctctgctggcctctggggtccacatagacagatggacagcagcaagcccatgggggcccccagagggaggctctgtgaagccaggatgcctgggcattccctggcaagaccaccgcaggatgggcagcagagctctgacctaagaagctggacttttgggcagtctgcccaagccatggcctcccgccaccgcccccgccccagcagtgtcctcagaacactctactcgcacctcccggtgatccatgaactctgacccctccccagtaaaggcttctgtagagagcatgctgggtctgcatctcctctcgtctcctccatggtggtcactgcccctggcaggtctctgaaagggaaatgcttttctgcagaggcccctgcttgggcagttcacagtgagaccgaccccctctgaatatgataacagcctgtttcacatgaggagatgttaccaatcccgttcgctctgacccttgctggctgatcaccttgagcaacttacttaacatctgtgttcctcagtttctcatgggtaatatagggataattactggcacctgcctcccaggccattctgacgtgtaaccgcatataggagcccactggctgagtagctaccatcatcgctggtggggaaactggtggtaggggtgtgagggtagtgggggtgtcagccccccaggtgtttcagaacaaggcctcgggcactcccaagtctgcctcttggctcccaccctcaaagcccatgttctgtgaggcccaagagaacacatggagtcttagcaaatgcactaatgtattccgggggactgtcacctggcaccactggggcactctgctggctacaactcatacgtcctgtggtggcattgggagagttcccccatgatgagggccaagatagaatctgtaccactcagtgctaccatccccacccctacaccacttccacacaggggcctcatggcatggtcagggtcccagctgtgggtgagagcagggcactgtccagctgtccactggggaagtcaagatgtcctaaggcccaggccagggcatctggagtctgaaggaccctagttcctagaggcatctggcagcaagaaggtgaggcatcagggaacgggaatcaggctgggactgatcagaggtgaagggacagagagaggagaggaggaagattgagctgggggcaacagccaagctcacctgggcaggtctctgccacctccttgctctgtgagctgtcagtctaggttattctctttttttgtggctatttttaattgctttggatttgttaaatgttttctgtcttctgttaagtgtgttttctctggagatagaatgtaaaccatattaaaaggaaaaagtttcagaca

SEQ ID NO: 332222 - DNA, 1856 bp, Homo sapiens
  misc_feature (1761)..(1761): n is a, c, g, or t
  misc_feature (1767)..(1767): n is a, c, g, or t
  misc_feature (1801)..(1801): n is a, c, g, or t
  misc_feature (1814)..(1814): n is a, c, g, or t
  misc_feature (1834)..(1834): n is a, c, g, or t
  misc_feature (1839)..(1839): n is a, c, g, or t
tgcgaaggttctggacactgctcagggaagagcctgctacggtggactgtgagactcagtgcactgtcctcctcccagcgaccccacgctggaccccctgccggaccctccacccttcggcccccaagcttcccaggggcttcctttggactggactgtccctgctcatccattctcctgccacccccagacctcctcagctccaggttgccacctcctctcgccagagtgatgaggtcccggcttctgctctccgtggcccatctgcccacaattcgggagaccacggaggagatgctgcttgggggtcctggacaggagcccccaccctctcctagcctggatgactacgtgaggtctatatctcgactggcacagcccacctctgtgctggacaaggccacggcccagggccaacccaggccaccccacaggccagcccaggcctgccggaagggccgccctgctgtgtccctgcgagacatcaccgcacgtttcagtggccagcagcccacactgcccatggctgatactgtggaccccctggactggctttttggggagtcccaggaaaagcagccaagccagagggacctgccaaggaggactggcccctctgctggcctctggggtccacatagacagatggacagcagcaagcccatgggggcccccagagggaggctctgtgaagccaggatgcctgggcattccctggcaagaccaccgcaggatgggcagcagagctctgacctaagaagctggacttttgggcagtctgcccaagccatggcctcccgccaccgcccccgccccagcagtgtcctcagaacactctactcgcacctcccggtgatccatgaactctgacccctccccagtaaaggcttctgtagagagcatgctgggtctgcatctcctctcgtctcctccatggtggtcactgcccctggcaggtctctgaaagggaaatgcttttctgcagaggcccctgcttgggcagttcacagtgagaccgaccccctctgaatatgataacagcctgtttcacatgaggagatgttaccaatcccgttcgctctgacccttgctggctgatcaccttgagcaacttacttaacatctgtgttcctcagtttctcatgggtaatatagggataattactggcacctgcctcccaggccattctgacgtgtaaccgcatataggagcccactggctgagtagctaccatcatcgctggtggggaaactggtggtaggggtgtgagggtagtgggggtgtcagccccccaggtgtttcagaacaaggcctcgggcactcccaagtctgcctcttggctcccaccctcaaagcccatgttctgtgaggcccaagagaacacatggagtcttagcaaatgcactaatgtattccgggggactgtcacctggcaccactggggcactctgctggctacaactcatacgtcctgtggtggcattgggagagttcccccatgatgagggccaagatagaatctgtaccactcagtgctaccatccccacccctacaccacttccacacaggggcctcatggcatggtcagggtcccagctgtgggtgagagcagggcactgtccagctgtccactggggaagtcaagatgtcctaaggcccaggccagggcatctggagtctgaaggaccctagttcctagaggcatctggcagcaagaaggtgaggcatcagggaacgggaatcaggctggtgggctatntcgctnttggggaccacgagggatggccagtgaggagggntcagagtactgtnaggggaggactgaggctggnttctnggatctttaggagcagt

SEQ ID NO: 332223 - DNA, 1093 bp, Homo sapiens
cagctcagctcgtggttagccataggcagcccctgtcttcagccctcacgcgctaccccctccagtggtggccgtgcctttacccgggacactttagggggtctgtgctggggcgaggacggggatggaaagtcgatccatggagtgctcagctaaaaacaaggtttgtcctatttttacataaatcgcgccaatggagtatcactaggccgcgaccaggagagagatgcctctgcccctccagccctagccgagggtggctccataggacggcgtctagtgctcccaagtctgcctcttggctcccaccctcaaagcccatgttctgtgaggcccaagagaacacatggagtcttagcaaatgcactaatgtattccgggggactgtcacctggcaccactggggcactctgctggctacaactcatacgtcctgtggtggcattgggagagttcccccatgatgagggccaagatagaatctgtaccactcagtgctaccatccccacccctacaccacttccacacaggggcctcatggcatggtcagggtcccagctgtgggtgagagcagggcactgtccagctgtccactggggaagtcaagatgtcctaaggcccaggccagggcatctggagtctgaaggaccctagttcctagaggcatctggcagcaagaaggtgaggcatcagggaacgggaatcaggctgggactgatcagaggtgaagggacagagagaggagaggaggaagattgagctgggggcaacagccaagctcacctgggcaggtctctgccacctccttgctctgtgagctgtcagtctaggttattctctttttttgtggctatttttaattgctttggatttgttaaatgttttctgtcttctgttaagtgtgttttctctggagatagaatgtaaaccatattaaaaggaaaaagtttcagacaagcaattacccagtttccttatctataaaatggggacatcagcaatgttcttcacaccctgcaagggctgggaattgcgcatgtgaacttggagctgcatttatgagcactgtagacaaatgtttgtatctgtcac

SEQ ID NO: 332224 - DNA, 892 bp, Homo sapiens
agccaaaagaggaagggaccgcctcccacgtccacagggacctgacttccacctctctgcccagatttgcttatgtcactgtcgccccgggacggggaggtggggagctgagggcaagtcgcgcccgcccctgaaatcccagccgcctagcgattggctgcaagggtctcggcttggccgcggattggtcacacccgagggcttgaaaggtggctgggagcgccggacacctcagacggacggtggccagggatcaggcagcggctcaggcgaccctgagtgtgcccccaccccgccatggcccggctgctgcaggcgtcctgcctgctttccctgctcctggccggcttcgtctcgcagagccggggacaagagaagtcgaagatggactgccatggtggcataagtggcaccatttacgagtacggagccctcaccattgatggggaggagtacatccccttcaagcagtatgctggcaaatacgtcctctttgtcaacgtggccagctactgaggcctgacgggccagtacattgaactgaatgcactacaggaagagcttgcaccattcggtctggtcattctgggctttccctgcaaccaatttggaaaacaggaaccaggagagaactcagagatccttcctaccctcaagtatgtccgaccaggtggaggctttgtccctaatttccagctctttgagaaaggggatgtcaatggagagaaagagcagaaattctacactttcctaaagaactcctgtcctcccacctcggagctcctgggtacatctgaccgcctcttctgggaacccatgaaggttcacggaaccaatttttcccccgggggccctttggggggggaaaaaaaaaaacccttttttttttacg

SEQ ID NO: 332225 - DNA, 242 bp, Homo sapiens
catgatgacagacgaatgtgcagctcttcctaccctcaagtatgtccgaccaggtggaggctttgtccctaatttccagctctttgagaaaggggatgtcaatggagagaaagagcagaaattctacactttcctaaagaactcctgtcctcccacctcggacatacttgagggtaggaaggatctctgagttctctcctggttcctgttttccaaattggttgcagggaaagcccagaatg

SEQ ID NO: 332226 - DNA, 2239 bp, Homo sapiens
agccaaaagaggaagggaccgcctcccacgtccacagggacctgacttccacctctctgcccagatttgcttatgtcactgtcgccccgggacggggaggtggggagctgagggcaagtcgcgcccgcccctgaaatcccagccgcctagcgattggctgcaagggtctcggcttggccgcggattggtcacacccgagggcttgaaaggtggctgggagcgccggacacctcagacggacggtggccagggatcaggcagcggctcaggcgaccctgagtgtgcccccaccccgccatggcccggctgctgcaggcgtcctgcctgctttccctgctcctggccggcttcgtctcgcagagccggggacaagagaagtcgaagatggactgccatggtggcataagtggcaccatttacgagtacggagccctcaccattgatggggaggagtacatccccttcaagcagtatgctggcaaatacgtcctctttgtcaacgtggccagctactgaggcctgacgggccagtacattgaactgaatgcactacaggaagagcttgcaccattcggtctggtcattctgggctttccctgcaaccaatttggaaaacaggaaccaggagagaactcagagatccttcctaccctcaagtatgtccgaccaggtggaggctttgtccctaatttccagctctttgagaaaggggatgtcaatggagagaaagagcagaaattctacactttcctaaagaactcctgtcctcccacctcggagctcctgggtacatctgaccgcctcttctgggaacccatgaaggttcacgacatccgctggaactttgagaagttcctggtggggccagatggtatacccatcatgcgctggcaccaccggaccacggtcagcaacgtcaagatggacatcctgtcctacatgaggcggcaggcagccctgggggtcaagaggaagtaactgaaggccgtctcatcccatgtccaccatgtaggggagggactttgttcaggaagaaatccgtgtctccaaccacactatctacccatcacagacccctttcctatcactcaaggccccagcctggcacaaatggatgcatacagttctgtgtactgccaggcatgtgggtgtgggtgcatgtgggtgtttacacacatgcctacaggtatgcgtgattgtgtgtgtgtgcatgggtgtacagccacgtgtctacctatgtgtctttctgggaatgtgtaccatctgtgtgcctgcagctgtgtagtgctggacagtgacaaccctttctctccagttctccactccaatgataatagttcacttacacctaaacccaaaggaaaaaccagctctaggtccaattgttctgctctaactgatacctcaaccttggggccagcatctcccactgcctccaaatattagtaactatgactgacgtccccagaagtttctgggtctaccacactccccaaccccccactcctacttcctgaagggccctcccaaggctacatccccaccccacagttctccctgagagagatcaacctccctgagatcaaccaaggcagatgtgacagcaagggccacggaccccatggcaggggtggcgtcttcatgagggaggggcccaaagcccttgtgggcggacctcccctgagcctgtctgaggggccagcccttagtgcattcaggctaaggcccctgggcagggatgccacccctgctccttcggaggacgtgccctcacccctcactggtccactggcttgagactcaccccgtctgcccagtaaaagcctttctgcagcagctgaaaaaaaaaaaaaaaaaaaaaaaaaaaaaaaaaaaaaaaaaaaaaaaaaaaaaaaaaaaaaaaaaaaaaaaaaaaaaagagagggggcggcgcgcgccccaaaacttctccccggcgggggcgcgccccggagcgcgcccccccctgttttggtgacaaagggggcggccccacagagagagaggagagctatctatattatataccagacgagcgcggcgcgcggcgcgcgcgggttattaacaacgacaacgaggcgagcgggggggagagaaaccaaccggcggagcccgcggaggcgattcttatgagtgagaagaggcgccccccctcttatctcgcgcggggggggggggcacgcacattcagggcggcggcacaccacaccctcgcgtgagg

SEQ ID NO: 332227 - DNA, 2013 bp, Homo sapiens
agccaaaagaggaagggaccgcctcccacgtccacagggacctgacttccacctctctgcccagatttgcttatgtcactgtcgccccgggacggggaggtggggagctgagggcaagtcgcgcccgcccctgaaatcccagccgcctagcgattggctgcaagggtctcggcttggccgcggattggtcacacccgagggcttgaaaggtggctgggagcgccggacacctcagacggacggtggccagggatcaggcagcggctcaggcgaccctgagtgtgcccccaccccgccatggcccggctgctgcaggcgtcctgcctgctttccctgctcctggccggcttcgtctcgcagagccggggacaagagaagtcgaagatggactgccatggtggcataagtggcaccatttacgagtacggagccctcaccattgatggggaggagtacatccccttcaagcagtatgctggcaaatacgtcctctttgtcaacgtggccagctactgaggcctgacgggccagtacattgaactgaatgcactacaggaagagcttgcaccattcggtctggtcattctgggctttccctgcaaccaatttggaaaacaggaaccaggagagaactcagagatccttcctaccctcaagtatgtccgaccaggtggaggctttgtccctaatttccagctctttgagaaaggggatgtcaatggagagaaagagcagaaattctacactttcctaaagaactcctgtcctcccacctcggagctcctgggtacatctgaccgcctcttctgggaacccatgaaggttcacgacatccgctggaactttgagaagttcctggtggggccagatggtatacccatcatgcgctggcaccaccggaccacggtcagcaacgtcaagatggacatcctgtcctacatgaggcggcaggcagccctgggggtcaagaggaagtaactgaaggccgtctcatcccatgtccaccatgtaggggagggactttgttcaggaagaaatccgtgtctccaaccacactatctacccatcacagacccctttcctatcactcaaggccccagcctggcacaaatggatgcatacagttctgtgtactgccaggcatgtgggtgtgggtgcatgtgggtgtttacacacatgcctacaggtatgcgtgattgtgtgtgtgtgcatgggtgtacagccacgtgtctacctatgtgtctttctgggaatgtgtaccatctgtgtgcctgcagctgtgtagtgctggacagtgacaaccctttctctccagttctccactccaatgataatagttcacttacacctaaacccaaaggaaaaaccagctctaggtccaattgttctgctctaactgatacctcaaccttggggccagcatctcccactgcctccaaatattagtaactatgactgacgtccccagaagtttctgggtctaccacactccccaaccccccactcctacttcctgaagggccctcccaaggctacatccccaccccacagttctccctgagagagatcaacctccctgagatcaaccaaggcagatgtgacagcaagggccacggaccccatggcaggggtggcgtcttcatgagggaggggcccaaagcccttgtgggcggacctcccctgagcctgtctgaggggccagcccttagtgcattcaggctaaggcccctgggcagggatgccacccctgctccttcggaggacgtgccctcacccctcactggtccactggcttgagactcaccccgtctgcccagtaaaagcctttctgcagcagctgatgcaaacacacaatgcagctgcaaacacacaatgctgctgcaaacacacaatgcagctgcaaacacacaatgcagctgcaaacacacaatgcagctgcaaacacacaatgcagctgcaaacacacaatgcagctgcaaacacacaatgcagctgcaaacacaatgccgggga

SEQ ID NO: 332228 - DNA, 1894 bp, Homo sapiens
atgctgcggtcgctctagagatccctcgaagatggcggtatggactgccatggtggcataagtggcaccatttacgagtacggagccctcaccattgatggggaggagtacatccccttcaagcagtatgctggcaaatacgtcctctttgtcaacgtggccagctactgaggcctgacgggccagtacattgaactgaatgcactacaggaagagcttgcaccattcggtctggtcattctgggctttccctgcaaccaatttggaaaacaggaaccaggagagaactcagagatccttcctaccctcaagtatgtccgaccaggtggaggctttgtccctaatttccagctctttgagaaaggggatgtcaatggagagaaagagcagaaattctacactttcctaaagaactcctgtcctcccacctcggagctcctgggtacatctgaccgcctcttctgggaacccatgaaggttcacgacatccgctggaactttgagaagttcctggtggggccagatggtatacccatcatgcgctggcaccaccggaccacggtcagcaacgtcaagatggacatcctgtcctacatgaggcggcaggcagccctgggggtcaagaggaagtaactgaaggccgtctcatcccatgtccaccatgtaggggagggactttgttcaggaagaaatccgtgtctccaaccacactatctacccatcacagacccctttcctatcactcaaggccccagcctggcacaaatggatgcatacagttctgtgtactgccaggcatgtgggtgtgggtgcatgtgggtgtttacacacatgcctacaggtatgcgtgattgtgtgtgtgtgcatgggtgtacagccacgtgtctacctatgtgtctttctgggaatgtgtaccatctgtgtgcctgcagctgtgtagtgctggacagtgacaaccctttctctccagttctccactccaatgataatagttcacttacacctaaacccaaaggaaaaaccagctctaggtccaattgttctgctctaactgatacctcaaccttggggccagcatctcccactgcctccaaatattagtaactatgactgacgtccccagaagtttctgggtctaccacactccccaaccccccactcctacttcctgaagggccctcccaaggctacatccccaccccacagttctccctgagagagatcaacctccctgagatcaaccaaggcagatgtgacagcaagggccacggaccccatggcaggggtggcgtcttcatgagggaggggcccaaagcccttgtgggcggacctcccctgagcctgtctgaggggccagcccttagtgcattcaggctaaggcccctgggcagggatgccacccctgctccttcggaggacgtgccctcacccctcactggtccactggcttgagactcaccccgtctgcccagtaaaagcctttctgcagcagctgaaaaaaaaaaaaaaaaaaaaaaaaaaaaaaaaaaaaaaaaaaaaaaaaaaaaaaaaaaaaaaaaaaaaaaaaaaaaaagagagggggcggcgcgcgccccaaaacttctccccggcgggggcgcgccccggagcgcgcccccccctgttttggtgacaaagggggcggccccacagagagagaggagagctatctatattatataccagacgagcgcggcgcgcggcgcgcgcgggttattaacaacgacaacgaggcgagcgggggggagagaaaccaaccggcggagcccgcggaggcgattcttatgagtgagaagaggcgccccccctcttatctcgcgcggggggggggggcacgcacattcagggcggcggcacaccacaccctcgcgtgagg

SEQ ID NO: 332229 - DNA, 2191 bp, Homo sapiens
agccaaaagaggaagggaccgcctcccacgtccacagggacctgacttccacctctctgcccagatttgcttatgtcactgtcgccccgggacggggaggtggggagctgagggcaagtcgcgcccgcccctgaaatcccagccgcctagcgattggctgcaagggtctcggcttggccgcggattggtcacacccgagggcttgaaaggtggctgggagcgccggacacctcagacggacggtggccagggatcaggcagcggctcaggcgaccctgagtgtgcccccaccccgccatggcccggctgctgcaggcgtcctgcctgctttccctgctcctggccggcttcgtctcgcagagccggggacaagagaagtcgaagatggactgccatggtggcataagtggcaccatttacgagtacggagccctcaccattgatggggaggagtacatccccttcaagcagtatgctggcaaatacgtcctctttgtcaacgtggccagctactgaggcctgacgggccagtacattgaactgaatgcactacaggaagagcttgcaccattcggtctggtcattctgggctttccctgcaaccaattgtatgtccgaccaggtggaggctttgtccctaatttccagctctttgagaaaggggatgtcaatggagagaaagagcagaaattctacactttcctaaagaactcctgtcctcccacctcggagctcctgggtacatctgaccgcctcttctgggaacccatgaaggttcacgacatccgctggaactttgagaagttcctggtggggccagatggtatacccatcatgcgctggcaccaccggaccacggtcagcaacgtcaagatggacatcctgtcctacatgaggcggcaggcagccctgggggtcaagaggaagtaactgaaggccgtctcatcccatgtccaccatgtaggggagggactttgttcaggaagaaatccgtgtctccaaccacactatctacccatcacagacccctttcctatcactcaaggccccagcctggcacaaatggatgcatacagttctgtgtactgccaggcatgtgggtgtgggtgcatgtgggtgtttacacacatgcctacaggtatgcgtgattgtgtgtgtgtgcatgggtgtacagccacgtgtctacctatgtgtctttctgggaatgtgtaccatctgtgtgcctgcagctgtgtagtgctggacagtgacaaccctttctctccagttctccactccaatgataatagttcacttacacctaaacccaaaggaaaaaccagctctaggtccaattgttctgctctaactgatacctcaaccttggggccagcatctcccactgcctccaaatattagtaactatgactgacgtccccagaagtttctgggtctaccacactccccaaccccccactcctacttcctgaagggccctcccaaggctacatccccaccccacagttctccctgagagagatcaacctccctgagatcaaccaaggcagatgtgacagcaagggccacggaccccatggcaggggtggcgtcttcatgagggaggggcccaaagcccttgtgggcggacctcccctgagcctgtctgaggggccagcccttagtgcattcaggctaaggcccctgggcagggatgccacccctgctccttcggaggacgtgccctcacccctcactggtccactggcttgagactcaccccgtctgcccagtaaaagcctttctgcagcagctgaaaaaaaaaaaaaaaaaaaaaaaaaaaaaaaaaaaaaaaaaaaaaaaaaaaaaaaaaaaaaaaaaaaaaaaaaaaaaagagagggggcggcgcgcgccccaaaacttctccccggcgggggcgcgccccggagcgcgcccccccctgttttggtgacaaagggggcggccccacagagagagaggagagctatctatattatataccagacgagcgcggcgcgcggcgcgcgcgggttattaacaacgacaacgaggcgagcgggggggagagaaaccaaccggcggagcccgcggaggcgattcttatgagtgagaagaggcgccccccctcttatctcgcgcggggggggggggcacgcacattcagggcggcggcacaccacaccctcgcgtgagg

SEQ ID NO: 332230 - DNA, 2156 bp, Homo sapiens
cactgaggaaactggggagctgggccagggcctcatctgtgttcctgatttgccaaagattatgggagggttgtaacctcaccccaaagaagttctctgccttgtatccagggatggatagttcttgctccagaaaactcaatcctgagggttctgaatgagtgctctagctggcccaggtggagggccttggcaatgggcaggtgactgacagctgacttgaggaagggtattattcttgtcctccaaacctccaatccatccagattagagtcaagaggataggacctgagtcccagcattgctgtgaactcactggtgatcctgcgcaagtccctccctttctcgggcctcagtagttccagcggcacagcgggtgagccgggggagtggtgtggatgagacagggctcctcgccaggatactcccacatctgctctttctctttggcccagaactgaatgcactacaggaagagcttgcaccattcggtctggtcattctgggctttccctgcaaccaatttggaaaacaggaaccaggagagaactcagagatccttcctaccctcaagtatgtccgaccaggtggaggctttgtccctaatttccagctctttgagaaaggggatgtcaatggagagaaagagcagaaattctacactttcctaaagaactcctgtcctcccacctcggagctcctgggtacatctgaccgcctcttctgggaacccatgaaggttcacgacatccgctggaactttgagaagttcctggtggggccagatggtatacccatcatgcgctggcaccaccggaccacggtcagcaacgtcaagatggacatcctgtcctacatgaggcggcaggcagccctgggggtcaagaggaagtaactgaaggccgtctcatcccatgtccaccatgtaggggagggactttgttcaggaagaaatccgtgtctccaaccacactatctacccatcacagacccctttcctatcactcaaggccccagcctggcacaaatggatgcatacagttctgtgtactgccaggcatgtgggtgtgggtgcatgtgggtgtttacacacatgcctacaggtatgcgtgattgtgtgtgtgtgcatgggtgtacagccacgtgtctacctatgtgtctttctgggaatgtgtaccatctgtgtgcctgcagctgtgtagtgctggacagtgacaaccctttctctccagttctccactccaatgataatagttcacttacacctaaacccaaaggaaaaaccagctctaggtccaattgttctgctctaactgatacctcaaccttggggccagcatctcccactgcctccaaatattagtaactatgactgacgtccccagaagtttctgggtctaccacactccccaaccccccactcctacttcctgaagggccctcccaaggctacatccccaccccacagttctccctgagagagatcaacctccctgagatcaaccaaggcagatgtgacagcaagggccacggaccccatggcaggggtggcgtcttcatgagggaggggcccaaagcccttgtgggcggacctcccctgagcctgtctgaggggccagcccttagtgcattcaggctaaggcccctgggcagggatgccacccctgctccttcggaggacgtgccctcacccctcactggtccactggcttgagactcaccccgtctgcccagtaaaagcctttctgcagcagctgaaaaaaaaaaaaaaaaaaaaaaaaaaaaaaaaaaaaaaaaaaaaaaaaaaaaaaaaaaaaaaaaaaaaaaaaaaaaaagagagggggcggcgcgcgccccaaaacttctccccggcgggggcgcgccccggagcgcgcccccccctgttttggtgacaaagggggcggccccacagagagagaggagagctatctatattatataccagacgagcgcggcgcgcggcgcgcgcgggttattaacaacgacaacgaggcgagcgggggggagagaaaccaaccggcggagcccgcggaggcgattcttatgagtgagaagaggcgccccccctcttatctcgcgcggggggggggggcacgcacattcagggcggcggcacaccacaccctcgcgtgagg

SEQ ID NO: 332231 - DNA, 1676 bp, Homo sapiens
gctcggtaccggacttcctggtgtgttgtgtaagtgaactattattggaaaacaggaaccaggagagaactcagagatccttcctaccctcaagtatgtccgaccaggtggaggctttgtccctaatttccagctctttgagaaaggggatgtcaatggagagaaagagcagaaattctacactttcctaaagaactcctgtcctcccacctcggagctcctgggtacatctgaccgcctcttctgggaacccatgaaggttcacgacatccgctggaactttgagaagttcctggtggggccagatggtatacccatcatgcgctggcaccaccggaccacggtcagcaacgtcaagatggacatcctgtcctacatgaggcggcaggcagccctgggggtcaagaggaagtaactgaaggccgtctcatcccatgtccaccatgtaggggagggactttgttcaggaagaaatccgtgtctccaaccacactatctacccatcacagacccctttcctatcactcaaggccccagcctggcacaaatggatgcatacagttctgtgtactgccaggcatgtgggtgtgggtgcatgtgggtgtttacacacatgcctacaggtatgcgtgattgtgtgtgtgtgcatgggtgtacagccacgtgtctacctatgtgtctttctgggaatgtgtaccatctgtgtgcctgcagctgtgtagtgctggacagtgacaaccctttctctccagttctccactccaatgataatagttcacttacacctaaacccaaaggaaaaaccagctctaggtccaattgttctgctctaactgatacctcaaccttggggccagcatctcccactgcctccaaatattagtaactatgactgacgtccccagaagtttctgggtctaccacactccccaaccccccactcctacttcctgaagggccctcccaaggctacatccccaccccacagttctccctgagagagatcaacctccctgagatcaaccaaggcagatgtgacagcaagggccacggaccccatggcaggggtggcgtcttcatgagggaggggcccaaagcccttgtgggcggacctcccctgagcctgtctgaggggccagcccttagtgcattcaggctaaggcccctgggcagggatgccacccctgctccttcggaggacgtgccctcacccctcactggtccactggcttgagactcaccccgtctgcccagtaaaagcctttctgcagcagctgaaaaaaaaaaaaaaaaaaaaaaaaaaaaaaaaaaaaaaaaaaaaaaaaaaaaaaaaaaaaaaaaaaaaaaaaaaaaaagagagggggcggcgcgcgccccaaaacttctccccggcgggggcgcgccccggagcgcgcccccccctgttttggtgacaaagggggcggccccacagagagagaggagagctatctatattatataccagacgagcgcggcgcgcggcgcgcgcgggttattaacaacgacaacgaggcgagcgggggggagagaaaccaaccggcggagcccgcggaggcgattcttatgagtgagaagaggcgccccccctcttatctcgcgcggggggggggggcacgcacattcagggcggcggcacaccacaccctcgcgtgagg

SEQ ID NO: 332232 - DNA, 1861 bp, Homo sapiens
  misc_feature (1789)..(1789): n is a, c, g, or t
  misc_feature (1798)..(1798): n is a, c, g, or t
  misc_feature (1811)..(1811): n is a, c, g, or t
  misc_feature (1827)..(1827): n is a, c, g, or t
  misc_feature (1830)..(1830): n is a, c, g, or t
  misc_feature (1834)..(1834): n is a, c, g, or t
  misc_feature (1842)..(1842): n is a, c, g, or t
agccaaaagaggaagggaccgcctcccacgtccacagggacctgacttccacctctctgcccagatttgcttatgtcactgtcgccccgggacggggaggtggggagctgagggcaagtcgcgcccgcccctgaaatcccagccgcctagcgattggctgcaagggtctcggcttggccgcggattggtcacacccgagggcttgaaaggtggctgggagcgccggacacctcagacggacggtggccagggatcaggcagcggctcaggcgaccctgagtgtgcccccaccccgccatggcccggctgctgcaggcgtcctgcctgctttccctgctcctggccggcttcgtctcgcagagccggggacaagagaagtcgaagatggactgccatggtggcataagtggcaccatttacgagtacggagccctcaccattgatggggaggagtacatccccttcaagcagtatgctggcaaatacgtcctctttgtcaacgtggccagctactgaggcctgacgggccagtacattgaactgaatgcactacaggaagagcttgcaccattcggtctggtcattctgggctttccctgcaaccaatttggaaaacaggaaccaggagagaactcagagatccttcctaccctcaagtatgtccgaccaggtggaggctttgtccctaatttccagctctttgagaaaggggatgtcaatggagagaaagagcagaaattctacactttcctaaagaactcctgtcctcccacctcggagctcctgggtacatctgaccgcctcttctgggaacccatgaaggttcacgacatccgctggaactttgagaagttcctggtggggccagatggtatacccatcatgcgctggcaccaccggaccacggtcagcaacgtcaagatggacatcctgtcctacatgaggcggcaggcagccctgggggtcaagaggaagtaactgaaggccgtctcatcccatgtccaccatgtaggggagggactttgttcaggaagaaatccgtgtctccaaccacactatctacccatcacagacccctttcctatcactcaaggccccagcctggcacaaatggatgcatacagttctgtgtactgccaggcatgtgggtgtgggtgcatgtgggtgtttacacacatgcctacaggtatgcgtgattgtgtgtgtgtgcatgggtgtacagccacgtgtctacctatgtgtctttctgggaatgtgtaccatctgtgtgcctgcagctgtgtagtgctggacagtgacaaccctttctctccagttctccactccaatgataatagttcacttacacctaaacccaaaggaaaaaccagctctaggtccaattgttctgctctaactgatacctcaaccttggggccagcatctcccactgcctccaaatattagtaactatgactgacgtccccagaagtttctgggtctaccacactccccaaccccccactcctacttcctgaagggccctcccaaggctacatccccaccccacagttctccctgagagagatcaacctccctgagatcaaccaaggcagatgtgacagcaagggccacggaccccatggcaggggtggcgtcttcatgagggaggggcccaaagcccttgtgggcggacctcccctgagcctgtctgaggggccagcccttagtgcattcaggctaaggcccctgggcagggatgccacccctgctccttcggaggacgtgccctcacccctcactggtccanccgtggggnccattattaaaangcgttcaggcgcggcncgnttcntggccgcnccagtaaactatgtgccgg

SEQ ID NO: 332233 - DNA, 2283 bp, Homo sapiens
agccaaaagaggaagggaccgcctcccacgtccacagggacctgacttccacctctctgcccagatttgcttatgtcactgtcgccccgggacggggaggtggggagctgagggcaagtcgcgcccgcccctgaaatcccagccgcctagcgattggctgcaagggtctcggcttggccgcggattggtcacacccgagggcttgaaaggtggctgggagcgccggacacctcagacggacggtggccagggatcaggcagcggctcaggcgaccctgagtgtgcccccaccccgccatggcccggctgctgcaggcgtcctgcctgctttccctgctcctggccggcttcgtctcgcagagccggggacaagagaagtcgaaggctccccgccagatgggcaatccccagatggactgccatggtggcataagtggcaccatttacgagtacggagccctcaccattgatggggaggagtacatccccttcaagcagtatgctggcaaatacgtcctctttgtcaacgtggccagctactgaggcctgacgggccagtacattgaactgaatgcactacaggaagagcttgcaccattcggtctggtcattctgggctttccctgcaaccaatttggaaaacaggaaccaggagagaactcagagatccttcctaccctcaaatgtccgagcgcacggtggagggctatgtctcctagagtttccagtctctttgacgaaagggggatgtcaagtggagacgaaagagcatgaacattctagcacttgtctctaaatggaactcctgtcctcccacctcggagctcctgggtacatctgaccgcctcttctgggaacccatgaaggttcacgacatccgctggaactttgagaagttcctggtggggccagatggtatacccatcatgcgctggcaccaccggaccacggtcagcaacgtcaagatggacatcctgtcctacatgaggcggcaggcagccctgggggtcaagaggaagtaactgaaggccgtctcatcccatgtccaccatgtaggggagggactttgttcaggaagaaatccgtgtctccaaccacactatctacccatcacagacccctttcctatcactcaaggccccagcctggcacaaatggatgcatacagttctgtgtactgccaggcatgtgggtgtgggtgcatgtgggtgtttacacacatgcctacaggtatgcgtgattgtgtgtgtgtgcatgggtgtacagccacgtgtctacctatgtgtctttctgggaatgtgtaccatctgtgtgcctgcagctgtgtagtgctggacagtgacaaccctttctctccagttctccactccaatgataatagttcacttacacctaaacccaaaggaaaaaccagctctaggtccaattgttctgctctaactgatacctcaaccttggggccagcatctcccactgcctccaaatattagtaactatgactgacgtccccagaagtttctgggtctaccacactccccaaccccccactcctacttcctgaagggccctcccaaggctacatccccaccccacagttctccctgagagagatcaacctccctgagatcaaccaaggcagatgtgacagcaagggccacggaccccatggcaggggtggcgtcttcatgagggaggggcccaaagcccttgtgggcggacctcccctgagcctgtctgaggggccagcccttagtgcattcaggctaaggcccctgggcagggatgccacccctgctccttcggaggacgtgccctcacccctcactggtccactggcttgagactcaccccgtctgcccagtaaaagcctttctgcagcagctgaaaaaaaaaaaaaaaaaaaaaaaaaaaaaaaaaaaaaaaaaaaaaaaaaaaaaaaaaaaaaaaaaaaaaaaaaaaaaagagagggggcggcgcgcgccccaaaacttctccccggcgggggcgcgccccggagcgcgcccccccctgttttggtgacaaagggggcggccccacagagagagaggagagctatctatattatataccagacgagcgcggcgcgcggcgcgcgcgggttattaacaacgacaacgaggcgagcgggggggagagaaaccaaccggcggagcccgcggaggcgattcttatgagtgagaagaggcgccccccctcttatctcgcgcggggggggggggcacgcacattcagggcggcggcacaccacaccctcgcgtgagg

SEQ ID NO: 332234 - DNA, 2191 bp, Homo sapiens
agccaaaagaggaagggaccgcctcccacgtccacagggacctgacttccacctctctgcccagatttgcttatgtcactgtcgccccgggacggggaggtggggagctgagggcaagtcgcgcccgcccctgaaatcccagccgcctagcgattggctgcaagggtctcggcttggccgcggattggtcacacccgagggcttgaaaggtggctgggagcgccggacacctcagacggacggtggccagggatcaggcagcggctcaggcgaccctgagtgtgcccccaccccgccatggcccggctgctgcaggcgtcctgcctgctttccctgctcctggccggcttcgtctcgcagagccggggacaagagaagtcgaagatggactgccatggtggcataagtggcaccatttacgagtacggagccctcaccattgatggggaggagtacatccccttcaagcagtatgctggcaaatacgtcctctttgtcaacgtggccagctactgaggcctgacgggccagtacattgaactgaatgcactacaggaagagcttgcaccattcggtctggtcattctgggctttccctgcaaccaatttggaaaacaggaaccaggagagaactcagagatccttcctaccctcaagtatgtccgaccaggtggaggctttgtccctaatttccagctctttgagaaaggggatgtcaatggagagaaagagcagaaattctacactttcctaaagaactcctgtcctcccacctcggagctcctgggtacatctgaccgcctcttctgggaacccatgaaggttcacgacatccgctggaactttgagaagttcctggtggggccagatggtatacccatcatgcgctggcaccaccggaccacggtcagcaacgtcaagatggacatcctgtcctacatgaggcggcaggcagccctgggggtcaagaggaagtaactgaaggccgtctcatcccatgtccaccatgtaggggagggactttgttcaggaagaaatccgtgtctccaaccacactatctacccatcacagacccctttcctatcactcaaggccccagcctggcacaaatggatgcatacagttctgtgtactgccaggcatgtgggtgtgggtgcatgtgggtgtttacacacatgcctacaggtatgcgtgattgtgtgtgtgtgcatgggtgtacagccacgtgtctacctatgtgtctttctgggaatgtgtaccatctgtgtgcctgcagctgtgtagtgctggacagtgacaaccctttctctccagttctccactccaatgataatagttcacttacacctaaacccaaaggaaaaaggccagcatctcccactgcctccaaatattagtaactatgactgacgtccccagaagtttctgggtctaccacactccccaaccccccactcctacttcctgaagggccctcccaaggctacatccccaccccacagttctccctgagagagatcaacctccctgagatcaaccaaggcagatgtgacagcaagggccacggaccccatggcaggggtggcgtcttcatgagggaggggcccaaagcccttgtgggcggacctcccctgagcctgtctgaggggccagcccttagtgcattcaggctaaggcccctgggcagggatgccacccctgctccttcggaggacgtgccctcacccctcactggtccactggcttgagactcaccccgtctgcccagtaaaagcctttctgcagcagctgaaaaaaaaaaaaaaaaaaaaaaaaaaaaaaaaaaaaaaaaaaaaaaaaaaaaaaaaaaaaaaaaaaaaaaaaaaaaaagagagggggcggcgcgcgccccaaaacttctccccggcgggggcgcgccccggagcgcgcccccccctgttttggtgacaaagggggcggccccacagagagagaggagagctatctatattatataccagacgagcgcggcgcgcggcgcgcgcgggttattaacaacgacaacgaggcgagcgggggggagagaaaccaaccggcggagcccgcggaggcgattcttatgagtgagaagaggcgccccccctcttatctcgcgcggggggggggggcacgcacattcagggcggcggcacaccacaccctcgcgtgagg

SEQ ID NO: 332235 - DNA, 1845 bp, Homo sapiens
  misc_feature (1715)..(1715): n is a, c, g, or t
agccaaaagaggaagggaccgcctcccacgtccacagggacctgacttccacctctctgcccagatttgcttatgtcactgtcgccccgggacggggaggtggggagctgagggcaagtcgcgcccgcccctgaaatcccagccgcctagcgattggctgcaagggtctcggcttggccgcggattggtcacacccgagggcttgaaaggtggctgggagcgccggacacctcagacggacggtggccagggatcaggcagcggctcaggcgaccctgagtgtgcccccaccccgccatggcccggctgctgcaggcgtcctgcctgctttccctgctcctggccggcttcgtctcgcagagccggggacaagagaagtcgaagatggactgccatggtggcataagtggcaccatttacgagtacggagccctcaccattgatggggaggagtacatccccttcaagcagtatgctggcaaatacgtcctctttgtcaacgtggccagctactgaggcctgacgggccagtacattgaactgaatgcactacaggaagagcttgcaccattcggtctggtcattctgggctttccctgcaaccaatttggaaaacaggaaccaggagagaactcagagatccttcctaccctcaagtatgtccgaccaggtggaggctttgtccctaatttccagctctttgagaaaggggatgtcaatggagagaaagagcagaaattctacactttcctaaagaactcctgtcctcccacctcggagctcctgggtacatctgaccgcctcttctgggaacccatgaaggttcacgacatccgctggaactttgagaagttcctggtggggccagatggtatacccatcatgcgctggcaccaccggaccacggtcagcaacgtcaagatggacatcctgtcctacatgaggcggcaggcagccctgggggtcaagaggaagtaactgaaggccgtctcatcccatgtccaccatgtaggggagggactttgttcaggaagaaatccgtgtctccaaccacactatctacccatcacagacccctttcctatcactcaaggccccagcctggcacaaatggatgcatacagttctgtgtactgccaggcatgtgggtgtgggtgcatgtgggtgtttacacacatgcctacaggtatgcgtgattgtgtgtgtgtgcatgggtgtacagccacgtgtctacctatgtgtctttctgggaatgtgtaccatctgtgtgcctgcagctgtgtagtgctggacagtgacaaccctttctctccagttctccactccaatgataatagttcacttacacctaaacccaaaggaaaaaccagctctaggtccaattgttctgctctaactgatacctcaaccttggggccagcatctcccactgcctccaaatattagtaactatgactgacgtccccagaagtttctgggtctaccacactccccaaccccccactcctacttcctgaagggccctcccaaggctacatccccaccccacagttctccctgagagagatcaacctccctgagatcaaccaaggcagatgtgacagcaagggccacggacccctgctccttcggaggacgtgccctcacccctcactggtccactggcttgagactcaccccgtctgcccagtaaaagcctttctgcagcagctganaaaaaataatacttatttttttttcattcatcttcactttcttttcttctttatttctttattattaaatcccttctataaaaattaataaaaataaaccgttaaccttaaggggggcccggacccaaag

SEQ ID NO: 332236 - DNA, 2067 bp, Homo sapiens
agccaaaagaggaagggaccgcctcccacgtccacagggacctgacttccacctctctgcccagatttgcttatgtcactgtcgccccgggacggggaggtggggagctgagggcaagtcgcgcccgcccctgaaatcccagccgcctagcgattggctgcaagggtctcggcttggccgcggattggtcacacccgagggcttgaaaggtggctgggagcgccggacacctcagacggacggtggccagggatcaggcagcggctcaggcgaccctgagtgtgcccccaccccgccatggcccggctgctgcaggcgtcctgcctgctttccctgctcctggccggcttcgtctcgcagagccggggacaagagaagtcgaagatggactgccatggtggcataagtggcaccatttacgagtacggagccctcaccattgatggggaggagtacatccccttcaagcagtatgctggcaaatacgtcctctttgtcaacgtggccagctactgaggcctgacgggccagtacattgaactgaatgcactacaggaagagcttgcaccattcggtctggtcattctgggctttccctgcaaccaatttggaaaacaggaaccaggagagaactcagagatccttcctaccctcaagtatgtccgaccaggtggaggctttgtccctaatttccagctctttgagaaaggggatgtcaatggagagaaagagcagaaattctacactttcctaaagaactcctgtcctcccacctcggagctcctgggtacatctgaccgcctcttctgggaacccatgaaggttcacgacatccgctggaactttgagaagttcctggtggggccagatggtatacccatcatgcgctggcaccaccggaccacggtcagcaacgtcaagatggacatcctgtcctacatgaggcggcaggcagccctgggggtcaagaggaagtaactgaaggccgtctcatcccatgtccaccatgtaggggagggactttgttcaggaagaaatccgtgtctccaaccacactatctacccatcacagacccctttcctatcactcaaggccccagcctggcacaaatggatgcatacagttctgtgtactgccaggcatgtgggtgtgggtgcatgtgggtgtttacacacatgcctacaggtatgcgtgattgtgtgtgtgtgcatgggtgtacagccacgtgtctacctatgtgtctttctgggaatgtgtaccatctgtgtgcctgcagctgtgtagtgctggacagtgacaaccctttctctccagttctccactccaatgataatagttcacttacacctaaacccaaaggaaaaaccagctctaggtccaattgttctgctctaactgatacctcaaccttggggccagcatctcccactgcctccaaatattagtaactatgactgacgtccccagaagtttctgggtctaccacactccccaaccccccactcctacttcctgaagggccctcccaaggctacatccccaccccacagttctccctgagagagatcaacctcctgctccttcggaggacgtgccctcacccctcactggtccactggcttgagactcaccccgtctgcccagtaaaagcctttctgcagcagctgaaaaaaaaaaaaaaaaaaaaaaaaaaaaaaaaaaaaaaaaaaaaaaaaaaaaaaaaaaaaaaaaaaaaaaaaaaaaaagagagggggcggcgcgcgccccaaaacttctccccggcgggggcgcgccccggagcgcgcccccccctgttttggtgacaaagggggcggccccacagagagagaggagagctatctatattatataccagacgagcgcggcgcgcggcgcgcgcgggttattaacaacgacaacgaggcgagcgggggggagagaaaccaaccggcggagcccgcggaggcgattcttatgagtgagaagaggcgccccccctcttatctcgcgcggggggggggggcacgcacattcagggcggcggcacaccacaccctcgcgtgagg

SEQ ID NO: 332237 - DNA, 1390 bp, Homo sapiens
  misc_feature (48)..(48): n is a, c, g, or t
aattcgcggccgcgtcgacgtggtgccagcgcatgatgggtataccanctggccacggtcagcaacgtcaagatggacatcctgtcctacatgaggcggcaggcagccctgggggtcaagaggaagtaactgaaggccgtctcatcccatgtccaccatgtaggggagggactttgttcaggaagaaatccgtgtctccaaccacactatctacccatcacagacccctttcctatcactcaaggccccagcctggcacaaatggatgcatacagttctgtgtactgccaggcatgtgggtgtgggtgcatgtgggtgtttacacacatgcctacaggtatgcgtgattgtgtgtgtgtgcatgggtgtacagccacgtgtctacctatgtgtctttctgggaatgtgtaccatctgtgtgcctgcagctgtgtagtgctggacagtgacaaccctttctctccagttctccactccaatgataatagttcacttacacctaaacccaaaggaaaaaccagctctaggtccaattgttctgctctaactgatacctcaaccttggggccagcatctcccactgcctccaaatattagtaactatgactgacgtccccagaagtttctgggtctaccacactccccaaccccccactcctacttcctgaagggccctcccaaggctacatccccaccccacagttctccctgagagagatcaacctccctgagatcaaccaaggcagatgtgacagcaagggccacggaccccatggcaggggtggcgtcttcatgagggaggggcccaaagcccttgtgggcggacctcccctgagcctgtctgaggggccagcccttagtgcattcaggctaaggcccctgggcagggatgccacccctgctccttcggaggacgtgccctcacccctcactggtccactggcttgagactcaccccgtctgcccagtaaaagcctttctgcagcagctgaaaaaaaaaaaaaaaaaaaaaaaaaaaaaaaaaaaaaaaaaaaaaaaaaaaaaaaaaaaaaaaaaaaaaaaaaaaaaagagagggggcggcgcgcgccccaaaacttctccccggcgggggcgcgccccggagcgcgcccccccctgttttggtgacaaagggggcggccccacagagagagaggagagctatctatattatataccagacgagcgcggcgcgcggcgcgcgcgggttattaacaacgacaacgaggcgagcgggggggagagaaaccaaccggcggagcccgcggaggcgattcttatgagtgagaagaggcgccccccctcttatctcgcgcggggggggggggcacgcacattcagggcggcggcacaccacaccctcgcgtgagg

SEQ ID NO: 332238 - DNA, 1352 bp, Homo sapiens
tcctgatatgggttggagacacggatttcttcctgaacaaatcctgtcctacatgaggcggcaggcagccctgggggtcaagaggaagtaactgaaggccgtctcatcccatgtccaccatgtaggggagggactttgttcaggaagaaatccgtgtctccaaccacactatctacccatcacagacccctttcctatcactcaaggccccagcctggcacaaatggatgcatacagttctgtgtactgccaggcatgtgggtgtgggtgcatgtgggtgtttacacacatgcctacaggtatgcgtgattgtgtgtgtgtgcatgggtgtacagccacgtgtctacctatgtgtctttctgggaatgtgtaccatctgtgtgcctgcagctgtgtagtgctggacagtgacaaccctttctctccagttctccactccaatgataatagttcacttacacctaaacccaaaggaaaaaccagctctaggtccaattgttctgctctaactgatacctcaaccttggggccagcatctcccactgcctccaaatattagtaactatgactgacgtccccagaagtttctgggtctaccacactccccaaccccccactcctacttcctgaagggccctcccaaggctacatccccaccccacagttctccctgagagagatcaacctccctgagatcaaccaaggcagatgtgacagcaagggccacggaccccatggcaggggtggcgtcttcatgagggaggggcccaaagcccttgtgggcggacctcccctgagcctgtctgaggggccagcccttagtgcattcaggctaaggcccctgggcagggatgccacccctgctccttcggaggacgtgccctcacccctcactggtccactggcttgagactcaccccgtctgcccagtaaaagcctttctgcagcagctgaaaaaaaaaaaaaaaaaaaaaaaaaaaaaaaaaaaaaaaaaaaaaaaaaaaaaaaaaaaaaaaaaaaaaaaaaaaaaagagagggggcggcgcgcgccccaaaacttctccccggcgggggcgcgccccggagcgcgcccccccctgttttggtgacaaagggggcggccccacagagagagaggagagctatctatattatataccagacgagcgcggcgcgcggcgcgcgcgggttattaacaacgacaacgaggcgagcgggggggagagaaaccaaccggcggagcccgcggaggcgattcttatgagtgagaagaggcgccccccctcttatctcgcgcggggggggggggcacgcacattcagggcggcggcacaccacaccctcgcgtgagg

SEQ ID NO: 332239 - DNA, 1995 bp, Homo sapiens
agccaaaagaggaagggaccgcctcccacgtccacagggacctgacttccacctctctgcccagatttgcttatgtcactgtcgccccgggacggggaggtggggagctgagggcaagtcgcgcccgcccctgaaatcccagccgcctagcgattggctgcaagggtctcggcttggccgcggattggtcacacccgagggcttgaaaggtggctgggagcgccggacacctcagacggacggtggccagggatcaggcagcggctcaggcgaccctgagtgtgcccccaccccgccatggcccggctgctgcaggcgtcctgcctgctttccctgctcctggccggcttcgtctcgcagagccggggacaagagaagtcgaagatggactgccatggtggcataagtggcaccatttacgagtacggagccctcaccattgatggggaggagtacatccccttcaagcagtatgctggcaaatacgtcctctttgtcaacgtggccagctactgaggcctgacgggccagtacattgaactgaatgcactacaggaagagcttgcaccattcggtctggtcattctgggctttccctgcaaccaatttggaaaacaggaaccaggagagaactcagagatccttcctaccctcaagtatgtccgaccaggtggaggctttgtccctaatttccagctctttgagaaaggggatgtcaatggagagaaagagcagaaattctacactttcctaaagaactcctgtcctcccacctcggagctcctgggtacatctgaccgcctcttctgggaacccatgaaggttcacgacatccgctggaactttgagaagttcctggtggggccagatggtatacccatcatgcgctggcaccaccggaccacggtcagcaacgtcaagatggacatcctgtcctacatgaggcggcaggcagccctgggggtcaagaggaagtaactgaaggccgtctcatcccatgtccaccatgtaggggagggactttgttcaggaagaaatccgtgtctccaaccacactatctacccatcacagacccctttcctatcactcaaggccccagcctggcacaaatggatgcatacagttctgtgtactgccaggcatgtgggtgtgggtgcatgtgggtgtttacacacatgcctacaggtatgcgtgattgtgtgtgtgtgcatgggtgtacagccacgtgtctacctatgtgtctttctgggaatgtgtaccatctgtgtgcctgcagctgtgtagtgctggacagtgacaaccctttctctccagttctccactccaatgataatagttcacttacacctaaacccaaaggaaaaaccagctctaggtccaattgttctgctctaactgatacctcaaccttggggccagcatctcccactgcctccaaatattagtaactatgactgacgtccccagaagtttctgggtctaccacactccccaacccccccctgctccttcggaggacgtgccctcacccctcactggtccactggcttgagactcaccccgtctgcccagtaaaagcctttctgcagcagctgaaaaaaaaaaaaaaaaaaaaaaaaaaaaaaaaaaaaaaaaaaaaaaaaaaaaaaaaaaaaaaaaaaaaaaaaaaaaaagagagggggcggcgcgcgccccaaaacttctccccggcgggggcgcgccccggagcgcgcccccccctgttttggtgacaaagggggcggccccacagagagagaggagagctatctatattatataccagacgagcgcggcgcgcggcgcgcgcgggttattaacaacgacaacgaggcgagcgggggggagagaaaccaaccggcggagcccgcggaggcgattcttatgagtgagaagaggcgccccccctcttatctcgcgcggggggggggggcacgcacattcagggcggcggcacaccacaccctcgcgtgagg

SEQ ID NO: 332240 - DNA, 1340 bp, Homo sapiens
  misc_feature (20)..(20): n is a, c, g, or t
gggtgggcccgacctctagncccaccaggcaacttctcaaagttccagcggatgtcgtgaaccttcatgggttcccagaagaggcggtcagatgtacccaggggctccgaggtgggagggactttgttcaggaagaaatccgtgtctccaaccacactatctacccatcacagacccctttcctatcactcaaggccccagcctggcacaaatggatgcatacagttctgtgtactgccaggcatgtgggtgtgggtgcatgtgggtgtttacacacatgcctacaggtatgcgtgattgtgtgtgtgtgcatgggtgtacagccacgtgtctacctatgtgtctttctgggaatgtgtaccatctgtgtgcctgcagctgtgtagtgctggacagtgacaaccctttctctccagttctccactccaatgataatagttcacttacacctaaacccaaaggaaaaaccagctctaggtccaattgttctgctctaactgatacctcaaccttggggccagcatctcccactgcctccaaatattagtaactatgactgacgtccccagaagtttctgggtctaccacactccccaaccccccactcctacttcctgaagggccctcccaaggctacatccccaccccacagttctccctgagagagatcaacctccctgagatcaaccaaggcagatgtgacagcaagggccacggaccccatggcaggggtggcgtcttcatgagggaggggcccaaagcccttgtgggcggacctcccctgagcctgtctgaggggccagcccttagtgcattcaggctaaggcccctgggcagggatgccacccctgctccttcggaggacgtgccctcacccctcactggtccactggcttgagactcaccccgtctgcccagtaaaagcctttctgcagcagctgaaaaaaaaaaaaaaaaaaaaaaaaaaaaaaaaaaaaaaaaaaaaaaaaaaaaaaaaaaaaaaaaaaaaaaaaaaaaaagagagggggcggcgcgcgccccaaaacttctccccggcgggggcgcgccccggagcgcgcccccccctgttttggtgacaaagggggcggccccacagagagagaggagagctatctatattatataccagacgagcgcggcgcgcggcgcgcgcgggttattaacaacgacaacgaggcgagcgggggggagagaaaccaaccggcggagcccgcggaggcgattcttatgagtgagaagaggcgccccccctcttatctcgcgcggggggggggggcacgcacattcagggcggcggcacaccacaccctcgcgtgagg

SEQ ID NO: 332241 - DNA, 1593 bp, Homo sapiens
agccaaaagaggaagggaccgcctcccacgtccacagggacctgacttccacctctctgcccagatttgcttatgtcactgtcgccccgggacggggaggtggggagctgagggcaagtcgcgcccgcccctgaaatcccagccgcctagcgattggctgcaagggtctcggcttggccgcggattggtcacacccgagggcttgaaaggtggctgggagcgccggacacctcagacggacggtggccagggatcaggcagcggctcaggcgaccctgagtgtgcccccaccccgccatggcccggctgctgcaggcgtcctgcctgctttccctgctcctggccggcttcgtctcgcagagccggggacaagagaagtcgaagatggactgccatggtggcataagtggcaccatttacgagtacggagccctcaccattgatggggaggagtacatccccttcaagcagtatgctggcaaatacgtcctctttgtcaacgtggccagctactgaggcctgacgggccagtacattgaactgaatgcactacaggaagagcttgcaccattcggtctggtcattctgggctttccctgcaaccaatttggaaaacaggaaccaggagagaactcagagatccttcctaccctcaagtatgtccgaccaggtggaggctttgtccctaatttccagctctttgagaaaggggatgtcaatggagagaaagagcagaaattctacactttcctaaagaactcctgtcctcccacctcggagctcctgggtacatctgaccgcctcttctgggaacccatgaaggttcacgacatccgctggaactttgagaagttcctggtggggccagatggtatacccatcatgcgctggcaccaccggaccacggtcagcaacgtcaagatggacatcctgtcctacatgaggcggcaggcagccctgggggtcaagaggaagtaactgaaggccgtctcatcccatgtccaccatgtaggggagggactttgttcaggaagaaatccgtgtctccaaccacactatctacccatcacagacccctttcctatcactcaaggccccagcctggcacaaatggatgcatacagttctgtgtactgccaggcatgtgggtgtgggtgcatgtgggtgtttacacacatgcctacaggtatgcgtgattgtgtgtgtgtgcatgggtgtacagccacgtgtctacctatgtgtctttctgggaatgtgtaccatctgtgtgcctgcagctgtgtagtgctggacagtgacaaccctttctctccagttctccactccaatgataatagttcacttacacctaaacccaaaggaaaaacctgctccttcggaggacgtgccctcacccctcactggtccactggcttgagactcaccccgtctgcccagtaaaagcctttctgcagcagctgacaaacacacaatgcagctgcaaacacacaatgcagctgcaaacacacaatgcagctgcaaacacacaatgcagctgcaaacacacaatgcagctgcaaacacacaatgcagctgcaaacacaatgccgggga

SEQ ID NO: 332242 - DNA, 1093 bp, Homo sapiens
  misc_feature (84)..(84): n is a, c, g, or t
gctgcagaaaggcttttactgggcagacggggtgagtctcaagccagtggaccagtgaggggtgagggcacgtcctccgaagancaggtttttcgtctttctgggaatgtgtaccatctgtgtgcctgcagctgtgtagtgctggacagtgacaaccctttctctccagttctccactccaatgataatagttcacttacacctaaacccaaaggaaaaaccagctctaggtccaattgttctgctctaactgatacctcaaccttggggccagcatctcccactgcctccaaatattagtaactatgactgacgtccccagaagtttctgggtctaccacactccccaaccccccactcctacttcctgaagggccctcccaaggctacatccccaccccacagttctccctgagagagatcaacctccctgagatcaaccaaggcagatgtgacagcaagggccacggaccccatggcaggggtggcgtcttcatgagggaggggcccaaagcccttgtgggcggacctcccctgagcctgtctgaggggccagcccttagtgcattcaggctaaggcccctgggcagggatgccacccctgctccttcggaggacgtgccctcacccctcactggtccactggcttgagactcaccccgtctgcccagtaaaagcctttctgcagcagctgaaaaaaaaaaaaaaaaaaaaaaaaaaaaaaaaaaaaaaaaaaaaaaaaaaaaaaaaaaaaaaaaaaaaaaaaaaaaaagagagggggcggcgcgcgccccaaaacttctccccggcgggggcgcgccccggagcgcgcccccccctgttttggtgacaaagggggcggccccacagagagagaggagagctatctatattatataccagacgagcgcggcgcgcggcgcgcgcgggttattaacaacgacaacgaggcgagcgggggggagagaaaccaaccggcggagcccgcggaggcgattcttatgagtgagaagaggcgccccccctcttatctcgcgcggggggggggggcacgcacattcagggcggcggcacaccacaccctcgcgtgagg

SEQ ID NO: 332243 - DNA, 1022 bp, Homo sapiens
ttcagaggtcccagagaggcgaagtctttctgggaatgtgtaccatctgtgtgcctgcagctgtgtagtgctggacagtgacaaccctttctctccagttctccactccaatgataatagttcacttacacctaaacccaaaggaaaaaccagctctaggtccaattgttctgctctaactgatacctcaaccttggggccagcatctcccactgcctccaaatattagtaactatgactgacgtccccagaagtttctgggtctaccacactccccaaccccccactcctacttcctgaagggccctcccaaggctacatccccaccccacagttctccctgagagagatcaacctccctgagatcaaccaaggcagatgtgacagcaagggccacggaccccatggcaggggtggcgtcttcatgagggaggggcccaaagcccttgtgggcggacctcccctgagcctgtctgaggggccagcccttagtgcattcaggctaaggcccctgggcagggatgccacccctgctccttcggaggacgtgccctcacccctcactggtccactggcttgagactcaccccgtctgcccagtaaaagcctttctgcagcagctgaaaaaaaaaaaaaaaaaaaaaaaaaaaaaaaaaaaaaaaaaaaaaaaaaaaaaaaaaaaaaaaaaaaaaaaaaaaaaagagagggggcggcgcgcgccccaaaacttctccccggcgggggcgcgccccggagcgcgcccccccctgttttggtgacaaagggggcggccccacagagagagaggagagctatctatattatataccagacgagcgcggcgcgcggcgcgcgcgggttattaacaacgacaacgaggcgagcgggggggagagaaaccaaccggcggagcccgcggaggcgattcttatgagtgagaagaggcgccccccctcttatctcgcgcggggggggggggcacgcacattcagggcggcggcacaccacaccctcgcgtgagg

SEQ ID NO: 332244 - DNA, 866 bp, Homo sapiens
tcgaatgagctggtcccaccttatgcgtgggcacctcatgcggccagcatctcccactgcctccaaatattagtaactatgactgacgtccccagaagtttctgggtctaccacactccccaaccccccactcctacttcctgaagggccctcccaaggctacatccccaccccacagttctccctgagagagatcaacctccctgagatcaaccaaggcagatgtgacagcaagggccacggaccccatggcaggggtggcgtcttcatgagggaggggcccaaagcccttgtgggcggacctcccctgagcctgtctgaggggccagcccttagtgcattcaggctaaggcccctgggcagggatgccacccctgctccttcggaggacgtgccctcacccctcactggtccactggcttgagactcaccccgtctgcccagtaaaagcctttctgcagcagctgaaaaaaaaaaaaaaaaaaaaaaaaaaaaaaaaaaaaaaaaaaaaaaaaaaaaaaaaaaaaaaaaaaaaaaaaaaaaaagagagggggcggcgcgcgccccaaaacttctccccggcgggggcgcgccccggagcgcgcccccccctgttttggtgacaaagggggcggccccacagagagagaggagagctatctatattatataccagacgagcgcggcgcgcggcgcgcgcgggttattaacaacgacaacgaggcgagcgggggggagagaaaccaaccggcggagcccgcggaggcgattcttatgagtgagaagaggcgccccccctcttatctcgcgcggggggggggggcacgcacattcagggcggcggcacaccacaccctcgcgtgagg

SEQ ID NO: 332245 - DNA, 1090 bp, Homo sapiens
agccaaaagaggaagggaccgcctcccacgtccacagggacctgacttccacctctctgcccagatttgcttatgtcactgtcgccccgggacggggaggtggggagctgagggcaagtcgcgcccgcccctgaaatcccagccgcctagcgattggctgcaagggtctcggcttggccgcggattggtcacacccgagggcttgaaaggtggctgggagcgccggacacctcagacggacggtggccagggatcaggcagcggctcaggcgaccctgagtgtgcccccaccccgccatggcccggctgctgcaggcgtcctgcctgctttccctgctcctggccggcttcgtctcgcagagccggggacaagagaagtcgaagatggactgccatggtggcataagtggcaccatttacgagtacggagccctcaccattgatggggaggagtacatccccttcaagcagtatgctggcaaatacgtcctctttgtcaacgtggccagctactgaggcctgacgggccagtacattgaactgaatgcactacaggaagagcttgcaccattcggtctggtcattctgggctttccctgcaaccaatttggaaaacaggaaccaggagagaactcagagatccttcctaccctcaagtatgtccgaccaggtggaggctttgtccctaatttccagctctttgagaaaggggatgtcaatggagagaaagagcagaaattctacactttcctaaagaactcctgtcctcccacctcggagctcctgggtacatctgaccgcctcttctgggaacccatgaaggttcacgacatccgctggaactttgagaagttcctggtggggccagatggtatacccatcatgcgctggcaccaccggaccacggtcagcaacgtcaagatggacatcctgtcctacatgaggcggcaggcagccctgggggtcaagaggaagtaactgaaggccgtctcatcccatgtccaccatgtaggggagggactttgttcaggaagaaatccgtgtctccaaccacactatctagaaccggggatgagatcctctagatgac

SEQ ID NO: 332246 - DNA, 1055 bp, Homo sapiens
agccaaaagaggaagggaccgcctcccacgtccacagggacctgacttccacctctctgcccagatttgcttatgtcactgtcgccccgggacggggaggtggggagctgagggcaagtcgcgcccgcccctgaaatcccagccgcctagcgattggctgcaagggtctcggcttggccgcggattggtcacacccgagggcttgaaaggtggctgggagcgccggacacctcagacggacggtggccagggatcaggcagcggctcaggcgaccctgagtgtgcccccaccccgccatggcccggctgctgcaggcgtcctgcctgctttccctgctcctggccggcttcgtctcgcagagccggggacaagagaagtcgaagatggactgccatggtggcataagtggcaccatttacgagtacggagccctcaccattgatggggaggagtacatccccttcaagcagtatgctggcaaatacgtcctctttgtcaacgtggccagctactgaggcctgacgggccagtacattgaactgaatgcactacaggaagagcttgcaccattcggtctggtcattctgggctttccctgcaaccaatttggaaaacaggaaccaggagagaactcagagatccttcctaccctcaagtatgtccgaccaggtggaggctttgtccctaatttccagctctttgagaaaggggatgtcaatggagagaaagagcagaaattctacactttcctaaagaactcctgtcctcccacctcggagctcctgggtacatctgaccgcctcttctgggaacccatgaaggttcacgacatccgctggaactttgagaagttcctggtggggccagatggtatacccatcatgcgctggcaccaccggaccacggtcagcaacgtcaagatggacatcctgtcctacatgaggcggcaggcagccctgggggtcaagctccctgccccgctcagcacctgcttgggaggcactgacttaggcgagctgcatgcttggggacacgcgcgcccctcccaaacagg

SEQ ID NO: 332247 - DNA, 860 bp, Homo sapiens
aggctctttggaagtatatacattatttacataatgtgtacaagtccttctgaaatgacaactttaatgggtttcagctcttttatatagagcttgagataatccaagaccccttattcagagactcctacttcctgaagggccctcccaaggctacatccccaccccacagttctccctgagagagatcaacctccctgagatcaaccaaggcagatgtgacagcaagggccacggaccccatggcaggggtggcgtcttcatgagggaggggcccaaagcccttgtgggcggacctcccctgagcctgtctgaggggccagcccttagtgcattcaggctaaggcccctgggcagggatgccacccctgctccttcggaggacgtgccctcacccctcactggtccactggcttgagactcaccccgtctgcccagtaaaagcctttctgcagcagctgaaaaaaaaaaaaaaaaaaaaaaaaaaaaaaaaaaaaaaaaaaaaaaaaaaaaaaaaaaaaaaaaaaaaaaaaaaaaaagagagggggcggcgcgcgccccaaaacttctccccggcgggggcgcgccccggagcgcgcccccccctgttttggtgacaaagggggcggccccacagagagagaggagagctatctatattatataccagacgagcgcggcgcgcggcgcgcgcgggttattaacaacgacaacgaggcgagcgggggggagagaaaccaaccggcggagcccgcggaggcgattcttatgagtgagaagaggcgccccccctcttatctcgcgcggggggggggggcacgcacattcagggcggcggcacaccacaccctcgcgtgagg

SEQ ID NO: 332248 - DNA, 752 bp, Homo sapiens
  misc_feature (9)..(9): n is a, c, g, or t
aatataaantaataaatctccactcaaattaaactttattaatggccctaaagagaccccacagttctccctgagagagatcaacctccctgagatcaaccaaggcagatgtgacagcaagggccacggaccccatggcaggggtggcgtcttcatgagggaggggcccaaagcccttgtgggcggacctcccctgagcctgtctgaggggccagcccttagtgcattcaggctaaggcccctgggcagggatgccacccctgctccttcggaggacgtgccctcacccctcactggtccactggcttgagactcaccccgtctgcccagtaaaagcctttctgcagcagctgaaaaaaaaaaaaaaaaaaaaaaaaaaaaaaaaaaaaaaaaaaaaaaaaaaaaaaaaaaaaaaaaaaaaaaaaaaaaaagagagggggcggcgcgcgccccaaaacttctccccggcgggggcgcgccccggagcgcgcccccccctgttttggtgacaaagggggcggccccacagagagagaggagagctatctatattatataccagacgagcgcggcgcgcggcgcgcgcgggttattaacaacgacaacgaggcgagcgggggggagagaaaccaaccggcggagcccgcggaggcgattcttatgagtgagaagaggcgccccccctcttatctcgcgcggggggggggggcacgcacattcagggcggcggcacaccacaccctcgcgtgagg

SEQ ID NO: 332249 - DNA, 856 bp, Homo sapiens
aggtcgggagtttgagaccagcctgaccaacatggagaaaccccatctctactaaaaatacaaaattagccgggcgtggtggcatgcgcctataatctcagctacttgggaggctgaggcaggagaagtgcttgaacccaggaggcggaggttgcggtgaccccacagttctccctgagagagatcaacctccctgagatcaaccaaggcagatgtgacagcaagggccacggaccccatggcaggggtggcgtcttcatgagggaggggcccaaagcccttgtgggcggacctcccctgagcctgtctgaggggccagcccttagtgcattcaggctaaggcccctgggcagggatgccacccctgctccttcggaggacgtgccctcacccctcactggtccactggcttgagactcaccccgtctgcccagtaaaagcctttctgcagcagctgaaaaaaaaaaaaaaaaaaaaaaaaaaaaaaaaaaaaaaaaaaaaaaaaaaaaaaaaaaaaaaaaaaaaaaaaaaaaaagagagggggcggcgcgcgccccaaaacttctccccggcgggggcgcgccccggagcgcgcccccccctgttttggtgacaaagggggcggccccacagagagagaggagagctatctatattatataccagacgagcgcggcgcgcggcgcgcgcgggttattaacaacgacaacgaggcgagcgggggggagagaaaccaaccggcggagcccgcggaggcgattcttatgagtgagaagaggcgccccccctcttatctcgcgcggggggggggggcacgcacattcagggcggcggcacaccacaccctcgcgtgagg

SEQ ID NO: 332250 - DNA, 798 bp, Homo sapiens
agccaaaagaggaagggaccgcctcccacgtccacagggacctgacttccacctctctgcccagatttgcttatgtcactgtcgccccgggacggggaggtggggagctgagggcaagtcgcgcccgcccctgaaatcccagccgcctagcgattggctgcaagggtctcggcttggccgcggattggtcacacccgagggcttgaaaggtggctgggagcgccggacacctcagacggacggtggccagggatcaggcagcggctcaggcgaccctgagtgtgcccccaccccgccatggcccggctgctgcaggcgtcctgcctgctttccctgctcctggccggcttcgtctcgcagagccggggacaagagaagtcgaagatggactgccatggtggcataagtggcaccatttacgagtacggagccctcaccattgatggggaggagtacatccccttcaagcagtatgctggcaaatacgtcctctttgtcaacgtggccagctactgaggcctgacgggccagtacattgaactgaatgcactacaggaagagcttgcaccattcggtctggtcattctgggctttccctgcaaccaatttggaaaacaggaaccaggagagaactcagagatccttcctaccctcaagtatgtccgaccaggtggaggctttgtccctaatttccagctctttgagaaaggggatgtactcctccccatcaatggtgagggctccgtactcgtaaatggtgccacttatgccaccatggcagtccatctgacccatctt

SEQ ID NO: 332251 - DNA, 850 bp, Homo sapiens
agccaaaagaggaagggaccgcctcccacgtccacagggacctgacttccacctctctgcccagatttgcttatgtcactgtcgccccgggacggggaggtggggagctgagggcaagtcgcgcccgcccctgaaatcccagccgcctagcgattggctgcaagggtctcggcttggccgcggattggtcacacccgagggcttgaaaggtggctgggagcgccggacacctcagacggacggtggccagggatcaggcagcggctcaggcgaccctgagtgtgcccccaccccgccatggcccggctgctgcaggcgtcctgcctgctttccctgctcctggccggcttcgtctcgcagagccggggacaagagaagtcgaagatggactgccatggtggcataagtggcaccatttacgagtacggagccctcaccattgatggggaggagtacatccccttcaagcagtatgctggcaaatacgtcctctttgtcaacgtggccagctactgaggcctgacgggccagtacattgaactgaatgcactacaggaagagcttgcaccattcggtctggtcattctgggctttccctgcaaccaatttggaaaacaggaaccaggagagaactcagagatccttcctaccctcaaatgtccgaccaggtggaggctgggagtgactgcttaccttggctttctggagtacagtgcctttgcctgtgaccacgaccgagagaggcctgttcttgagtgtggttgcagagttgactggggtacagtctggggcagaggcaggtgtgacagctttggggcgggggctcacgttctccagtgggtggtgtcca

SEQ ID NO: 332252 - DNA, 819 bp, Homo sapiens
  misc_feature (768)..(769): n is a, c, g, or t
  misc_feature (784)..(784): n is a, c, g, or t
agccaaaagaggaagggaccgcctcccacgtccacagggacctgacttccacctctctgcccagatttgcttatgtcactgtcgccccgggacggggaggtggggagctgagggcaagtcgcgcccgcccctgaaatcccagccgcctagcgattggctgcaagggtctcggcttggccgcggattggtcacacccgagggcttgaaaggtggctgggagcgccggacacctcagacggacggtggccagggatcaggcagcggctcaggcgaccctgagtgtgcccccaccccgccatggcccggctgctgcaggcgtcctgcctgctttccctgctcctggccggcttcgtctcgcagagccggggacaagagaagtcgaagatggactgccatggtggcataagtggcaccatttacgagtacggagccctcaccattgatggggaggagtacatccccttcaagcagtatgctggcaaatacgtcctctttgtcaacgtggccagctactgaggcctgacgggccagtacattgaactgaatgcactacaggaagagcttgcaccattcggtctggtcattctgggctttccctgcaaccaatttggaaaacaggaaccaggagagaactcagagatccttcctaccctcaagtatgtccgaccaggtggaggctttgtccctaatttccagctctttgagaaaggggatgtcaatggagagaaagagcagaaattctacactttcctaaagctctgtctcccnnctcgagctcctgggnactctgctgtccgggatcctctagacgccacccgg

SEQ ID NO: 332253 - DNA, 1845 bp, Homo sapiens
agccaaaagaggaagggaccgcctcccacgtccacagggacctgacttccacctctctgcccagatttgcttatgtcactgtcgccccgggacggggaggtggggagctgagggcaagtcgcgcccgcccctgaaatcccagccgcctagcgattggctgcaagggtctcggcttggccgcggattggtcacacccgagggcttgaaaggtggctgggagcgccggacacctcagacggacggtggccagggatcaggcagcggctcaggcgaccctgagtgtgcccccaccccgccatggcccggctgctgcaggcgtcctgcctgctttccctgctcctggccggcttcgtctcgcagagccggggacaagagaagtcgaagatggactgccatggtggcataagtggcaccatttacgagtacggagccctcaccattgatggggaggagtacatccccttcaagcagtatgctggcaaatacgtcctctttgtcaacgtggccagctactgaggcctgacgggccagtacattgaactgaatgcactacaggaagagcttgcaccattcggtctggtcattctgggctttccctgcaaccaatttggaaaacaggaaccaggagagaactcagagatccttcctaccctcaagtatgtccgaccaggtggaggctttgtccctaatttccagctctttgagaaaggggatgtcaatggagagaaagagcagaaattctacactttcctaaagaactcctgtcctcccacctcggagctcctgggtacatctgaccgcctcttctgggaacccatgaaggttcacgacatccgctggaactttgagaagttcctggtggggccagatggtatacccatcatgcgctggcaccaccggaccacggtcagcaacgtcaagatggacatcctgtcctacatgaggcggcaggcagccctgggggtcaagaggaagtaactgaaggccgtctcatcccatgtccaccatgtaggggagggactttgttcaggaagaaatccgtgtctccaaccacactatctacccatcacagacccctttcctatcactcaaggccccagcctggcacaaatggatgcatacagttctgtgtactgccaggcatgtgggtgtgggtgcatgtgggtgtttacacacatgcctacaggtatgcgtgattgtgtgtgtgtgcatgggtgtacagccacgtgtctacctatgtgtctttctgggaatgtgtaccatctgtgtgcctgcagctgtgtagtgctggacagtgacaaccctttctctccagttctccactccaatgataatagttcacttacacctaaacccaaaggaaaaaccagctctaggtccaattgttctgctctaactgatacctcaaccttggggccagcatctcccactgcctccaaatattagtaactatgactgacgtccccagaagtttctgggtctaccacactccccaaccccccactcctacttcctgaagggccctcccaaggctacatccccaccccacagttctccctgagagagatcaacctccctgagatcaaccaaggcagatgtgacagcaagggccacggaccccatggcaggggtggcgtcttcatgagggaggggcccaaagcccttgtgggcggacctcccctgagcctgtctgaggggccagcccttagtgcattcaggctaaggcccctgggcagggatgccacccctgctccttcggaggacgtgccctcacccctcactggtccactggcttgagactcaccccgtctgcccaggaaccggggatgagatcctctagatgac

SEQ ID NO: 332254 - DNA, 1770 bp, Homo sapiens
ccatggatatctcagcagtatgctggcaaatacgtcctctgtcaagtgcgaggcgtggccagtacattgaactgaatgcactacaggaagagcttgcaccattcggtctggtcattctgggctttccctgcaaccaatttggaaaacaggaaccaggagagaactcagagatccttcctaccctcaagtatgtccgaccaggtggaggctttgtccctaatttccagctctttgagaaaggggatgtcaatggagagaaagagcagaaattctacactttcctaaagaactcctgtcctcccacctcggagctcctgggtacatctgaccgcctcttctgggaacccatgaaggttcacgacatccgctggaactttgagaagttcctggtggggccagatggtatacccatcatgcgctggcaccaccggaccacggtcagcaacgtcaagatggacatcctgtcctacatgaggcggcaggcagccctgggggtcaagaggaagtaactgaaggccgtctcatcccatgtccaccatgtaggggagggactttgttcaggaagaaatccgtgtctccaaccacactatctacccatcacagacccctttcctatcactcaaggccccagcctggcacaaatggatgcatacagttctgtgtactgccaggcatgtgggtgtgggtgcatgtgggtgtttacacacatgcctacaggtatgcgtgattgtgtgtgtgtgcatgggtgtacagccacgtgtctacctatgtgtctttctgggaatgtgtaccatctgtgtgcctgcagctgtgtagtgctggacagtgacaaccctttctctccagttctccactccaatgataatagttcacttacacctaaacccaaaggaaaaaccagctctaggtccaattgttctgctctaactgatacctcaaccttggggccagcatctcccactgcctccaaatattagtaactatgactgacgtccccagaagtttctgggtctaccacactccccaaccccccactcctacttcctgaagggccctcccaaggctacatccccaccccacagttctccctgagagagatcaacctccctgagatcaaccaaggcagatgtgacagcaagggccacggaccccatggcaggggtggcgtcttcatgagggaggggcccaaagcccttgtgggcggacctcccctgagcctgtctgaggggccagcccttagtgcattcaggctaaggcccctgggcagggatgccacccctgctccttcggaggacgtgccctcacccctcactggtccactggcttgagactcaccccgtctgcccagtaaaagcctttctgcagcagctgaaaaaaaaaaaaaaaaaaaaaaaaaaaaaaaaaaaaaaaaaaaaaaaaaaaaaaaaaaaaaaaaaaaaaaaaaaaaaagagagggggcggcgcgcgccccaaaacttctccccggcgggggcgcgccccggagcgcgcccccccctgttttggtgacaaagggggcggccccacagagagagaggagagctatctatattatataccagacgagcgcggcgcgcggcgcgcgcgggttattaacaacgacaacgaggcgagcgggggggagagaaaccaaccggcggagcccgcggaggcgattcttatgagtgagaagaggcgccccccctcttatctcgcgcggggggggggggcacgcacattcagggcggcggcacaccacaccctcgcgtgagg

SEQ ID NO: 332255 - DNA, 2256 bp, Homo sapiens
agccaaaagaggaagggaccgcctcccacgtccacagggacctgacttccacctctctgcccagatttgcttatgtcactgtcgccccgggacggggaggtggggagctgagggcaagtcgcgcccgcccctgaaatcccagccgcctagcgattggctgcaagggtctcggcttggccgcggattggtcacacccgagggcttgaaaggtggctgggagcgccggacacctcagacggacggtggccagggatcaggcagcggctcaggcgaccctgagtgtgcccccaccccgccatggcccggctgctgcaggcgtcctgcctgctttccctgctcctggccggcttcgtctcgcagagccggggacaagagaagtcgaagatggactgccatggtggcataagtggcaccatttacgagtacggagccctcaccattgatggggaggagtacatccccttcaagcagtatgctggcaaatacgtcctctttgtcaacgtggccagctactgaggcctgacgggccagtacattgaactgaatgcactacaggaagagcttgcaccattcggtctggtcattctgggctttccctgcaaccaatttggaaaacaggaaccaggagagaactcagagatccttcctaccctcaaatgtccgagcgcacggtggagggctatgtctcctagagtttccagtctctttgacgaaagggggatgtcaagtggagacgaaagagcatgaacattctagcacttgtctctaaatggaactcctgtcctcccacctcggagctcctgggtacatctgaccgcctcttctgggaacccatgaaggttcacgacatccgctggaactttgagaagttcctggtggggccagatggtatacccatcatgcgctggcaccaccggaccacggtcagcaacgtcaagatggacatcctgtcctacatgaggcggcaggcagccctgggggtcaagaggaagtaactgaaggccgtctcatcccatgtccaccatgtaggggagggactttgttcaggaagaaatccgtgtctccaaccacactatctacccatcacagacccctttcctatcactcaaggccccagcctggcacaaatggatgcatacagttctgtgtactgccaggcatgtgggtgtgggtgcatgtgggtgtttacacacatgcctacaggtatgcgtgattgtgtgtgtgtgcatgggtgtacagccacgtgtctacctatgtgtctttctgggaatgtgtaccatctgtgtgcctgcagctgtgtagtgctggacagtgacaaccctttctctccagttctccactccaatgataatagttcacttacacctaaacccaaaggaaaaaccagctctaggtccaattgttctgctctaactgatacctcaaccttggggccagcatctcccactgcctccaaatattagtaactatgactgacgtccccagaagtttctgggtctaccacactccccaaccccccactcctacttcctgaagggccctcccaaggctacatccccaccccacagttctccctgagagagatcaacctccctgagatcaaccaaggcagatgtgacagcaagggccacggaccccatggcaggggtggcgtcttcatgagggaggggcccaaagcccttgtgggcggacctcccctgagcctgtctgaggggccagcccttagtgcattcaggctaaggcccctgggcagggatgccacccctgctccttcggaggacgtgccctcacccctcactggtccactggcttgagactcaccccgtctgcccagtaaaagcctttctgcagcagctgaaaaaaaaaaaaaaaaaaaaaaaaaaaaaaaaaaaaaaaaaaaaaaaaaaaaaaaaaaaaaaaaaaaaaaaaaaaaaagagagggggcggcgcgcgccccaaaacttctccccggcgggggcgcgccccggagcgcgcccccccctgttttggtgacaaagggggcggccccacagagagagaggagagctatctatattatataccagacgagcgcggcgcgcggcgcgcgcgggttattaacaacgacaacgaggcgagcgggggggagagaaaccaaccggcggagcccgcggaggcgattcttatgagtgagaagaggcgccccccctcttatctcgcgcggggggggggggcacgcacattcagggcggcggcacaccacaccctcgcgtgagg

SEQ ID NO: 332256 - DNA, 1811 bp, Homo sapiens
  misc_feature (1771)..(1771): n is a, c, g, or t
agccaaaagaggaagggaccgcctcccacgtccacagggacctgacttccacctctctgcccagatttgcttatgtcactgtcgccccgggacggggaggtggggagctgagggcaagtcgcgcccgcccctgaaatcccagccgcctagcgattggctgcaagggtctcggcttggccgcggattggtcacacccgagggcttgaaaggtggctgggagcgccggacacctcagacggacggtggccagggatcaggcagcggctcaggcgaccctgagtgtgcccccaccccgccatggcccggctgctgcaggcgtcctgcctgctttccctgctcctggccggcttcgtctcgcagagccggggacaagagaagtcgaagatggactgccatggtggcataagtggcaccatttacgagtacggagccctcaccattgatggggaggagtacatccccttcaagcagtatgctggcaaatacgtcctctttgtcaacgtggccagctactgaggcctgacgggccagtacattgaactgaatgcactacaggaagagcttgcaccattcggtctggtcattctgggctttccctgcaaccaatttggaaaacaggaaccaggagagaactcagagatccttcctaccctcaagtatgtccgaccaggtggaggctttgtccctaatttccagctctttgagaaaggggatgtcaatggagagaaagagcagaaattctacactttcctaaagaactcctgtcctcccacctcggagctcctgggtacatctgaccgcctcttctgggaacccatgaaggttcacgacatccgctggaactttgagaagttcctggtggggccagatggtatacccatcatgcgctggcaccaccggaccacggtcagcaacgtcaagatggacatcctgtcctacatgaggcggcaggcagccctgggggtcaagaggaagtaactgaaggccgtctcatcccatgtccaccatgtaggggagggactttgttcaggaagaaatccgtgtctccaaccacactatctacccatcacagacccctttcctatcactcaaggccccagcctggcacaaatggatgcatacagttctgtgtactgccaggcatgtgggtgtgggtgcatgtgggtgtttacacacatgcctacaggtatgcgtgattgtgtgtgtgtgcatgggtgtacagccacgtgtctacctatgtgtctttctgggaatgtgtaccatctgtgtgcctgcagctgtgtagtgctggacagtgacaaccctttctctccagttctccactccaatgataatagttcacttacacctaaacccaaaggaaaaaccagctctaggtccaattgttctgctctaactgatacctcaaccttggggccagcatctcccactgcctccaaatattagtaactatgactgacgtccccagaagtttctgggtctaccacactccccaaccccccactcctacttcctgaagggccctcccaaggctacatccccaccccacagttctccctgagagagatcaacctccctgagatcaaccaaggcagatgtgacagcaagggccacggaccccatggcaggggtggcgtcttcatgagggaggggcccaaagcccttgtgggcggacctcccctgagcctgtctgaggggccagcccttagtgcattcaggctaaggcccctgggcagggatgccacccacgccccccccccccccccgaccncccccccccccccacactaacccctacaaaacacaccccc

SEQ ID NO: 332257 - DNA, 1555 bp, Homo sapiens
agccaaaagaggaagggaccgcctcccacgtccacagggacctgacttccacctctctgcccagatttgcttatgtcactgtcgccccgggacggggaggtggggagctgagggcaagtcgcgcccgcccctgaaatcccagccgcctagcgattggctgcaagggtctcggcttggccgcggattggtcacacccgagggcttgaaaggtggctgggagcgccggacacctcagacggacggtggccagggatcaggcagcggctcaggcgaccctgagtgtgcccccaccccgccatggcccggctgctgcaggcgtcctgcctgctttccctgctcctggccggcttcgtctcgcagagccggggacaagagaagtcgaagatggactgccatggtggcataagtggcaccatttacgagtacggagccctcaccattgatggggaggagtacatccccttcaagcagtatgctggcaaatacgtcctctttgtcaacgtggccagctactgaggcctgacgggccagtacattgaactgaatgcactacaggaagagcttgcaccattcggtctggtcattctgggctttccctgcaaccaatttggaaaacaggaaccaggagagaactcagagatccttcctaccctcaagtatgtccgaccaggtggaggctttgtccctaatttccagctctttgagaaaggggatgtcaatggagagaaagagcagaaattctacactttcctaaagaactcctgtcctcccacctcggagctcctgggtacatctgaccgcctcttctgggaacccatgaaggttcacgacatccgctggaactttgagaagttcctggtggggccagatggtatacccatcatgcgctggcaccaccggaccacggtcagcaacgtcaagatggacatcctgtcctacatgaggcggcaggcagccctgggggtcaagaggaagtaactgaaggccgtctcatcccatgtccaccatgtaggggagggactttgttcaggaagaaatccgtgtctccaaccacactatctacccatcacagacccctttcctatcactcaaggccccagcctggcacaaatggatgcatacagttctgtgtactgccaggcatgtgggtgtgggtgcatgtgggtgtttacacacatgcctacaggtatgcgtgattgtgtgtgtgtgcatgggtgtacagccacgtgtctacctatgtgtctttctgggaatgtgtaccatctgtgtgcctgcagctgtgtagtgctggacagtgacaaccctttctctccagttctccactccaatgataatagttcacttacacctaaacccaaaggaaaaaccagctctaggtccaattgttctgctctaactgatacctcaaccttggggccagcatctcccactgcctccaaatattagtaactatgactgacgtccccagaagtttctgggtctaccacactccccaaccccccgggttaggtctacctgaaggtctacctgggtacctacctggcttagtcaaccg

SEQ ID NO: 332258 - DNA, 1429 bp, Homo sapiens
agccaaaagaggaagggaccgcctcccacgtccacagggacctgacttccacctctctgcccagatttgcttatgtcactgtcgccccgggacggggaggtggggagctgagggcaagtcgcgcccgcccctgaaatcccagccgcctagcgattggctgcaagggtctcggcttggccgcggattggtcacacccgagggcttgaaaggtggctgggagcgccggacacctcagacggacggtggccagggatcaggcagcggctcaggcgaccctgagtgtgcccccaccccgccatggcccggctgctgcaggcgtcctgcctgctttccctgctcctggccggcttcgtctcgcagagccggggacaagagaagtcgaagatggactgccatggtggcataagtggcaccatttacgagtacggagccctcaccattgatggggaggagtacatccccttcaagcagtatgctggcaaatacgtcctctttgtcaacgtggccagctactgaggcctgacgggccagtacattgaactgaatgcactacaggaagagcttgcaccattcggtctggtcattctgggctttccctgcaaccaatttggaaaacaggaaccaggagagaactcagagatccttcctaccctcaagtatgtccgaccaggtggaggctttgtccctaatttccagctctttgagaaaggggatgtcaatggagagaaagagcagaaattctacactttcctaaagaactcctgtcctcccacctcggagctcctgggtacatctgaccgcctcttctgggaacccatgaaggttcacgacatccgctggaactttgagaagttcctggtggggccagatggtatacccatcatgcgctggcaccaccggaccacggtcagcaacgtcaagatggacatcctgtcctacatgaggcggcaggcagccctgggggtcaagaggaagtaactgaaggccgtctcatcccatgtccaccatgtaggggagggactttgttcaggaagaaatccgtgtctccaaccacactatctacccatcacagacccctttcctatcactcaaggccccagcctggcacaaatggatgcatacaggaagagcgtgcaccattcggtctggtcattctgggctttccctgcaaccaatttggaaaacaggaaccaggagagaactcagagatccttcctaccctcaagtatgtccgaccaggtggaggcttgtccctaatttccagctctttgagaaaggggatgtcaatggcagagaacgagcagaaattctacactttcctaagagaactcctgtcctcccacctcggacatacttgagggtaggaaggatctctgagttctctcctggttcctgttttccaaattggttgcagggaaagcccagaatg

SEQ ID NO: 332259 - DNA, 970 bp, Homo sapiens
agccaaaagaggaagggaccgcctcccacgtccacagggacctgacttccacctctctgcccagatttgcttatgtcactgtcgccccgggacggggaggtggggagctgagggcaagtcgcgcccgcccctgaaatcccagccgcctagcgattggctgcaagggtctcggcttggccgcggattggtcacacccgagggcttgaaaggtggctgggagcgccggacacctcagacggacggtggccagggatcaggcagcggctcaggcgaccctgagtgtgcccccaccccgccatggcccggctgctgcaggcgtcctgcctgctttccctgctcctggccggcttcgtctcgcagagccggggacaagagaagtcgaagatggactgccatggtggcataagtggcaccatttacgagtacggagccctcaccattgatggggaggagtacatccccttcaagcagtatgctggcaaatacgtcctctttgtcaacgtggccagctactgaggcctgacgggccagtacattgaactgaatgcactacaggaagagcttgcaccattcggtctggtcattctgggctttccctgcaaccaatttggaaaacaggaaccaggagagaactcagagatccttcctaccctcaagtgagtactcactcagcatcctgagaaagctcctctcacatggcccacatcttgttatcaaccccaaatcatggtggacatttatcggccaccaagaactactctcctcttctaggatccccagtggaatgagggaagggaagggacaagagagggagaaggacagggacaactggttgtgatgtgcatccgcagggagcaccaaggttgagggacactgaaaagggaccaggctagaaaggaagaccgtggactcacattatgcctatgcccactgcacattcactggctcctgctgcccactgcagaataaa

SEQ ID NO: 332260 - DNA, 365 bp, Homo sapiens
aggcccaaactgagacttgaaagacaggaagaccacgagatcgaggagacaggttagccaaggtataaaacgaaactgggatagacagcagtgtccagcacatggcgggttcttcatgaacatctgtaaaatgagtaaatacaaacgtgcctaaaccaagtaaatgaagagaccatccaggttatcctgccctgtctaaaatccagtcactgccctgggagtcctgccttgcatggtatcatcgcccctgtttcagcacagggagttcctgtccctagaaaaaccctgaccctggttaacccagagacagctgaaatacagaaacaccaaacatcttcttgcccctaattaatggcctctgactg

SEQ ID NO: 332261 - DNA, 428 bp, Homo sapiens
gatctctcccatgtaagcagcacggagcagctagagagcagagtgaaggctgcagatctgcgtgatcggcacagaagacacacaggcagggggcccttaatagcctcattcagcaacccacagcggcaagattaggatgggaagcagaagtcacaaaaatgtggactaattcataagccactgaatcactcctgctgccttaacactagattctagccctactggtcttgcaacacaaagtgaaaaggcaaatcttgcaaaacacacggtgcttcacaaagtcaaagtaaagtgacatgggatagctgcctgcatcaccacaaagcaaacaataaggaggacctggcagttagggcacctatgcctgaaggaaacacaaggctggtgacccagcaagtgctttaaaagagaatgatttggtcccagct

SEQ ID NO: 332262 - DNA, 344 bp, Homo sapiens
catctaaaggttgagttaaagcctcaagaggtgcagcaccagggacaggagctctcagccagctttggtgaacaatgccgcaggccagacccagctggtacctgctcctacacagcccacagtgctaagaatggttcatatttcttaatggttggaaaaaatgaacaaattaacattttatggcatgtgaaaattacatgagattaaaattttgttgtccacaaaatttttttctttttttaaaataagagtcagggtctcgctctatcgcccaggctggagtgcagtagtataatcatggttcactgtagccttgacctcctgggttcaagcgatcctcccat

SEQ ID NO: 332263 - DNA, 354 bp, Homo sapiens
cctttgcttaatttcccaggtaagagtgaggagcatggctgactggaggtggtggactgggtggggtctgtggctgaaatttcttggacctccccttggtggtgtgaggtcacagatgcaggtagcagactccagattatcacattacgctgtgggcttcagcagccttgccagcccagcttctgtctgggagtggatcccccaaaaaaccctttatccactgtcctctcagcacacattgtgcttctcctggttctctccgctaatggtggtgttttcatccctgactggctcaccctctgggtctatccccaagagctcacattactagcaggtgttctctccttgcctgat

SEQ ID NO: 332264 - DNA, 453 bp, Homo sapiens
gcacgtggtcttgggggaggaagaggaaaaagtaaaaaagacacgtgccagatggacgggaggcaacataattacgggaaccaagcaggataaaattctagaaagatgatttgacctttcgaagaggtcagaattgttgaggatttcaacagaaggtcgctgatgatcttccagagtgtggtttcagagaatggaaggtacagaggcagaatctaagggggtaaagaatgcatagatggtgaagaggaaaaaacagaatgtgtctcttgggatgttcccagtgaatggggagggcagagtgacctgagggagcagcgtgttgagggaaggtttttctgaggttggaatgaccctgaaggacggagccagtagagagggagaaactgatgacttagattaagcttcacaggcaggaggtggaggaagaggtgaagggcacataccgtcggcctt

SEQ ID NO: 332265 - DNA, 476 bp, Homo sapiens
tttagcctcacatatatagctgcctcctgccatgacatgtccctcttgcccagagccatactctgagacttcacagacatcaggacctaggtaataaatatatacctaaagcattgagagatggtagtgaagacagtattgtttaatttcctttttatttgtctctaattcagctcctctagactgtaagcttcatgagggtcatttgcaggcatgttcaccaccataccccagcatctagtacagtgctagaccttgagcctcataattgtaaagtgatgggtgtttgtggttccactcacttgtcctcttcttcacattattgggttcttgtcaagccaccttaatctgcctttgtttgatcccaagtgttttggtaaagatctctttgaaaggtgaagatttttctgacccctattcttaagctaactgaaagcattccaagatgaatccttttcagaaattaacaggctcca

SEQ ID NO: 332266 - DNA, 402 bp, Homo sapiens
ctcctgctagaaccgctgacaaccattttggaccacaatccacaagaaaagggaggcagcgttaaagatggtgaaaaactgtgtaagccttggcaacactttaagccttggatcctccaggccttatgtttcactcctagattcttcaattacataaaccaacaaatcccctttctgcggaagccagttcgaggcgagattctgtttcaaggtcgacagaatcctgactaatgaaatccgaagtgctgtggtgtatgctgcatgctggctatacacagatgaagcaaggtgatccataccatccttccaggcactcacaggctgatgtggagacagccacaaacaattacagctatttaaagccaataagataactgctttaattaaatactacacagtgca

SEQ ID NO: 332267 - DNA, 203 bp, Homo sapiens
ggcgggccaggaggtgtccatctgccggggtgtttgtggggcgagggaacaagggagaggttttttttctacccggaagcctgagagtgaagggggtgaaactcggatttggggaaggaaacaggaactttgcctcagggcacatttggtttccagcaacagattcacacgggctgagctccctcccagcttgcctgggcctc

SEQ ID NO: 332268 - DNA, 821 bp, Homo sapiens
catgcaggtgagcaccaatgttcacttccggtgttcgttccagagaattctgtttaacaaatagaatggtttgttggtgtttgcatgtgtctgtgtcaatatgtgtgcatgagtgtgtgtgaggaatgtgtgtgtcactgagtgtgcatacgagtgtgtgtgtgcatgagtgtgtgtctgtgtgtatgcgtgaatgcgtgggtatgtgaggagtgtgtgtgcatgtgtgtctgcgtgaatgcgtgggtatgagtgtgtgtgtgcatgagtgtgtgtgtgtatgcgtgaatgcgtgggtatgtgaggagtgtgtgcatgagtgtgtctgtgtgtatgcgtgaatgcgtgggtgtgtgaggagtgcttatcagtgcattgtgcgtgtggagtgtctgtgcgtgtctgttcatgggttgcatatgtgttgagtgtgcatgtgtgttgagtgtgcatgagttgtgtgagtggatgtgagtgtacctgtgagtttgcgtgtgtgtgcatgcgtgtgagttgtgtgcgtgtgtgtgcatgtgaattgtgaggagtgcatatggagtgcatgtgttgtgagtgtgcatgagttcacgtgagttgtgtcagttgtgtgcgtgcgtttgtgagttgtgtgtgagatgtgtgttgtgtgcatgagttgtgtgcatgagatgtatgtgagttgtgtgcatatgcacgtgtgagttgagttgtgtgcatggagtgttatgtgcgtgtgcatgtgtgtgtgttgtgtgcatgagttgaatgagttgtatgtgtgtgttgtgtgcgagttgagtatgatgtgtgtgcgtgtgtga

SEQ ID NO: 332269 - DNA, 375 bp, Homo sapiens
cttggcctcccaaagtgctgggattacaggcgggagccactgcacccggccacacgtggttattttaaatttgcttttgaatcagtgacacgttcatgtttttaaattttgaagtatgaaaaggtgcagagaggtttccttttttcctcttctgtccatgcaggtgagcaccaatgttcacttccggtgttcgttccagagaattctgtttaacaaatagaatggtttgttggtgtttgcatgtgtctgtgtcaatatgtgtgcatgagtgtgtgtgaggaatgtgtgtgtcactgagtgtgcatacgagtgtgtgtgtgcatgagtgtgtgtctgtgtgtatgcgtgaatgcgtgggtatgtgaggagtgtgtg

SEQ ID NO: 332270 - DNA, 458 bp, Homo sapiens
gatcacctgaggtcaggagttcgagaccatcctggccaatatggtgaaaccctgtctctcctaaaaatacaaaaattagccaggtgtggtggcatgcgcctgtaatcccagctactcaagaggctgaggtaggacaatcacttgaacctgggaggcagaggttgcggtgagccgagatctcaccattgcactccagcctgggcaacagagtgagactccatctcaaaaaaaacaaaacaaaacaaacaaaaaagaacaggtggggacagactagggagtaggccttcagctgggggacagagtgacagcccccggcaggaaagtcaagccctagatttcacactagcttccttgttctcccaacaaccacgagggaaggttgtcatcattcctattttgcagagcagaaagctgaggcttggaatatgtcgcctgaggtcacgcagctgggatgctga

SEQ ID NO: 332271 - DNA, 432 bp, Homo sapiens
gccttttcggggccctcaccccgacccacaccgcttccattcttgggtgcaaagggccttccttaacagtcggcggcagctctggggccggcgcatttttttctgtgggggacacccggcacaagaagggtggaggaatggggctgcgcgtcactcccacagcttcttagagagccgttcgcaaggaggaccgagtgtcacgtgagtgagctggaggaggtcacgttaccttcctcctgtgagaggctcaaacacagctcaggattttaccagtatggagagaagaaaccttcaggcggggcgcggtggcgctcctgtggccccagctactctggaggccgaaacaggaggattgcttgtgcccgagtcgaggctgcagtgaagccgattgtttcactgcactccagcctgggcaacagaggcaagaccctg

SEQ ID NO: 332272 - DNA, 436 bp, Homo sapiens
catggttcacgaggcccttctgcattgctgtcttctcagcacctagcacagttgtgtaggaattttaaaatgtgtatctgtttaacaaatcatttgatcccctcatccccacataaatgcacaggtctctcccgtagcctggcttcctctgctggagggacatgccgctgttgtgcaagggctggggaagcaagcaccagccaggttcagagagccattcatctgcagccagggttcattttcttagtctagccactgaaacgattgttatcaacaggaacctgtggtgaacatcactttgcttccttctctggcaacagctgcctcagaaacctagccaaaggctcattgggtcttgtccttagatctcatgtccacacacttccctgttcaaaactctaggagccaggtacaggaaacccagcctctcctggga

SEQ ID NO: 332273 - DNA, 223 bp, Homo sapiens
gcagaactgagttcccggcagctacaggactgaggctccactttcttgctggctgtcagctgagggccatgctcctctccaagaggctcctgtagtccccttccacatgtgcctctcacatgcagaaggtcccgctccaggctgctaagatggggtcttaaataacgtaacacattggccgggcgcggtggctcatgcctataatcccagcactttgggaggc

SEQ ID NO: 332274 - DNA, 354 bp, Homo sapiens
attacacaagttcacctgtttgctatcatgtgacaaactagatacaaatccttagaatatgtaaaggttaatctttgacatggatactgacggccaaaaaatcattcatttttatttgtgccaaagctagttctgatttaacactaagaacatgactaagctaccattttagagccatataattttaatattttccacaatgccttggaaatagctatcactaaaatagtacccaaaacatcatgggtagataatgtttttaaaaatgttgactgaaaatacactttggtttgaaattccagagtaaagaacaggtaaagagactaaaatagctaagatgcattgtagggatga

SEQ ID NO: 332275 - DNA, 409 bp, Homo sapiens
aaaattcagagcccagatttcattgtttatatgatactgcctgatacttcctaaaggcttggtagatagaggggcctgagccttgaattccagctctgcctcttactagctgtgtgaccttgggaaaaccatgtaacatctctgaaactcagtctcctgagatctaaggtggaaataatactaacttctttaccaccaggttgttgagacaatgcaatgggatgtgcacagagcactcagcacagtgcctggcccctggtaggtgctcactaaatgctaattattgctaactttagtttccatgaggaactccatccccatcacttctgagaactgggggctacagaagtgtggaagcacatagacaaatgtaatggagaagactttgctgtggcttatggtacacttc

SEQ ID NO: 332276 - DNA, 433 bp, Homo sapiens
catgtgactacgtgctagtcattggcaaatgggtgtaacttccataacaagttttccctttcacctttttttccagctggttggaatgttacagtgacaagccacctagaacactgtgatgcaggcaacccttgtttaaccactgttttgtgggtctctaaaggaggaactgagctgtatcctgattggtacaatgttcaagactggttcagtgttgaacacacaataggcactccttttctccctgggaaagtgaaaaacagtcatggtctttgcctttttctccaattagagcttataattgagtgaggcagacacacatgaaaataattagccaaaaggtcaattataaatgtttaaaaaaaaaaggtctgggcacatcttcacagaggtctgtgtagcacaggtataagcatttgtagacctcaaccaa

SEQ ID NO: 332277 - DNA, 1926 bp, Homo sapiens
  misc_feature (1926)..(1926): n is a, c, g, or t
tagaggatccccggagacacttacgatactaaactaactttttagaatgtgttccatcttcttaccacaaacaatattgatattttcccaacttttaaaatacaaatttgtaacaaagggtttagccagggattcttagtctagggattcacgaatccccagaaatcttttggaaaatttccagaaaaagcaaaactacattttgctgtaagttgtctttatattagacagggctctgggatcatactccttccctttttctaaaatgctagtttgtgttttataattagaatataaattctgtgagatctgggacttgatctgattcatttgtgtctatagtccaagcacaatcctggcatacggtgaaagctcagtaaatattttttgaataggaaatatttgtatttattcatttctagtaattttcttaaggctgtccttaagtcatatatttaaaaattaatttgaggttactaattggtatgaaagtctgtatttatagagttttatactttcatgcaaaaagttcttcccttgaaaaagactcataatgcttttgaattagtatgccactgatcaagtagttgcacaagttggtaattttccaagggtaaagttgagcaggggggtgacctgtatttacccagctcctacttgtgtcaggccccttatttatacacacacagagtcataggtaatcttctcagcacccttcttttacacatgagacttacagagatgaggtagtttgcacaggtcacaaagctaaataaatcatgcagccagaatttgaattagtctgactcctattctctttacattattccatgtggcctctttaaggtagagattatgtatgtctgtaccccacctgtgtctaccatgcaggaaaaatcatttcccattcttttgtaaatatcatgtttatcagtcttaagatactctattttattgattgagacagggtctcattctttgtcccaggctggagtgctatggcaccatcatggctctctgtagcctcaacctcccaggctcaagcgatcctcccagctcagcctcctgagtagctgggattacaggcacacagcaccacactcggctaattttttgtattttttgtagggatagggtctcgcttcattgccagggctagtcttgaactcctgggctcaagttatcttcctacctcagcctcccaaagttctgggattacagacgtgagccactgcatccaaccacaagataatctgtttttaatggtaaatattttataaagttgttgaaaggaatgagttaagcccaattccttgtcagttatttttcacttaaatacacatatttatcttaatccaaaaacggtttaaggcattttgatcttagagaagggaaggaaaaacaggacagattagtctctttttgagcccaaaagaatctctgtattgttttcagattattaaattttgcatgcatttttctgttttactttaaacggataaatgcaatacccatagctgcttttacatttttatatcacagtttttagaactatgtgaatattagttttttcatatttactttttattcacttgtcaaagcattgctatggagaagacctatactgtttgaaaatgcaggccgggcgcggtggctcatgcctgtaatgccagcactttgggagggcgaggcaggaggatcacgaggtcaggagatcaagaccatcctggctaacatggtgaaaccccgtctctactaaaaatacaaaaaaaacaaaattagccaggcgtggtggtgggcgcctgtagtctcagctactcgggaggttggggcaggagaatggtgtgaacctgggaggtggagcttgcggtgagccaagattgcaccactgcactccagcctgggcaacagagtgggactctgtcn

SEQ ID NO: 332278 - DNA, 1694 bp, Homo sapiens
tccatgtgatgaagccgggttttccaggttcgaaactagcaggattcctcgccagcaagaacagatcagcagaagagataaaagcaaacaggtctgggaggcagttctgttgccactctctctcctgtcaatgatggatctcagaaataccccagccaaatctctggacaagttcattgaagactatctcttgccagacacgtgtttccgcatgcaaatcaaccatgccattgacatcatctgtgggttcctgaaggaaaggtgcttccgaggtagctcctaccctgtgtgtgtgtccaaggtggtaaagggtggctcctcaggcaagggcaccaccctcagaggccgatctgacgctgacctggttgtcttcctcagtcctctcaccacttttcaggatcagttaaatcgccggggagagttcatccaggaaattaggagacagctggaagcctgtcaaagagagagagcattttccgtgaagtttgaggtccaggctccacgctggggcaacccccgtgcgctcagcttcgtactgagttcgctccagctcggggagggggtggagttcgatgtgctgcctgcctttgatgccctgggtcagttgactggcggctataaacctaacccccaaatctatgtcaagctcatcgaggagtgcaccgacctgcagaaagagggcgagttctccacctgcttcacagaactacagagagacttcctgaagcagcgccccaccaagctcaagagcctcatccgcctagtcaagcactggtaccaaaattgtaagaagaagcttgggaagctgccacctcagtatgccctggagctcctgacggtctatgcttgggagcgagggagcatgaaaacacatttcaacacagcccagggatttcggacggtcttggaattagtcataaactaccagcaactctgcatctactggacaaagtattatgactttaaaaaccccattattgaaaagtacctgagaaggcagctcacgaaacccaggcctgtgatcctggacccggcggaccctacaggaaacttgggtggtggagacccaaagggttggaggcagctggcacaagaggctgaggcctggctgaattacccatgctttaagaattgggatgggtccccagtgagctcctggattctgctggctgaaagcaacagtgcagacgatgagaccgacgatcccaggaggtatcagaaatatggttacattggaacacatgagtaccctcatttctctcatagacccagcacactccaggcagcatccaccccacaggcagaagaggactggacctgcaccatcctctgaatgccagtgcatcttgggggaaagggctccagtgttatctggaccagttccttcattttcaggtgggactcttgatccagagaggacaaagctcctcagtgagctggtgtataatccaggacagaacccaggtctcctgactcctggccttctatgccctctatcctatcatagataacattctccacagcctcacttcattccacctattctctgaaaatattccctgagagagaacagagagatttagataagagaatgaaattccagccttgactttcttctgtgcacctgatgggagggtaatgtctaatgtattatcaataacaataaaaataaagcaaataccaaaaaaaaagtg

SEQ ID NO: 332279 - DNA, 3328 bp, Homo sapiens
tccatgtgatgaagccgggttttccaggttcgaaactagcaggattcctcgccagcaagaacagatcagcagaagagataaaagcaaacaggtctgggaggcagttctgttgccactctctctcctgtcaatgatggatctcagaaataccccagccaaatctctggacaagttcattgaagactatctcttgccagacacgtgtttccgcatgcaaatcaaccatgccattgacatcatctgtgggttcctgaaggaaaggtgcttccgaggtagctcctaccctgtgtgtgtgtccaaggtggtaaagggtggctcctcaggcaagggcaccaccctcagaggccgatctgacgctgacctggttgtcttcctcagtcctctcaccacttttcaggatcagttaaatcgccggggagagttcatccaggaaattaggagacagctggaagcctgtcaaagagagagagcattttccgtgaagtttgaggtccaggctccacgctggggcaacccccgtgcgctcagcttcgtactgagttcgctccagctcggggagggggtggagttcgatgtgctgcctgcctttgatgccctgggtcagttgactggcggctataaacctaacccccaaatctatgtcaagctcatcgaggagtgcaccgacctgcagaaagagggcgagttctccacctgcttcacagaactacagagagacttcctgaagcagcgccccaccaagctcaagagcctcatccgcctagtcaagcactggtaccaaaattgtaagaagaagcttgggaagctgccacctcagtatgccctggagctcctgacggtctatgcttgggagcgagggagcatgaaaacacatttcaacacagcccagggatttcggacggtcttggaattagtcataaactaccagcaactctgcatctactggacaaagtattatgactttaaaaaccccattattgcggaccctacaggaaacttgggtggtggagacccaaagggttggaggcagctggcacaagaggctgaggcctggctgaattacccatgctttaagaattgggatgggtccccagtgagctcctggattctgctggtgagacctcctgcttcctccctgccattcatccctgcccctctccatgaagcttgagacatatagctggagaccattctttccaaagaacttacctcttgccaaaggccatttatattcatatagtgacaggctgtgctccatattttacagtcattttggtcacaatcgagggtttctggaattttcacatcccttgtccagaattcattcccctaagagtaataataaataatctctaacaccatttattgactgtctgcttcgggctcaggttctgtcctaagccctttaatatgcactctctcattaaatagtcacaacaatcccatgaggcatttttaaaaattttttattattttagattcagagggcacatgtgccatttgttacacagctatattgtgtaatggtggggtttgggcctctattgatcctgtcgcccaaatagtgaacagagtacccaaaaagaattttttcaacctttgcctttctcccttcctcctccctgttggagtccctagtgtctattgttcccatctttagcagatgttaagtatttgattttctgtttctgggttaattcacttcggataatggcctccagctgcaaccatgatttcattctttcttatggctgcataatactccatggtgtagatataccacactttctttatccagttcacactgatgggcacttaagttgattccatgactttgctattgtgaatcgtactgcgataaacatacgagtgccggtgtcttttgatagaatgatttctttacctttgggtagataccgagtagtgggattgctgggttgaatggacattctacttttagttatttgaaaagtcccatgaggcatgttttctatcattcccatcttacagatgagacaaaggctcagagaggtgaggtcacttgctcaaggacatcagctaacaagtggtggaaatggaattcaagctcagtggactctaaagccagtgctcatgtcactgtgctaaacagcctgccttgtcacatccccacctctcatctgaccaatgggagactctgagcagctgagtgacttgggttgtcacacagctaaacaggggcaaaggacccagtcttggatctttccacctccaagcaggaatctgtctgattccaggggattgatgatgttgcagatggctaggaagcagactccaggatggaatttagtatgcaggatgttctgggggagagccactggaaccagcactcagggaaaggggggaagaaaggataggaaggaagcatgaaagagaatagggagaagtgaacagggatgcagagcgaatgccagtttcagccaactccaaggacagccctggagctggaatggcctttagagctgccccatggtgacagaggtggccaggcttctatacccctacgtggatcactcactgtgcttgggcaccttgggaaagggcatggctttgagcaaaaggctctctgcagctgaggcaacccctaaaagggctgacggctgaagtctgtctgctgaccactgtcccagcagctggggcttgttagtccttcctcaaagggggatccagatggcatgtcacagtgtctaccgtaaatgctcactgaatccagctgcaatgcaggaagactccctgatgtgatcatgtgtctcaccctttcaagctgaaagcaacagtgcagacgatgagaccgacgatcccaggaggtatcagaaatatggttacattggaacacatgagtaccctcatttctctcatagacccagcacactccaggcagcatccaccccacaggcagaagaggactggacctgcaccatcctctgaatgccagtgcatcttgggggaaagggctccagtgttatctggaccagttccttcattttcaggtgggactcttgatccagagaggacaaagctcctcagtgagctggtgtataatccaggacagaacccaggtctcctgactcctggccttctatgccctctatcctatcatagataacattctccacagcctcacttcattccacctattctctgaaaatattccctgagagagaacagagagatttagataagagaatgaaattccagccttgactttcttctgtgcacctgatgggagggtaatgtctaatgtattatcaataacaataaaaataaagcaaataccaaaaaaaaagtg

SEQ ID NO: 332280 - DNA, 3420 bp, Homo sapiens
tccatgtgatgaagccgggttttccaggttcgaaactagcaggattcctcgccagcaagaacagatcagcagaagagataaaagcaaacaggtctgggaggcagttctgttgccactctctctcctgtcaatgatggatctcagaaataccccagccaaatctctggacaagttcattgaagactatctcttgccagacacgtgtttccgcatgcaaatcaaccatgccattgacatcatctgtgggttcctgaaggaaaggtgcttccgaggtagctcctaccctgtgtgtgtgtccaaggtggtaaagggtggctcctcaggcaagggcaccaccctcagaggccgatctgacgctgacctggttgtcttcctcagtcctctcaccacttttcaggatcagttaaatcgccggggagagttcatccaggaaattaggagacagctggaagcctgtcaaagagagagagcattttccgtgaagtttgaggtccaggctccacgctggggcaacccccgtgcgctcagcttcgtactgagttcgctccagctcggggagggggtggagttcgatgtgctgcctgcctttgatgccctgggtcagttgactggcggctataaacctaacccccaaatctatgtcaagctcatcgaggagtgcaccgacctgcagaaagagggcgagttctccacctgcttcacagaactacagagagacttcctgaagcagcgccccaccaagctcaagagcctcatccgcctagtcaagcactggtaccaaaattgtaagaagaagcttgggaagctgccacctcagtatgccctggagctcctgacggtctatgcttgggagcgagggagcatgaaaacacatttcaacacagcccagggatttcggacggtcttggaattagtcataaactaccagcaactctgcatctactggacaaagtattatgactttaaaaaccccattattgaaaagtacctgagaaggcagctcacgaaacccaggcctgtgatcctggacccggcggaccctacaggaaacttgggtggtggagacccaaagggttggaggcagctggcacaagaggctgaggcctggctgaattacccatgctttaagaattgggatgggtccccagtgagctcctggattctgctggtgagacctcctgcttcctccctgccattcatccctgcccctctccatgaagcttgagacatatagctggagaccattctttccaaagaacttacctcttgccaaaggccatttatattcatatagtgacaggctgtgctccatattttacagtcattttggtcacaatcgagggtttctggaattttcacatcccttgtccagaattcattcccctaagagtaataataaataatctctaacaccatttattgactgtctgcttcgggctcaggttctgtcctaagccctttaatatgcactctctcattaaatagtcacaacaatcccatgaggcatttttaaaaattttttattattttagattcagagggcacatgtgccatttgttacacagctatattgtgtaatggtggggtttgggcctctattgatcctgtcgcccaaatagtgaacagagtacccaaaaagaattttttcaacctttgcctttctcccttcctcctccctgttggagtccctagtgtctattgttcccatctttagcagatgttaagtatttgattttctgtttctgggttaattcacttcggataatggcctccagctgcaaccatgatttcattctttcttatggctgcataatactccatggtgtagatataccacactttctttatccagttcacactgatgggcacttaagttgattccatgactttgctattgtgaatcgtactgcgataaacatacgagtgccggtgtcttttgatagaatgatttctttacctttgggtagataccgagtagtgggattgctgggttgaatggacattctacttttagttatttgaaaagtcccatgaggcatgttttctatcattcccatcttacagatgagacaaaggctcagagaggtgaggtcacttgctcaaggacatcagctaacaagtggtggaaatggaattcaagctcagtggactctaaagccagtgctcatgtcactgtgctaaacagcctgccttgtcacatccccacctctcatctgaccaatgggagactctgagcagctgagtgacttgggttgtcacacagctaaacaggggcaaaggacccagtcttggatctttccacctccaagcaggaatctgtctgattccaggggattgatgatgttgcagatggctaggaagcagactccaggatggaatttagtatgcaggatgttctgggggagagccactggaaccagcactcagggaaaggggggaagaaaggataggaaggaagcatgaaagagaatagggagaagtgaacagggatgcagagcgaatgccagtttcagccaactccaaggacagccctggagctggaatggcctttagagctgccccatggtgacagaggtggccaggcttctatacccctacgtggatcactcactgtgcttgggcaccttgggaaagggcatggctttgagcaaaaggctctctgcagctgaggcaacccctaaaagggctgacggctgaagtctgtctgctgaccactgtcccagcagctggggcttgttagtccttcctcaaagggggatccagatggcatgtcacagtgtctaccgtaaatgctcactgaatccagctgcaatgcaggaagactccctgatgtgatcatgtgtctcaccctttcaagctgaaagcaacagtgcagacgatgagaccgacgatcccaggaggtatcagaaatatggttacattggaacacatgagtaccctcatttctctcatagacccagcacactccaggcagcatccaccccacaggcagaagaggactggacctgcaccatcctctgaatgccagtgcatcttgggggaaagggctccagtgttatctggaccagttccttcattttcaggtgggactcttgatccagagaggacaaagctcctcagtgagctggtgtataatccaggacagaacccaggtctcctgactcctggccttctatgccctctatcctatcatagataacattctccacagcctcacttcattccacctattctctgaaaatattccctgagagagaacagagagatttagataagagaatgaaattccagccttgactttcttctgtgcacctgatgggagggtaatgtctaaatgctgattgcatttagactagctacttcataaacagccccaccaagaaaagaaaatcgcgatcccgatataaaccattctagtat

SEQ ID NO: 332281 - DNA, 1524 bp, Homo sapiens
gagcattataggagtttaagacatgcaatgccttcagaacagtggctagtgctccataatgttagtgattgctcctgtcattttatttagggaggtttgcctcactaagcatcaattattatttttgtcgtctttttcagggtggctcctcaggcaagggcaccaccctcagaggccgatctgacgctgacctggttgtcttcctcagtcctctcaccacttttcaggatcagttaaatcgccggggagagttcatccaggaaattaggagacagctggaagcctgtcaaagagagagagcattttccgtgaagtttgaggtccaggctccacgctggggcaacccccgtgcgctcagcttcgtactgagttcgctccagctcggggagggggtggagttcgatgtgctgcctgcctttgatgccctgggtcagttgactggcggctataaacctaacccccaaatctatgtcaagctcatcgaggagtgcaccgacctgcagaaagagggcgagttctccacctgcttcacagaactacagagagacttcctgaagcagcgccccaccaagctcaagagcctcatccgcctagtcaagcactggtaccaaaattgtaagaagaagcttgggaagctgccacctcagtatgccctggagctcctgacggtctatgcttgggagcgagggagcatgaaaacacatttcaacacagcccagggatttcggacggtcttggaattagtcataaactaccagcaactctgcatctactggacaaagtattatgactttaaaaaccccattattgaaaagtacctgagaaggcagctcacgaaacccaggcctgtgatcctggacccggcggaccctacaggaaacttgggtggtggagacccaaagggttggaggcagctggcacaagaggctgaggcctggctgaattacccatgctttaagaattgggatgggtccccagtgagctcctggattctgctggctgaaagcaacagtgcagacgatgagaccgacgatcccaggaggtatcagaaatatggttacattggaacacatgagtaccctcatttctctcatagacccagcacactccaggcagcatccaccccacaggcagaagaggactggacctgcaccatcctctgaatgccagtgcatcttgggggaaagggctccagtgttatctggaccagttccttcattttcaggtgggactcttgatccagagaggacaaagctcctcagtgagctggtgtataatccaggacagaacccaggtctcctgactcctggccttctatgccctctatcctatcatagataacattctccacagcctcacttcattccacctattctctgaaaatattccctgagagagaacagagagatttagataagagaatgaaattccagccttgactttcttctgtgcacctgatgggagggtaatgtctaatgtattatcaataacaataaaaataaagcaaataccaaaaaaaaagtg

SEQ ID NO: 332282 - DNA, 1220 bp, Homo sapiens
tccatgtgatgaagccgggttttccaggttcgaaactagcaggattcctcgccagcaagaacagatcagcagaagagataaaagcaaacaggtctgggaggcagttctgttgccactctctctcctgtcaatgatggatctcagaaataccccagccaaatctctggacaagttcattgaagactatctcttgccagacacgtgtttccgcatgcaaatcaaccatgccattgacatcatctgtgggttcctgaaggaaaggtgcttccgaggtagctcctaccctgtgtgtgtgtccaaggtggtaaagtgtaagaagaagcttgggaagctgccacctcagtatgccctggagctcctgacggtctatgcttgggagcgagggagcatgaaaacacatttcaacacagcccagggatttcggacggtcttggaattagtcataaactaccagcaactctgcatctactggacaaagtattatgactttaaaaaccccattattgaaaagtacctgagaaggcagctcacgaaacccaggcctgtgatcctggacccggcggaccctacaggaaacttgggtggtggagacccaaagggttggaggcagctggcacaagaggctgaggcctggctgaattacccatgctttaagaattgggatgggtccccagtgagctcctggattctgctggctgaaagcaacagtgcagacgatgagaccgacgatcccaggaggtatcagaaatatggttacattggaacacatgagtaccctcatttctctcatagacccagcacactccaggcagcatccaccccacaggcagaagaggactggacctgcaccatcctctgaatgccagtgcatcttgggggaaagggctccagtgttatctggaccagttccttcattttcaggtgggactcttgatccagagaggacaaagctcctcagtgagctggtgtataatccaggacagaacccaggtctcctgactcctggccttctatgccctctatcctatcatagataacattctccacagcctcacttcattccacctattctctgaaaatattccctgagagagaacagagagatttagataagagaatgaaattccagccttgactttcttctgtgcacctgatgggagggtaatgtctaatgtattatcaataacaataaaaataaagcaaataccaaaaaaaaagtg

SEQ ID NO: 332283 - DNA, 1034 bp, Homo sapiens
tccatgtgatgaagccgggttttccaggttcgaaactagcaggattcctcgccagcaagaacagatcagcagaagagataaaagcaaacaggtctgggaggcagttctgttgccactctctctcctgtcaatgatggatctcagaaataccccagccaaatctctggacaagttcattgaagactatctcttgccagacacgtgtttccgcatgcaaatcaaccatgccattgacatcatctgtgggttcctgaaggaaaggtgcttccgaggtagctcctaccctgtgtgtgtgtccaaggtggtaaagggtggctcctcaggcaagggcaccaccctcagaggccgatctgacgctgacctggttgtcttcctcagtcctctcaccacttttcaggatcagttaaatcgccggggagagttcatccaggaaattaggagacagctggaagcctgtcaaagagagagagcattttccgtgaagtttgaggtccaggctccacgctggggcaacccccgtgcgctcagcttcgtactgagttcgctccagctcggggagggggtggagttcgatgtgctgcctgcctttgatgccctgggtcagttgactggcggctataaacctaacccccaaatctatgtcaagctcatcgaggagtgcaccgacctgcagaaagagggcgagttctccacctgcttcacagaactacagagagacttcctgaagcagcgccccaccaagctcaagagcctcatccgcctagtcaagcactggtaccaaaattgtaagaagaagcttgggaagctgccacctcagtatgccctggagctcctgacggtctatgcttgggagcgagggagcatgaaaacacatttcaacacagcccagggatttcggacggtcttggaattagtcataaactaccagcaactctgcatctactggacaaagtattatgactttaaaaaccccattattgaaaagtacctgcctttgatgccctgggtcagttgaatggcggctataaacctca

SEQ ID NO: 332284 - DNA, 2477 bp, Homo sapiens
ctgagtcccagttcatcccatgctgctattttgctctcccaggagcatctggactccctagacagagccccagcttctcacctgtccctctctaaatgctgctctgcaggcctgtgatcctggacccggcggaccctacaggaaacttgggtggtggagacccaaagggttggaggcagctggcacaagaggctgaggcctggctgaattacccatgctttaagaattgggatgggtccccagtgagctcctggattctgctggtgagacctcctgcttcctccctgccattcatccctgcccctctccatgaagcttgagacatatagctggagaccattctttccaaagaacttacctcttgccaaaggccatttatattcatatagtgacaggctgtgctccatattttacagtcattttggtcacaatcgagggtttctggaattttcacatcccttgtccagaattcattcccctaagagtaataataaataatctctaacaccatttattgactgtctgcttcgggctcaggttctgtcctaagccctttaatatgcactctctcattaaatagtcacaacaatcccatgaggcatttttaaaaattttttattattttagattcagagggcacatgtgccatttgttacacagctatattgtgtaatggtggggtttgggcctctattgatcctgtcgcccaaatagtgaacagagtacccaaaaagaattttttcaacctttgcctttctcccttcctcctccctgttggagtccctagtgtctattgttcccatctttagcagatgttaagtatttgattttctgtttctgggttaattcacttcggataatggcctccagctgcaaccatgatttcattctttcttatggctgcataatactccatggtgtagatataccacactttctttatccagttcacactgatgggcacttaagttgattccatgactttgctattgtgaatcgtactgcgataaacatacgagtgccggtgtcttttgatagaatgatttctttacctttgggtagataccgagtagtgggattgctgggttgaatggacattctacttttagttatttgaaaagtcccatgaggcatgttttctatcattcccatcttacagatgagacaaaggctcagagaggtgaggtcacttgctcaaggacatcagctaacaagtggtggaaatggaattcaagctcagtggactctaaagccagtgctcatgtcactgtgctaaacagcctgccttgtcacatccccacctctcatctgaccaatgggagactctgagcagctgagtgacttgggttgtcacacagctaaacaggggcaaaggacccagtcttggatctttccacctccaagcaggaatctgtctgattccaggggattgatgatgttgcagatggctaggaagcagactccaggatggaatttagtatgcaggatgttctgggggagagccactggaaccagcactcagggaaaggggggaagaaaggataggaaggaagcatgaaagagaatagggagaagtgaacagggatgcagagcgaatgccagtttcagccaactccaaggacagccctggagctggaatggcctttagagctgccccatggtgacagaggtggccaggcttctatacccctacgtggatcactcactgtgcttgggcaccttgggaaagggcatggctttgagcaaaaggctctctgcagctgaggcaacccctaaaagggctgacggctgaagtctgtctgctgaccactgtcccagcagctggggcttgttagtccttcctcaaagggggatccagatggcatgtcacagtgtctaccgtaaatgctcactgaatccagctgcaatgcaggaagactccctgatgtgatcatgtgtctcaccctttcaagctgaaagcaacagtgcagacgatgagaccgacgatcccaggaggtatcagaaatatggttacattggaacacatgagtaccctcatttctctcatagacccagcacactccaggcagcatccaccccacaggcagaagaggactggacctgcaccatcctctgaatgccagtgcatcttgggggaaagggctccagtgttatctggaccagttccttcattttcaggtgggactcttgatccagagaggacaaagctcctcagtgagctggtgtataatccaggacagaacccaggtctcctgactcctggccttctatgccctctatcctatcatagataacattctccacagcctcacttcattccacctattctctgaaaatattccctgagagagaacagagagatttagataagagaatgaaattccagccttgactttcttctgtgcacctgatgggagggtaatgtctaatgtattatcaataacaataaaaataaagcaaataccaaaaaaaaagtg

SEQ ID NO: 332285 - DNA, 2468 bp, Homo sapiens
ctgatacaggaaactagcatgtactagagcaaatagatatatacatgtaaacgtgtatataactaatataaaagattttacacaaataagattgatggccaggtgcaatgtaacctataaccccaccagatcgcgagttgggtggtggagacccaaagggttggaggcagctggcacaagaggctgaggcctggctgaattacccatgctttaagaattgggatgggtccccagtgagctcctggattctgctggtgagacctcctgcttcctccctgccattcatccctgcccctctccatgaagcttgagacatatagctggagaccattctttccaaagaacttacctcttgccaaaggccatttatattcatatagtgacaggctgtgctccatattttacagtcattttggtcacaatcgagggtttctggaattttcacatcccttgtccagaattcattcccctaagagtaataataaataatctctaacaccatttattgactgtctgcttcgggctcaggttctgtcctaagccctttaatatgcactctctcattaaatagtcacaacaatcccatgaggcatttttaaaaattttttattattttagattcagagggcacatgtgccatttgttacacagctatattgtgtaatggtggggtttgggcctctattgatcctgtcgcccaaatagtgaacagagtacccaaaaagaattttttcaacctttgcctttctcccttcctcctccctgttggagtccctagtgtctattgttcccatctttagcagatgttaagtatttgattttctgtttctgggttaattcacttcggataatggcctccagctgcaaccatgatttcattctttcttatggctgcataatactccatggtgtagatataccacactttctttatccagttcacactgatgggcacttaagttgattccatgactttgctattgtgaatcgtactgcgataaacatacgagtgccggtgtcttttgatagaatgatttctttacctttgggtagataccgagtagtgggattgctgggttgaatggacattctacttttagttatttgaaaagtcccatgaggcatgttttctatcattcccatcttacagatgagacaaaggctcagagaggtgaggtcacttgctcaaggacatcagctaacaagtggtggaaatggaattcaagctcagtggactctaaagccagtgctcatgtcactgtgctaaacagcctgccttgtcacatccccacctctcatctgaccaatgggagactctgagcagctgagtgacttgggttgtcacacagctaaacaggggcaaaggacccagtcttggatctttccacctccaagcaggaatctgtctgattccaggggattgatgatgttgcagatggctaggaagcagactccaggatggaatttagtatgcaggatgttctgggggagagccactggaaccagcactcagggaaaggggggaagaaaggataggaaggaagcatgaaagagaatagggagaagtgaacagggatgcagagcgaatgccagtttcagccaactccaaggacagccctggagctggaatggcctttagagctgccccatggtgacagaggtggccaggcttctatacccctacgtggatcactcactgtgcttgggcaccttgggaaagggcatggctttgagcaaaaggctctctgcagctgaggcaacccctaaaagggctgacggctgaagtctgtctgctgaccactgtcccagcagctggggcttgttagtccttcctcaaagggggatccagatggcatgtcacagtgtctaccgtaaatgctcactgaatccagctgcaatgcaggaagactccctgatgtgatcatgtgtctcaccctttcaagctgaaagcaacagtgcagacgatgagaccgacgatcccaggaggtatcagaaatatggttacattggaacacatgagtaccctcatttctctcatagacccagcacactccaggcagcatccaccccacaggcagaagaggactggacctgcaccatcctctgaatgccagtgcatcttgggggaaagggctccagtgttatctggaccagttccttcattttcaggtgggactcttgatccagagaggacaaagctcctcagtgagctggtgtataatccaggacagaacccaggtctcctgactcctggccttctatgccctctatcctatcatagataacattctccacagcctcacttcattccacctattctctgaaaatattccctgagagagaacagagagatttagataagagaatgaaattccagccttgactttcttctgtgcacctgatgggagggtaatgtctaatgtattatcaataacaataaaaataaagcaaataccaaaaaaaaagtg

SEQ ID NO: 332286 - DNA, 954 bp, Homo sapiens
tccatgtgatgaagccgggttttccaggttcgaaactagcaggattcctcgccagcaagaacagatcagcagaagagataaaagcaaacaggtctgggaggcagttctgttgccactctctctcctgtcaatgatggatctcagaaataccccagccaaatctctggacaagttcattgaagactatctcttgccagacacgtgtttccgcatgcaaatcaaccatgccattgacatcatctgtgggttcctgaaggaaaggtgcttccgaggtagctcctaccctgtgtgtgtgtccaaggtggtaaagggtggctcctcaggcaagggcaccaccctcagaggccgatctgacgctgacctggttgtcttcctcagtcctctcaccacttttcaggatcagttaaatcgccggggagagttcatccaggaaattaggagacagctggaagcctgtcaaagagagagagcattttccgtgaagtttgaggtccaggctccacgctggggcaacccccgtgcgctcagcttcgtactgagttcgctccagctcggggagggggtggagttcgatgtgctgcctgcctttgatgccctgggtcagttgactggcggctataaacctaacccccaaatctatgtcaagctcatcgaggagtgcaccgacctgcagaaagagggcgagttctccacctgcttcacagaactacagagagacttcctgaagcagcgccccaccaagctcaagagcctcatccgcctagtcaagcactggtaccaaaatcccgcttgttggtatttgtatatcttcatttgagaattctctgttcatgtccttagcccactttttgatgagattttttttttcttgctgattcgtttgagttctttgtagattctggatattagttggatgtatagattgtgaagattttctcccattctgtgggttgt

SEQ ID NO: 332287 - DNA, 576 bp, Homo sapiens
tccatgtgatgaagccgggttttccaggttcgaaactagcaggattcctcgccagcaagaacagatcagcagaagagataaaagcaaacaggtctgggaggcagttctgttgccactctctctcctgtcaatgatggatctcagaaataccccagccaaatctctggacaagttcattgaagactatctcttgccagacacgtgtttccgcatgcaaatcaaccatgccattgacatcatctgtgggttcctgaaggaaaggtgcttccgaggtagctcctaccctgtgtgtgtgtccaaggtggtaaagggtggctcctcaggcaagggcaccaccctcagaggccgatcctgactcctggccttctatgccctctatcctatcatagataacattctccacagcctcacttcattccacctattctctgaaaatattccctgagagagaacagagagatttagataagagaatgaaattccagccttgactttcttctgtgcacctgatgggagggtaatgtctaatgtattatcaataacaataaaaataaagcaaataccaaaaaaaaagtg

SEQ ID NO: 332288 - DNA, 1378 bp, Homo sapiens
aacgaaaccaacagcagtccaagctcagtcagcagaagagataaaagcaaacaggtctgggaggcagttctgttgccactctctctcctgtcaatgatggatctcagaaataccccagccaaatctctggacaagttcattgaagactatctcttgccagacacgtgtttccgcatgcaaatcaaccatgccattgacatcatctgtgggttcctgaaggaaaggtgcttccgaggtagctcctaccctgtgtgtgtgtccaaggtggtaaagggtggctcctcaggcaagggcaccaccctcagaggccgatctgacgctgacctggttgtcttcctcagtcctctcaccacttttcaggatcagttaaatcgccggggagagttcatccaggaaattaggagacagctggaagcctgtcaaagagagagagcattttccgtgaagtttgaggtccaggctccacgctggggcaacccccgtgcgctcagcttcgtactgagttcgctccagctcggggagggggtggagttcgatgtgctgcctgcctttgatgccctgggtcagttgactggcggctataaacctaacccccaaatctatgtcaagctcatcgaggagtgcaccgacctgcagaaagagggcgagttctccacctgcttcacagaactacagagagacttcctgaagcagcgccccaccaagctcaagagcctcatccgcctagtcaagcactggtaccaaaattgtaagaagaagcttgggaagctgccacctcagtatgccctggagctcctgacggtctatgcttgggagcgagggagcatgaaaacacatttcaacacagcccagggatttcggacggtcttggaattagtcataaactaccagcaactctgcatctactggacaaagtattatgactttaaaaaccccattattgaaaagtacctgagaaggcagctcacgaaacccaggcctgtgatcctggacccggcggaccctacaggaaacttgggtggtggagacccaaagggttggaggcagctggcacaagaggctgaggcctggctgaattacccatgctttaagaattgggatgggtccccagtgagctcctggattctgctggtgagacctcctgcttcctccctgccattcatccctgcccctctccatgaagcttgagacatatagctggagaccattctttccaaagaacttacctcttgccaaaggccatttatattcatatagtgacaggctgtgctccatattttacagtcattttggtcacaatcgagggtttctggaattttcacatcccttgtccagaattcattcccctaagagtaataataaataatctctaacacca

SEQ ID NO: 332289 - DNA, 3382 bp, Homo sapiens
tccatgtgatgaagccgggttttccaggttcgaaactagcaggattcctcgccagcaagaacagatcagcagaagagataaaagcaaacaggtctgggaggcagttctgttgccactctctctcctgtcaatgatggatctcagaaataccccagccaaatctctggacaagttcattgaagactatctcttgccagacacgtgtttccgcatgcaaatcaaccatgccattgacatcatctgtgggttcctgaaggaaaggtgcttccgaggtagctcctaccctgtgtgtgtgtccaaggtggtaaagggtggctcctcaggcaagggcaccaccctcagaggccgatctgacgctgacctggttgtcttcctcagtcctctcaccacttttcaggatcagttaaatcgccggggagagttcatccaggaaattaggagacagctggaagcctgtcaaagagagagagcattttccgtgaagtttgaggtccaggctccacgctggggcaacccccgtgcgctcagcttcgtactgagttcgctccagctcggggagggggtggagttcgatgtgctgcctgcctttgatgccctgggtcagttgactggcggctataaacctaacccccaaatctatgtcaagctcatcgaggagtgcaccgacctgcagaaagagggcgagttctccacctgcttcacagaactacagagagacttcctgaagcagcgccccaccaagctcaagagcctcatccgcctagtcaagcactggtaccaaaattgtaagaagaagcttgggaagctgccacctcagtatgccctggagctcctgacggtctatgcttgggagcgagggagcatgaaaacacatttcaacacagcccagggatttcggacggtcttggaattagtcataaactaccagcaactctgcatctactggacaaagtattatgactttaaaaaccccattattgaaaagtacctgagaaggcagctcacgaaacccaggcctgtgatcctggacccggcggaccctacaggaaacttgggtggtggagacccaaagggttggaggcagctggcacaagaggctgaggcctggctgaattacccatgctttaagaattgggatgggtccccagtgagctcctggattctgctggtgagacctcctgcttcctccctgccattcatccctgcccctctccatgaagcttgagacatatagctggagaccattctttccaaagaacttacctcttgccaaaggccatttatattcatatagtgacaggctgtgctccatattttacagtcattttggtcacaatcgagggtttctggaattttcacatcccttgtccagaattcattcccctaagagtaataataaataatctctaacaccatttattgactgtctgcttcgggctcaggttctgtcctaagccctttaatatgcactctctcattaaatagtcacaacaatcccatgaggcatttttaaaaattttttattattttagattcagagggcacatgtgccatttgttacacagctatattgtgtaatggtggggtttgggcctctattgatcctgtcgcccaaatagtgaacagagtacccaaaaagaattttttcaacctttgcctttctcccttcctcctccctgttggagtccctagtgtctattgttcccatctttagcagatgttaagtatttgattttctgtttctgggttaattcacttcggataatggcctccagctgcaaccatgatttcattctttcttatggctgcataatactccatggtgtagatataccacactttctttatccagttcacactgatgggcacttaagttgattccatgactttgctattgtgaatcgtactgcgataaacatacgagtgccggtgtcttttgatagaatgatttctttacctttgggtagataccgagtagtgggattgctgggttgaatggacattctacttttagttatttgaaaagtcccatgaggcatgttttctatcattcccatcttacagatgagacaaaggctcagagaggtgaggtcacttgctcaaggacatcagctaacaagtggtggaaatggaattcaagctcagtggactctaaagccagtgctcatgtcactgtgctaaacagcctgccttgtcacatccccacctctcatctgaccaatgggagactctgagcagctgagtgacttgggttgtcacacagctaaacaggggcaaaggacccagtcttggatctttccacctccaagcaggaatctgtctgattccaggggattgatgatgttgcagatggctaggaagcagactccaggatggaatttagtatgcaggatgttctgggggagagccactggaaccagcactcagggaaaggggggaagaaaggataggaaggaagcatgaaagagaatagggagaagtgaacagggatgcagagcgaatgccagtttcagccaactccaaggacagccctggagctggaatggcctttagagctgccccatggtgacagaggtggccaggcttctatacccctacgtggatcactcactgtgcttgggcaccttgggaaagggcatggctttgagcaaaaggctctctgcagctgaggcaacccctaaaagggctgacggctgaagtctgtctgctgaccactgtcccagcagctggggcttgttagtccttcctcaaagggggatccagatggcatgtcacagtgtctaccgtaaatgctcactgaatccagctgcaatgcaggaagactccctgatgtgatcatgtgtctcaccctttcaagctgaaagcaacagtgcagacgatgagaccgacgatcccaggaggtatcagaaatatggttacattggaacacatgagtaccctcatttctctcatagacccagcacactccaggcagcatccaccccacaggcagaagaggactggacctgcaccatcctctgaatgccagtgcatcttgggggaaagggctccagtgttatctggaccagttccttcattttcaggtgggactcttgatccagagaggacaaagctcctcagtgagctggtgtataatccaggacagaacccaggtctcctgactcctggccttctatgccctctatcctatcatagataacattctccacagcctcacttcattccacctattctctgaaaatattccctgagagagaacagagagatttagataagagaatgaaattccagccttgactttcttctgtgcacctgatgggagggtaatgtctaatgtattatcaataacaataaaaataaagcaaataccaaaaaaaaagtg

SEQ ID NO: 332290 - DNA, 1596 bp, Homo sapiens
tccatgtgatgaagccgggttttccaggttcgaaactagcaggattcctcgccagcaagaacagatcagcagaagagataaaagcaaacaggtctgggaggcagttctgttgccactctctctcctgtcaatgatggatctcagaaataccccagccaaatctctggacaagttcattgaagactatctcttgccagacacgtgtttccgcatgcaaatcaaccatgccattgacatcatctgtgggttcctgaaggaaaggtgcttccgaggtagctcctaccctgtgtgtgtgtccaaggtggtaaagggtggctcctcaggcaagggcaccaccctcagaggccgatctgacgctgacctggttgtcttcctcagtcctctcaccacttttcaggatcagttaaatcgccggggagagttcatccaggaaattaggagacagctggaagcctgtcaaagagagagagcattttccgtgaagtttgaggtccaggctccacgctggggcaacccccgtgcgctcagcttcgtactgagttcgctccagctcggggagggggtggagttcgatgtgctgcctgcctttgatgccctgggtcagttgactggcggctataaacctaacccccaaatctatgtcaagctcatcgaggagtgcaccgacctgcagaaagagggcgagttctccacctgcttcacagaactacagagagacttcctgaagcagcgccccaccaagctcaagagcctcatccgcctagtcaagcactggtaccaaaattgtaagaagaagcttgggaagctgccacctcagtatgccctggagctcctgacggtctatgcttgggagcgagggagcatgaaaacacatttcaacacagcccagggatttcggacggtcttggaattagtcataaactaccagcaactctgcatctactggacaaagtattatgactttaaaaaccccattattgaaaagtacctgagaaggcagctcacgaaacccaggcctgtgatcctggacccggcggaccctacaggaaacttgggtggtggagacccaaagggttggaggcagctggcacaagaggctgaggcctggctgaattacccatgctttaagaattgggatgggtccccagtgagctcctggattctgctgacccagcacactccaggcagcatccaccccacaggcagaagaggactggacctgcaccatcctctgaatgccagtgcatcttgggggaaagggctccagtgttatctggaccagttccttcattttcaggtgggactcttgatccagagaggacaaagctcctcagtgagctggtgtataatccaggacagaacccaggtctcctgactcctggccttctatgccctctatcctatcatagataacattctccacagcctcacttcattccacctattctctgaaaatattccctgagagagaacagagagatttagataagagaatgaaattccagccttgactttcttctgtgcacctgatgggagggtaatgtctaatgtattatcaataacaataaaaataaagcaaataccaaaaaaaaagtg

SEQ ID NO: 332291 - DNA, 2158 bp, Homo sapiens
tccatgtgatgaagccgggttttccaggttcgaaactagcaggattcctcgccagcaagaacagatcagcagaagagataaaagcaaacaggtctgggaggcagttctgttgccactctctctcctgtcaatgatggatctcagaaataccccagccaaatctctggacaagttcattgaagactatctcttgccagacacgtgtttccgcatgcaaatcaaccatgccattgacatcatctgtgggttcctgaaggaaaggtgcttccgaggtagctcctaccctgtgtgtgtgtccaaggtggtaaagggtggctcctcaggcaagggcaccaccctcagaggccgatctgacgctgacctggttgtcttcctcagtcctctcaccacttttcaggatcagttaaatcgccggggagagttcatccaggaaattaggagacagctggaagcctgtcaaagagagagagcattttccgtgaagtttgaggtccaggctccacgctggggcaacccccgtgcgctcagcttcgtactgagttcgctccagctcggggagggggtggagttcgatgtgctgcctgcctttgatgccctgggtcagttgactggcggctataaacctaacccccaaatctatgtcaagctcatcgaggagtgcaccgacctgcagaaagagggcgagttctccacctgcttcacagaactacagagagacttcctgaagcagcgccccaccaagctcaagagcctcatccgcctagtcaagcactggtaccaaaattgtaagaagaagcttgggaagctgccacctcagtatgccctggagctcctgacggtctatgcttgggagcgagggagcatgaaaacacatttcaacacagcccagggatttcggacggtcttggaattagtcataaactaccagcaactctgcatctactggacaaagtattatgactttaaaaaccccattattgaaaagtacctgagaaggcagctcacgaaacccaggcctgtgatcctggacccggcggaccctacaggaaacttgggtggtggagacccaaagggttggaggcagctggcacaagaggctgaggcctggctgaattacccatgctttaagaattgggatgggtccccagtgagctcctggattctgctggtaaacctcacactggttggcagaaggaactataccaataattagtgaacatgcggtgaatttgcaacagacaagaggagcctcattatcctatagtttccaggttgcttagggaggcagaaatcacagcaaggaaaaccttcaataataaacagacgtctcataaaattaattgcaacccaacctctctctctacttaaaattagcatctatttccagctctgctttcaatgccccatatgaatacatgtgaactccctccctctcttcctccctgtctccttctctctctctctgtccctcattaaaaaataaaatttaagaaaaaaatacaaggtagatttacacaaatagtgggatctcagtcttgagttagctgtgtatgactgaaaaggatgctgtggttaataattatcataaaaacaatgacatggccgggcacagtggctcacgcctgtaatcccagaactttgggaggccgaggcaggcagatcacttgaggccaggagtttgagaccagcctggccaacatggtgaaactgcatctctactaaaatacaaaaattagccgggcatcaatggccagcccctgtaatcccagctaatcaggagtctgaggcaggcgaatcacttgaacctgggggctggtggttgcagtgagccgagctcacaccactgcactccagcctgggcgacagagtgagactacatctcaaaaaaacaaaaacaaacaagcaaaaaaaaccccacagtaacacaaaagtaataaaactgctgctatttactcagtgcttatctgatgccagccactttgctaagcctatgaatgcattatttccccgttgctacagatgagagaattgaggttcagacaggttgaaatcattgctcccaaagtcacacaactggtgagtggcagagctgggatgcaaaccctaaactgccagccctcaaagcctgtgctcttaatctccaccctgctgtgcttcc

SEQ ID NO: 332292 - DNA, 1229 bp, Homo sapiens
tccatgtgatgaagccgggttttccaggttcgaaactagcaggattcctcgccagcaagaacagatcagcagaagagataaaagcaaacaggtctgggaggcagttctgttgccactctctctcctgtcaatgatggatctcagaaataccccagccaaatctctggacaagttcattgaagactatctcttgccagacacgtgtttccgcatgcaaatcaaccatgccattgacatcatctgtgggttcctgaaggaaaggtgcttccgaggtagctcctaccctgtgtgtgtgtccaaggtggtaaagggtggctcctcaggcaagggcaccaccctcagaggccgatctgacgctgacctggttgtcttcctcagtcctctcaccacttttcaggatcagttaaatcgccggggagagttcatccaggaaattaggagacagctggaagcctgtcaaagagagagagcattttccgtgaagtttgaggtccaggctccacgctggggcaacccccgtgcgctcagcttcgtactgagttcgctccagctcggggagggggtggagttcgatgtgctgcctgcctttgatgccctgggtcagttgactggcggctataaacctaacccccaaatctatgtcaagctcatcgaggagtgcaccgacctgcagaaagagggcgagttctccacctgcttcacagaactacagagagacttcctgaagcagcgccccaccaagctcaagagcctcatccgcctagtcaagcactggtaccaaaattgtaagaagaagcttgggaagctgccacctcagtatgccctggagctcctgacggtctatgcttgggagcgagggagcatgaaaacacatttcaacacagcccagggatttcggacggtcttggaattagtcataaactaccagcaactctgcatctactggacaaagtattatgactttaaaaaccccattattgaaaagtacctgagaaggcagctcacgaaacccaggtatgctatccccacatggcttagctcccctatgtaaatgaacacctggatacaggtacagtgccttggaaatggaggaggtgggagggctccccacttagtgagaatctcctgttgcccatcattgtactgggcattttactactgccatctgttttaaacacctacctccaaccctgtgaggcaggcactatgccaattattttacaggtgag

SEQ ID NO: 332293 - DNA, 791 bp, Homo sapiens
tccatgtgatgaagccgggttttccaggttcgaaactagcaggattcctcgccagcaagaacagatcagcagaagagataaaagcaaacaggtctgggaggcagttctgttgccactctctctcctgtcaatgatggatctcagaaataccccagccaaatctctggacaagttcattgaagactatctcttgccagacacgtgtttccgcatgcaaatcaaccatgccattgacatcatctgtgggttcctgaaggaaaggtgcttccgaggtagctcctaccctgtgtgtgtgtccaaggtggtaaagggtggctcctcaggcaagggcaccaccctcagaggccgatctgacgctgacctggttgtcttcctcagtcctctcaccacttttcaggatcagttaaatcgccggggagagttcatccaggaaattaggagacagctggaagcctgtcaaagagagagagcattttccgtgaagtttgaggtccaggctccacgctggggcaacccccgtgcgctcagcttcgtactgagttcgctccagctcggggagggggtggagttcgatgtgctgcctgcctttgatgccctgggtgagagctcccagcttctttttctccctcttcccatttctgagcagaaatctcccacagtttgagagctttttgccccaacagggcatctctctaaagcagggtgggaggagatcttaggatctgtcccggggcaagaatgaatacggtcatgatctatcacaggagagacattaaacagcaaattggcat

SEQ ID NO: 332294 - DNA, 541 bp, Homo sapiens
tccatgtgatgaagccgggttttccaggttcgaaactagcaggattcctcgccagcaagaacagatcagcagaagagataaaagcaaacaggtctgggaggcagttctgttgccactctctctcctgtcaatgatggatctcagaaataccccagccaaatctctggacaagttcattgaagactatctcttgccagacacgtgtttccgcatgcaaatcaaccatgccattgacatcatctgtgggttcctgaaggaaaggtgcttccgaggtagctcctaccctgtgtgtgtgtccaaggtggtaaaggtgagtccaggcctgcctggccaggggaggggtggctgaatgtgcaagagttgagattgagaatgagagagagagagagagagaagcaaaaacctagaacccagggtgcaaatgtgagtacagagagctgagatcttctgggatggtggtttcttatttatccacacagcatgttaaaatagattctggggtgaaatcctacatccctattattaacaagtgaccctcccc

SEQ ID NO: 332295 - DNA, 217 bp, Homo sapiens
ctggcccaactccctcatgctactgtagtgaggctcaaatgagatagcacccatgaacactcctgtaaaccatgaagtatgcaaacaccaggtgtaatagaagctgttaggtacctgtgaggccagcagacaagagcaagagatgctaatttaaaaagaattaaggtgaagcaaagatcttttccctctgccaaataacttggcaagagttgtaaaa

SEQ ID NO: 332296 - DNA, 526 bp, Homo sapiens
tccaagtaaaacaggtagtttgagaggaaactcagaaggcacagggtctgctgctgtctgtcctacagtgaggcatttcagagagcagggctcgcttgtctcgtcaccactacaggcaaagtgggcggcagccaggtctgatggagtgatacgtggggatctcgcagtcagccacattagcgtgctcccatctgccacttactggatgtgctcaaagtggggcagcggtcatggagaggagccctcaccacagagggtggacaatgagctgtttaccaggaaaagggaagcctccaagggcacatcatggccatcctaaaatgccccaaaggcaggcaggtggcagtgtgattttcagagcctggaggaatacattctatacttaaacaaggagttgtctctaagaggtgcgattctgagtggctgaaattagctcttatattctaacacatatatagaatgtaacctgttacattctcacagatctaagagatggaaagcttcctacatttatgtaagcccagat

SEQ ID NO: 332297 - DNA, 747 bp, Homo sapiens
ggagactcctggagactacagagtctgagaatgagttgaataggtgaggaggtggggctggtggaagtgaaggaggcagggaggggagagagcatgacctttagacctaacagcaataccaaaggtatgcttttcccagtgtatatcatttttctcattagggaaatgcctattttgctgttcttgcttcagatgaaggtccagggtcatctaaactagaaatttctccgtccatgccatgaaggcaggaaaaactaataaaacataatattatatatgcattgtcccgagttgctcatttttggaagacttggctgctggtaatccccaggaagtagaaacaacatgactgcctatcacctgtccacataattaatcacaactaatcaatagaagccaagatatggtgatttatcacaaaccctccacatttgctggtagtattttttccattttttcctttttaatattcttaaccagacagtgaagttgaaagttggtagttggctgggagctatagtaaaaagaaacccttggcattgttcctttggttgttatcaagtactcttctacttgactgtgtttcttctataaggtgagcaaggagcagagaagttagcactgagaagcttggactgggaaaagctgtaccttatctttggctcaatttgtttaatcagggacagtccttggggcaaagtcttagaagttggctcaggtcagaattttggctgcacagagagggga

SEQ ID NO: 332298 - DNA, 305 bp, Homo sapiens
accaggattcctccctgagtcattccatcccacacggccactcagctctgaactctaatgactgggtgaccccagggcctgctgcctgtgagtgtctcggctccctatgtcccattagctggcagagagcagggtccatctgcctcagttactctccaggtcactcagtgtcccctgcctggtggtcagttccatatattgatgtagctagttcatcatgctttaaattttttttttctgctttaatttagggacttaggggaagaacacatgttgagaagattcttggttcagcagcagtccct

SEQ ID NO: 332299 - DNA, 504 bp, Homo sapiens
caggatgctgggtccttcactgcagggctgggcatagcactgggcacttattggagtttcacagcttttgttgattgaataatgtctttcttcaggatctaactcaggaccttggtcctcattatgtgcacccaaggtttccagtctcccttcccaacaagcattaaacacattcatttctgatcacctcagcattcattgttggggccctgtagtgtgttgcccttaacagttaattacatatctgcatatatgtgcatgtatctatgtatgtttcacttgcatgcaagtttttcaggaatacgaacatgactgtgggcctctagcaggcagggccatgtctcatttctcccagccatcttccctctcacatccagttctagttcttgctcactcccgggcaccaacagatacttgacaaataactgtttatttagttagagggtatgggaatgattccaagtctgtaagaaagaatactcagtccattcatgccacaacaat

SEQ ID NO: 332300 - DNA, 5630 bp, Homo sapiens
cgcaggcgccgtagaactgtggcgctttctgggtaaagatggacgtccacgatctctttcgccggctcggcgcgggggccaaattcgacacgagacgcttctcggcagacgcagctcgattccagataggaaaaaggaaatatgactttgattcttcggaggtgcttcagggactggacttttttggaaacaagaagtctgtcccaggtgtgtgtggagcatcacaaacacatcagaagccccaaaatggagagaaaaaagaagagagcctaactgaaaggaagagggagcagagcaagaaaaaaaggaagacgatgacttcagaaattgcttcccaagaagaaggtgctactatacagtggatgtcatctgtagaagcaaagattgaagacaaaaaagttcagagagaaagtaaactaacttccggaaagttggagaatctcagaaaagaaaagataaacttcttgcggaataaacacaaaattcacgtccaaggaaccgatcttcctgacccaattgctacatttcagcaacttgaccaggaatataaaatcaattctcgactacttcagaacattctagatgcaggtttccaaatgcctacgccaatccaaatgcaagccatcccagttatgctgcatggtcgggaacttctggcttctgctccaactggatctggaaaaacattagcttttagcattcctattttaatgcagctgaaacaacccgcaaataaaggcttcagagccctgattatatcaccaacacgagaacttgccagccagattcacagagagttaataaaaatttctgagggaacaggattcagaatacacatgatccacaaagcagcagtggcagccaagaaatttggacctaaatcatctaaaaagtttgatattcttgtgactactccaaatcgactaatctatttattaaagcaagatccccccggaatcgacctagcaagtgttgagtggcttgtagtagacgaatcagataaactgtttgaagatggcaaaactgggttcagagaccagctggcttccattttcctggcctgcacatcccacaaggtccgaagagctatgttcagtgcaacttttgcatatgatgttgaacagtggtgcaaactcaacctggacaatgtcatcagtgtgtccattggagcaaggaattctgcagtagaaactgtagaacaagagcttctctttgttggatctgagaccggaaaacttctggccgtgagagaacttgttaaaaagggtttcaatccacctgttcttgtttttgttcagtccattgaaagggctaaagaactttttcatgagctcatatatgaaggtattaatgtggatgttattcatgcagagagaacacaacaacagagagataacacagtccacagtttcagagcaggaaaaatctgggttctgatttgtacagccttgctagcaagagggattgattttaaaggtgtgaacttggtgatcaactatgactttccaactagctcagtggaatatatccacaggataggtcgaactggaagagcagggaataagggaaaagcaattacatttttcactgaggatgataagccattattaagaagcgttgctaatgttatacagcaggctgggtgtcctgtaccagaatacataaaaggttttcagaaactactaagcaaacaaaagaaaaagatgattaagaaaccattggaaagggagagcattagtacaactccaaaatgtttcttagaaaaagctaaggataaacagaaaaaggtcactggtcagaacagcaagaagaaagtagctcttgaagacaaaagttaaaaacagactttaaaaatactgtcccagaaatgtaattttatgatcccagcatgaatgttattttcatggaatacttgaagtcttacagtcacctgtaccaaacatttgaaatcaactacaagtacatgggactggtgataaatgatcctaaactatcaagtcagtttcaatttgtaggtgccttttttttttcctgtagagatgagggtcttgccatgttgtccaggctggtcttgaactcctgacctcacacaatcctcctgccttagcctcctgagtaactgagattacaggcacaagctgctgcacccagctctgtaggtgacttttaaatgattatacaatggaaataacattcattgacatttctgtggtttgaatccagagagatacttcttatagaaaaacaaatgtttatgctaaaaataacaccaaaatgtggtgaactcttaaggacttttcccttcaagtgtgaaggaaggtgtgatgaatgctgtggagaggcatctggaacagaaattcaaaataaagccttgacattaaataccccttccactgctcactttgtggatggtagcatgagctgtctaccaagaagaaacctgctgctctcttaattttaatatttcctaatttgttgatggccttttgtgttgtgaaccacaacaaagagaggcctcttttgtggctggttattccagttccctgggattttaaattctttggtctattaagtatccttgtattggatacgtaataccttagtgctgtcataatgttgtacaagatcatgatcagcttctccctttcttcattttctgtgatttaaccatgttctttcctgtctctttccatttaagatattttatttgaatactgataaacattttatcctgataaggaagaatgttcttgttacttgatatacctctgtcttcattctcttacagcttatctttccttaggttgatggtgcctcatttaataagtagatctctacttaagctaaaggattatgatcatatggtgttggagactattagctattagatttttctcaaaatatgagttttgtacaatggaatgaaaaagtgacttcatatacgtaagactggtgcctaagaatgacttgaatgttatcagtactaccacagaactataatatacattgccttttctcagcagcatttgaattcaacttatttatttcctctatttgtagctttttgttctagagtcagaacaggtggactttgctttgaatattttagatgggacaaaaattgttcatcttcggaatttatttaaagaaagatctactggtacagggtgtaaaaatacttacaagaatatgatttttttgtttgttcatgcaaacagatcctttacccaatatatattctggaggtaggtatactggtgcaacccatttgccagctgtgtgactttgagtaagttcttaatttctcagagtttcagtgttctcatctataaaattatgtctccaattgtgagtacctagcactgtacctgatacatagtaaactcacaataaatatttcttaaacatagattttgttaggaatacaggcttgataacacagtccttacccttacaatgtaatgttagagataaaggagcaaatagagtcacgcatcacttaatgacagagatatgttctgagaaatgcatcgttaggtgatattgtcattgtgtaaacatcatgttgtttacttccacaaacctagatggtatagcctaccagtacacctaggctatatggtatagtctgttgctcctaggctacaaacccgtatagcatgttactgtcctgcatgctatagacagttggaacatgtagacttgtataaacactgcacacttaacctatactaaatttattgaaaatatttttcttggccaggcgtagtggctcatgcctgtaatcctaacacttcgggaggcctaggcgggcaggctggtctcaaactcctgacctggagtgagccactatatccggcctttataaacttttttgattcttgtcataacacttagcctaaaatgcaaatgtacagctgtagaaaaatactttatttctttatatccttattctagaagctttttttctattaatttttgtttgtttgttttgttttactatttacttctaaaacttttttgttaaaaaccatggcacaaacacacacattatgctaggcatacaaaaggtcaggatcatcagtctcactgtcttccacccccacttctcatcccaccattgtatctgctgtctgtggctgaccaaaacatcatcatgtagcacatgactagtgtggcaagtgctctgttagatgtaaggccatgatgctaaagcatcacaagagggcatctaacccagattggggatgtcatggaaggccgacatcctgagttgaatcctgcaaatgtaaaaaccaataggcaaagaagaggaacaaaaaggattccaggacaaactgaggtcacatctatgatccttgactttattgtgtctgtttaaagtatctacagtaacctgtatcaacttagtcagtgtattaatactaaatttagctccttcaaagcagttggaactatgtgctacataaatttcagcttcacacaaggaagggaaggagtgaaattagtgaacaggcagttacagcaaaagaaaaaacataaaaattgaatagctggctctggtgaaatgagcaaggactttagagtcaaactggcctggatttgaatcctgatcctcattgcttgtagctgtatgatctggacaaatgacagtaactgtttctaaccttgattttctcatctgtaagatgccaattgtaactcctaaggatactgaggattttttaaaatgcgtgtacagttcctgaccagtggtttgtgcctaataacttattacaaattattacccagtaaaaaccttgagacaagagtgaaaacgtaaagctaattaatccattacttgttagcaagcaaactacgtgcttgagaaaattactcaactttcatgttttacttccagacagtagtttgattaaaagaaaaaaaaaaatcacagcccaggcatgtggctcacaccctggcacttggaggccgaggtgggagcatagcttgagcctagcagtttgaaactagcctgggcaacatagatcctatctctacaaaaaaaaaaaaaaaaaaaaaaaaattggcccggtgtggtggtgcatgcctgtggtcccagctactcaggaggctgaggcgagaggatcgcttgagccagggaggctgaggctgctgtgagccatgatcatgccactgcactccagcctggacaacagagcaagaccctgtctcaaaaaaaaaaaaaaatcagtaaaaaatatgccgaaatagcttcagagtaattatgaattgccttccaaaaaccactgttttgcacttgcctgcaagaataggaaaaacaaaaggactgtaaggtggcaggatggcagaaccaaacaagagtagtacaccttggagttttttcgaaatatgggttgggtttttgggctcttggttgatttaaaataaaatttaaatgccttcagcgtctgtgataggtgccaacatgaagctaccgagttccagagaaagaggggagagctgatcactcatcagtgctgcgagactatcaaagggcccttcaggacctatctgttctttgtgtgtaaagagtaacaataaaagaacaccagtgtacccaccgtatagtttaaaaaaaaaaactcagc

SEQ ID NO: 332301 - DNA, 5745 bp, Homo sapiens
cgcaggcgccgtagaactgtggcgctttctgggtaaagatggacgtccacgatctctttcgccggctcggcgcgggggccaaattcgacacgagacgcttctcggcagacgcagctcgattccagataggaaaaaggaaatatgactttgattcttcggaggtgcttcagggactggacttttttggaaacaagaagtctgtcccaggtgtgtgtggagcatcacaaacacatcagaagccccaaaatggagagaaaaaagaagagagcctaactgaaaggaagagggagcagagcaagaaaaaaaggaagacgatgacttcagagacagggtttcaccatgttggccagtatggtctcgatctcctgacctcgtgattcacccaccttgggctcccaaagtgctgggattacagatgtgagccaccacgcccagccagaaattgcttcccaagaagaaggtgctactatacagtggatgtcatctgtagaagcaaagattgaagacaaaaaagttcagagagaaagtaaactaacttccggaaagttggagaatctcagaaaagaaaagataaacttcttgcggaataaacacaaaattcacgtccaaggaaccgatcttcctgacccaattgctacatttcagcaacttgaccaggaatataaaatcaattctcgactacttcagaacattctagatgcaggtttccaaatgcctacgccaatccaaatgcaagccatcccagttatgctgcatggtcgggaacttctggcttctgctccaactggatctggaaaaacattagcttttagcattcctattttaatgcagctgaaacaacccgcaaataaaggcttcagagccctgattatatcaccaacacgagaacttgccagccagattcacagagagttaataaaaatttctgagggaacaggattcagaatacacatgatccacaaagcagcagtggcagccaagaaatttggacctaaatcatctaaaaagtttgatattcttgtgactactccaaatcgactaatctatttattaaagcaagatccccccggaatcgacctagcaagtgttgagtggcttgtagtagacgaatcagataaactgtttgaagatggcaaaactgggttcagagaccagctggcttccattttcctggcctgcacatcccacaaggtccgaagagctatgttcagtgcaacttttgcatatgatgttgaacagtggtgcaaactcaacctggacaatgtcatcagtgtgtccattggagcaaggaattctgcagtagaaactgtagaacaagagcttctctttgttggatctgagaccggaaaacttctggccgtgagagaacttgttaaaaagggtttcaatccacctgttcttgtttttgttcagtccattgaaagggctaaagaactttttcatgagctcatatatgaaggtattaatgtggatgttattcatgcagagagaacacaacaacagagagataacacagtccacagtttcagagcaggaaaaatctgggttctgatttgtacagccttgctagcaagagggattgattttaaaggtgtgaacttggtgatcaactatgactttccaactagctcagtggaatatatccacaggataggtcgaactggaagagcagggaataagggaaaagcaattacatttttcactgaggatgataagccattattaagaagcgttgctaatgttatacagcaggctgggtgtcctgtaccagaatacataaaaggttttcagaaactactaagcaaacaaaagaaaaagatgattaagaaaccattggaaagggagagcattagtacaactccaaaatgtttcttagaaaaagctaaggataaacagaaaaaggtcactggtcagaacagcaagaagaaagtagctcttgaagacaaaagttaaaaacagactttaaaaatactgtcccagaaatgtaattttatgatcccagcatgaatgttattttcatggaatacttgaagtcttacagtcacctgtaccaaacatttgaaatcaactacaagtacatgggactggtgataaatgatcctaaactatcaagtcagtttcaatttgtaggtgccttttttttttcctgtagagatgagggtcttgccatgttgtccaggctggtcttgaactcctgacctcacacaatcctcctgccttagcctcctgagtaactgagattacaggcacaagctgctgcacccagctctgtaggtgacttttaaatgattatacaatggaaataacattcattgacatttctgtggtttgaatccagagagatacttcttatagaaaaacaaatgtttatgctaaaaataacaccaaaatgtggtgaactcttaaggacttttcccttcaagtgtgaaggaaggtgtgatgaatgctgtggagaggcatctggaacagaaattcaaaataaagccttgacattaaataccccttccactgctcactttgtggatggtagcatgagctgtctaccaagaagaaacctgctgctctcttaattttaatatttcctaatttgttgatggccttttgtgttgtgaaccacaacaaagagaggcctcttttgtggctggttattccagttccctgggattttaaattctttggtctattaagtatccttgtattggatacgtaataccttagtgctgtcataatgttgtacaagatcatgatcagcttctccctttcttcattttctgtgatttaaccatgttctttcctgtctctttccatttaagatattttatttgaatactgataaacattttatcctgataaggaagaatgttcttgttacttgatatacctctgtcttcattctcttacagcttatctttccttaggttgatggtgcctcatttaataagtagatctctacttaagctaaaggattatgatcatatggtgttggagactattagctattagatttttctcaaaatatgagttttgtacaatggaatgaaaaagtgacttcatatacgtaagactggtgcctaagaatgacttgaatgttatcagtactaccacagaactataatatacattgccttttctcagcagcatttgaattcaacttatttatttcctctatttgtagctttttgttctagagtcagaacaggtggactttgctttgaatattttagatgggacaaaaattgttcatcttcggaatttatttaaagaaagatctactggtacagggtgtaaaaatacttacaagaatatgatttttttgtttgttcatgcaaacagatcctttacccaatatatattctggaggtaggtatactggtgcaacccatttgccagctgtgtgactttgagtaagttcttaatttctcagagtttcagtgttctcatctataaaattatgtctccaattgtgagtacctagcactgtacctgatacatagtaaactcacaataaatatttcttaaacatagattttgttaggaatacaggcttgataacacagtccttacccttacaatgtaatgttagagataaaggagcaaatagagtcacgcatcacttaatgacagagatatgttctgagaaatgcatcgttaggtgatattgtcattgtgtaaacatcatgttgtttacttccacaaacctagatggtatagcctaccagtacacctaggctatatggtatagtctgttgctcctaggctacaaacccgtatagcatgttactgtcctgcatgctatagacagttggaacatgtagacttgtataaacactgcacacttaacctatactaaatttattgaaaatatttttcttggccaggcgtagtggctcatgcctgtaatcctaacacttcgggaggcctaggcgggcaggctggtctcaaactcctgacctggagtgagccactatatccggcctttataaacttttttgattcttgtcataacacttagcctaaaatgcaaatgtacagctgtagaaaaatactttatttctttatatccttattctagaagctttttttctattaatttttgtttgtttgttttgttttactatttacttctaaaacttttttgttaaaaaccatggcacaaacacacacattatgctaggcatacaaaaggtcaggatcatcagtctcactgtcttccacccccacttctcatcccaccattgtatctgctgtctgtggctgaccaaaacatcatcatgtagcacatgactagtgtggcaagtgctctgttagatgtaaggccatgatgctaaagcatcacaagagggcatctaacccagattggggatgtcatggaaggccgacatcctgagttgaatcctgcaaatgtaaaaaccaataggcaaagaagaggaacaaaaaggattccaggacaaactgaggtcacatctatgatccttgactttattgtgtctgtttaaagtatctacagtaacctgtatcaacttagtcagtgtattaatactaaatttagctccttcaaagcagttggaactatgtgctacataaatttcagcttcacacaaggaagggaaggagtgaaattagtgaacaggcagttacagcaaaagaaaaaacataaaaattgaatagctggctctggtgaaatgagcaaggactttagagtcaaactggcctggatttgaatcctgatcctcattgcttgtagctgtatgatctggacaaatgacagtaactgtttctaaccttgattttctcatctgtaagatgccaattgtaactcctaaggatactgaggattttttaaaatgcgtgtacagttcctgaccagtggtttgtgcctaataacttattacaaattattacccagtaaaaaccttgagacaagagtgaaaacgtaaagctaattaatccattacttgttagcaagcaaactacgtgcttgagaaaattactcaactttcatgttttacttccagacagtagtttgattaaaagaaaaaaaaaaatcacagcccaggcatgtggctcacaccctggcacttggaggccgaggtgggagcatagcttgagcctagcagtttgaaactagcctgggcaacatagatcctatctctacaaaaaaaaaaaaaaaaaaaaaaaaattggcccggtgtggtggtgcatgcctgtggtcccagctactcaggaggctgaggcgagaggatcgcttgagccagggaggctgaggctgctgtgagccatgatcatgccactgcactccagcctggacaacagagcaagaccctgtctcaaaaaaaaaaaaaaatcagtaaaaaatatgccgaaatagcttcagagtaattatgaattgccttccaaaaaccactgttttgcacttgcctgcaagaataggaaaaacaaaaggactgtaaggtggcaggatggcagaaccaaacaagagtagtacaccttggagttttttcgaaatatgggttgggtttttgggctcttggttgatttaaaataaaatttaaatgccttcagcgtctgtgataggtgccaacatgaagctaccgagttccagagaaagaggggagagctgatcactcatcagtgctgcgagactatcaaagggcccttcaggacctatctgttctttgtgtgtaaagagtaacaataaaagaacaccagtgtacccaccgtatagtttaaaaaaaaaaactcagc

SEQ ID NO: 332302 - DNA, 2634 bp, Homo sapiens
cgcaggcgccgtagaactgtggcgctttctgggtaaagatggacgtccacgatctctttcgccggctcggcgcgggggccaaattcgacacgagacgcttctcggcagacgcagctcgattccagataggaaaaaggaaatatgactttgattcttcggaggtgcttcagggactggacttttttggaaacaagaagtctgtcccaggtgtgtgtggagcatcacaaacacatcagaagccccaaaatggagagaaaaaagaagagagcctaactgaaaggaagagggagcagagcaagaaaaaaaggaagacgatgacttcagaaattgcttcccaagaagaaggtgctactatacagtggatgtcatctgtagaagcaaagattgaagacaaaaaagttcagagagaaagtaaactaacttccggaaagttggagaatctcagaaaagaaaagataaacttcttgcggaataaacacaaaattcacgtccaaggaaccgatcttcctgacccaattgctacatttcagcaacttgaccaggaatataaaatcaattctcgactacttcagaacattctagatgcaggtttccaaatgcctacgccaatccaaatgcaagccatcccagttatgctgcatggtcgggaacttctggcttctgctccaactggatctggaaaaacattagcttttagcattcctattttaatgcagctgaaacaacccgcaaataaaggcttcagagccctgattatatcaccaacacgagaacttgccagccagattcacagagagttaataaaaatttctgagggaacaggattcagaatacacatgatccacaaagcagcagtggcagccaagaaatttggacctaaatcatctaaaaagtttgatattcttgtgactactccaaatcgactaatctatttattaaagcaagatccccccggaatcgacctagcaagtgttgagtggcttgtagtagacgaatcagataaactgtttgaagatggcaaaactgggttcagagaccagctggcttccattttcctggcctgcacatcccacaaggtccgaagagctatgttcagtgcaacttttgcatatgatgttgaacagtggtgcaaactcaacctggacaatgtcatcagtgtgtccattggagcaaggaattctgcagtagaaactgtagaacaagagcttctctttgttggatctgagaccggaaaacttctggccgtgagagaacttgttaaaaagggtttcaatccacctgttcttgtttttgttcagtccattgaaagggctaaagaactttttcatgagctcatatatgaaggtattaatgtggatgttattcatgcagagagaacacaacaacagagagataacacagtccacagtttcagagcaggaaaaatctgggttctgatttgtacagccttgctagcaagagggattgattttaaaggtgtgaacttggtgatcaactatgactttccaactagctcagtggaatatatccacaggataggtcgaactggaagagcagggaataagggaaaagcaattacatttttcactgaggatgataagccattattaagaagcgttgctaatgttatacagcaggctgggtgtcctgtaccagaatacataaaaggttttcagaaactactaagcaaacaaaagaaaaagatgattaagaaaccattggaaagggagagcattagtacaactccaaaatgtttcttagaaaaagctaaggataaacagaaaaaggtcactggtcagaacagcaagaagaaagtagctcttgaagacaaaagttaaaaacagactttaaaaatactgtcccagaaatgtaattttatgatcccagcatgaatgttattttcatggaatacttgaagtcttacagtcacctgtaccaaacatttgaaatcaactacaagtacatgggactggtgataaatgatcctaaactatcaagtcagtttcaatttgtaggtgccttttttttttcctgtagagatgagggtcttgccatgttgtccaggctggtcttgaactcctgacctcacacaatcctcctgccttagcctcctgagtaactgagattacaggcacaagctgctgcacccagctctgtaggtgacttttaaatgattatacaatggaaataacattcattgacatttctgtggtttgaatccagagagatacttcttatagaaaaacaaatgtttatgctaaaaataacaccaaaatgtggtgaactcttaaggacttttcccttcaagtgtgaaggaaggtgtgatgaatgctgtggagaggcatctggaacagaaattcaaaataaagccttgacattaaataccccttccactgctcactttgtggatggtagcatgagctgtctaccaagaagaaacctgctgctctcttaattttaatatttcctaatttgttgatggccttttgtgttgtgaaccacaacaaagagaggcctcttttgtggctggttattccagttccctgggattttaaattctttggtctattaagtatccttgtattggatacgtaataccttagtgctgtcgggctagtcggggggggatcctct

SEQ ID NO: 332303 - DNA, 5808 bp, Homo sapiens
cgcaggcgccgtagaactgtggcgctttctgggtaaagatggacgtccacgatctctttcgccggctcggcgcgggggccaaattcgacacgagacgcttctcggcagacgcagctcgattccagataggaaaaaggaaatatgactttgattcttcggaggtgcttcagggactggacttttttggaaacaagaagtctgtcccaggtgtgtgtggagcatcacaaacacatcagaagccccaaaatggagagaaaaaagaagagagcctaactgaaaggaagagggagcagagcaagaaaaaaaggaagacgatgacttcagaaattgcttcccaagaagaaggtgctactatacagtggatgtcatctgtagaagcaaagattgaagacaaaaaagttcagagagaaagtaaactaacttccggaaagttggagaatctcagaaaagaaaagataaacttcttgcggaataaacacaaaattcacgtccaaggaaccgatcttcctgacccaattgctacatttcagcaacttgaccaggaatataaaatcaattctcgactacttcagaacattctagatgcaggtttccaaatgcctacgccaatccaaatgcaagccatcccagttatgctgcatggtcgggaacttctggcttctgctccaactggatctggaaaaacattagcttttagcattcctattttaatgcagctgaaacaacccgcaaataaaggcttcagagccctgattatatcaccaacacgagaacttgccagccagattcacagagagttaataaaaatttctgagggaacaggattcagaatacacatgatccacaaagcagcagtggcagccaagaaatttggacctaaatcatctaaaaagtttgatattcttgtgactactccaaatcgactaatctatttattaaagcaagatccccccggaatcgacctagcaagtgttgagtggcttgtagtagacgaatcagataaactgtttgaagatggcaaaactgggttcagagaccagctggcttccattttcctggcctgcacatcccacaaggtccgaagagctatgttcagtgcaacttttgcatatgatgttgaacagtggtgcaaactcaacctggacaatgtcatcagtgtgtccattggagcaaggaattctgcagtagaaactgtagaacaagagcttctctttgttggatctgagaccggaaaacttctggccgtgagagaacttgttaaaaagggtttcaatccacctgttcttgtttttgttcagtccattgaaagggctaaagaactttttcatgagctcatatatgaaggtattaatgtggatgttattcatgcagagagaacacaacaacagagagataacacagtccacagtttcagagcaggaaaaatctgggttctgatttgtacagccttgctagcaagagggattgattttaaaggtgtgaacttggtgatcaactatgactttccaactagctcagtggaatatatccacaggataggtgagttgtcttttttttccttcccctctgtcacccactgatctgtcttaggacccctgctattccctgcacatatgctcacttcttagtgctgtgaaaatccagtgacttttataaatgaattttgagagcctccttccccccaaaatgtgttttttaatggtctaatttttcttaggtcgaactggaagagcagggaataagggaaaagcaattacatttttcactgaggatgataagccattattaagaagcgttgctaatgttatacagcaggctgggtgtcctgtaccagaatacataaaaggttttcagaaactactaagcaaacaaaagaaaaagatgattaagaaaccattggaaagggagagcattagtacaactccaaaatgtttcttagaaaaagctaaggataaacagaaaaaggtcactggtcagaacagcaagaagaaagtagctcttgaagacaaaagttaaaaacagactttaaaaatactgtcccagaaatgtaattttatgatcccagcatgaatgttattttcatggaatacttgaagtcttacagtcacctgtaccaaacatttgaaatcaactacaagtacatgggactggtgataaatgatcctaaactatcaagtcagtttcaatttgtaggtgccttttttttttcctgtagagatgagggtcttgccatgttgtccaggctggtcttgaactcctgacctcacacaatcctcctgccttagcctcctgagtaactgagattacaggcacaagctgctgcacccagctctgtaggtgacttttaaatgattatacaatggaaataacattcattgacatttctgtggtttgaatccagagagatacttcttatagaaaaacaaatgtttatgctaaaaataacaccaaaatgtggtgaactcttaaggacttttcccttcaagtgtgaaggaaggtgtgatgaatgctgtggagaggcatctggaacagaaattcaaaataaagccttgacattaaataccccttccactgctcactttgtggatggtagcatgagctgtctaccaagaagaaacctgctgctctcttaattttaatatttcctaatttgttgatggccttttgtgttgtgaaccacaacaaagagaggcctcttttgtggctggttattccagttccctgggattttaaattctttggtctattaagtatccttgtattggatacgtaataccttagtgctgtcataatgttgtacaagatcatgatcagcttctccctttcttcattttctgtgatttaaccatgttctttcctgtctctttccatttaagatattttatttgaatactgataaacattttatcctgataaggaagaatgttcttgttacttgatatacctctgtcttcattctcttacagcttatctttccttaggttgatggtgcctcatttaataagtagatctctacttaagctaaaggattatgatcatatggtgttggagactattagctattagatttttctcaaaatatgagttttgtacaatggaatgaaaaagtgacttcatatacgtaagactggtgcctaagaatgacttgaatgttatcagtactaccacagaactataatatacattgccttttctcagcagcatttgaattcaacttatttatttcctctatttgtagctttttgttctagagtcagaacaggtggactttgctttgaatattttagatgggacaaaaattgttcatcttcggaatttatttaaagaaagatctactggtacagggtgtaaaaatacttacaagaatatgatttttttgtttgttcatgcaaacagatcctttacccaatatatattctggaggtaggtatactggtgcaacccatttgccagctgtgtgactttgagtaagttcttaatttctcagagtttcagtgttctcatctataaaattatgtctccaattgtgagtacctagcactgtacctgatacatagtaaactcacaataaatatttcttaaacatagattttgttaggaatacaggcttgataacacagtccttacccttacaatgtaatgttagagataaaggagcaaatagagtcacgcatcacttaatgacagagatatgttctgagaaatgcatcgttaggtgatattgtcattgtgtaaacatcatgttgtttacttccacaaacctagatggtatagcctaccagtacacctaggctatatggtatagtctgttgctcctaggctacaaacccgtatagcatgttactgtcctgcatgctatagacagttggaacatgtagacttgtataaacactgcacacttaacctatactaaatttattgaaaatatttttcttggccaggcgtagtggctcatgcctgtaatcctaacacttcgggaggcctaggcgggcaggctggtctcaaactcctgacctggagtgagccactatatccggcctttataaacttttttgattcttgtcataacacttagcctaaaatgcaaatgtacagctgtagaaaaatactttatttctttatatccttattctagaagctttttttctattaatttttgtttgtttgttttgttttactatttacttctaaaacttttttgttaaaaaccatggcacaaacacacacattatgctaggcatacaaaaggtcaggatcatcagtctcactgtcttccacccccacttctcatcccaccattgtatctgctgtctgtggctgaccaaaacatcatcatgtagcacatgactagtgtggcaagtgctctgttagatgtaaggccatgatgctaaagcatcacaagagggcatctaacccagattggggatgtcatggaaggccgacatcctgagttgaatcctgcaaatgtaaaaaccaataggcaaagaagaggaacaaaaaggattccaggacaaactgaggtcacatctatgatccttgactttattgtgtctgtttaaagtatctacagtaacctgtatcaacttagtcagtgtattaatactaaatttagctccttcaaagcagttggaactatgtgctacataaatttcagcttcacacaaggaagggaaggagtgaaattagtgaacaggcagttacagcaaaagaaaaaacataaaaattgaatagctggctctggtgaaatgagcaaggactttagagtcaaactggcctggatttgaatcctgatcctcattgcttgtagctgtatgatctggacaaatgacagtaactgtttctaaccttgattttctcatctgtaagatgccaattgtaactcctaaggatactgaggattttttaaaatgcgtgtacagttcctgaccagtggtttgtgcctaataacttattacaaattattacccagtaaaaaccttgagacaagagtgaaaacgtaaagctaattaatccattacttgttagcaagcaaactacgtgcttgagaaaattactcaactttcatgttttacttccagacagtagtttgattaaaagaaaaaaaaaaatcacagcccaggcatgtggctcacaccctggcacttggaggccgaggtgggagcatagcttgagcctagcagtttgaaactagcctgggcaacatagatcctatctctacaaaaaaaaaaaaaaaaaaaaaaaaattggcccggtgtggtggtgcatgcctgtggtcccagctactcaggaggctgaggcgagaggatcgcttgagccagggaggctgaggctgctgtgagccatgatcatgccactgcactccagcctggacaacagagcaagaccctgtctcaaaaaaaaaaaaaaatcagtaaaaaatatgccgaaatagcttcagagtaattatgaattgccttccaaaaaccactgttttgcacttgcctgcaagaataggaaaaacaaaaggactgtaaggtggcaggatggcagaaccaaacaagagtagtacaccttggagttttttcgaaatatgggttgggtttttgggctcttggttgatttaaaataaaatttaaatgccttcagcgtctgtgataggtgccaacatgaagctaccgagttccagagaaagaggggagagctgatcactcatcagtgctgcgagactatcaaagggcccttcaggacctatctgttctttgtgtgtaaagagtaacaataaaagaacaccagtgtacccaccgtatagtttaaaaaaaaaaactcagc

SEQ ID NO: 332304 - DNA, 2827 bp, Homo sapiens
cgcaggcgccgtagaactgtggcgctttctgggtaaagatggacgtccacgatctctttcgccggctcggcgcgggggccaaattcgacacgagacgcttctcggcagacgcagctcgattccagataggaaaaaggaaatatgactttgattcttcggaggtgcttcagggactggacttttttggaaacaagaagtctgtcccaggtgtgtgtggagcatcacaaacacatcagaagccccaaaatggagagaaaaaagaagagagcctaactgaaaggaagagggagcagagcaagaaaaaaaggaagacgatgacttcagaaattgcttcccaagaagaaggtgctactatacagtggatgtcatctgtagaagcaaagattgaagacaaaaaagttcagagagaaagtaaactaacttccggaaagttggagaatctcagaaaagaaaagataaacttcttgcggaataaacacaaaattcacgtccaaggaaccgatcttcctgacccaattgctacatttcagcaacttgaccaggaatataaaatcaattctcgactacttcagaacattctagatgcaggtttccaaatgcctacgccaatccaaatgcaagccatcccagttatgctgcatggtcgggaacttctggcttctgctccaactggatctggaaaaacattagcttttagcattcctattttaatgcagctgaaacaacccgcaaataaaggcttcagagccctgattatatcaccaacacgagaacttgccagccagattcacagagagttaataaaaatttctgagggaacaggattcagaatacacatgatccacaaagcagcagtggcagccaagaaatttggacctaaatcatctaaaaagtttgatattcttgtgactactccaaatcgactaatctatttattaaagcaagatccccccggaatcgacctagcaagtgttgagtggcttgtagtagacgaatcagataaactgtttgaagatggcaaaactgggttcagagaccagctggcttccattttcctggcctgcacatcccacaaggtccgaagagctatgttcagtgcaacttttgcatatgatgttgaacagtggtgcaaactcaacctggacaatgtcatcagtgtgtccattggagcaaggaattctgcagtagaaactgtagaacaagagcttctctttgttggatctgagaccggaaaacttctggccgtgagagaacttgttaaaaagggtttcaatccacctgttcttgtttttgttcagtccattgaaagggctaaagaactttttcatgagctcatatatgaaggtattaatgtggatgttattcatgcagagagaacacaacaacagagagataacacagtccacagtttcagagcaggaaaaatctgggttctgatttgtacagccttgctagcaagagggattgattttaaaggtgtgaacttggtgatcaactatgactttccaactagctcagtggaatatatccacaggataggtcgaactggaagagcagggaataagggaaaagcaattacatttttcactgaggatgataagccattattaagaagcgttgctaatgttatacagcaggctgggtgtcctgtaccagaatacataaaaggttttcagaaactactaagcaaacaaaagaaaaagatgattaagaaaccattggaaagggagagcattagtacaactccaaaatgtttcttagaaaaagctaaggataaacagaaaaaggtcactggtcagaacagcaagaagaaagtagctcttgaagacaaaagttaaaaacagactttaaaaatactgtcccagaaatgtaattttatgatcccagcatgaatgttattttcatggaatacttgaagtcttacagtcacctgtaccaaacatttgaaatcaactacaagtacatgggactggtgataaatgatcctaaactatcaagtcagtttcaatttgtaggtgccttttttttttcctgtagagatgagggtcttgccatgttgtccaggctggtcttgaactcctgacctcacacaatcctcctgccttagcctcctgagtaactgagattacaggcacaagctgctgcacccagctctgtaggtgacttttaaatgattatacaatggaaataacattcattgacatttctgtggtttgaatccagagagatacttcttatagaaaaacaaatgtttatgctaaaaataacaccaaaatgtggtgaactcttaaggacttttcccttcaagtgtgaaggaaggtgtgatgaatgctgtggagaggcatctggaacagaaattcaaaataaagccttgacattccagcctggacaacagagcaagaccctgtctcaaaaaaaaaaaaaaatcagtaaaaaatatgccgaaatagcttcagagtaattatgaattgccttccaaaaaccactgttttgcacttgcctgcaagaataggaaaaacaaaaggactgtaaggtggcaggatggcagaaccaaacaagagtagtacaccttggagttttttcgaaatatgggttgggtttttgggctcttggttgatttaaaataaaatttaaatgccttcagcgtctgtgataggtgccaacatgaagctaccgagttccagagaaagaggggagagctgatcactcatcagtgctgcgagactatcaaagggcccttcaggacctatctgttctttgtgtgtaaagagtaacaataaaagaacaccagtgtacccaccgtatagtttaaaaaaaaaaactcagc

SEQ ID NO: 332305 - DNA, 456 bp, Homo sapiens
ctatgtgtcataccatgtagtaatgtagtttactgtgatggttctgcctcacttaggtgattgtgattttctaaagggcagagaccatgtctaatgcatctttgtgttcctagtgcctcattatttgatacacagtaggtttcagtaaatgtttattaaactggtggtagggttatggaaagtaaatatacgtagaattttttattcaatttttcttactttgctctttacaggaaaaaggtcactggtcagaacagcaagaagaaagtagctcttgaagacaaaagttaaaaacagactttaaaaatactgtcccagaaatgtaattttatgatcccagcatgaatgttattttcatggaatacttgaagtcttacagtcacctgtaccaaacatttgaaatcaactacaagtacatgggactggtgataaatgatcctaaactatcaagtcagt

SEQ ID NO: 332306 - DNA, 265 bp, Homo sapiens
gggttcaagtgattctcctgcctcagcctcccgagttgctgggactacaggcatgcgccaccacacccagctaatttttgtatttttagtgacagggtttcaccatgttggccaggctggtctcaaactcctgacctggagtgagccactatatccggcctttataaacttttttgattcttgtcataacacttagcctaaaatgcaaatgtacagctgtagaaaaatactttatttctttatatccttattctagaagcttttt

SEQ ID NO: 332307 - DNA, 2025 bp, Homo sapiens
  misc_feature (1)..(4): n is a, c, g, or t
  misc_feature (1569)..(1569): n is a, c, g, or t
nnnngttgtttggatgtgtatatgcgtgtgacatgtgtttcttctttctctaactgataggaaaaaggaaatatgactttgattcttcggaggtgcttcagggactggacttttttggaaacaagaagtctgtcccaggtgtgtgtggagcatcacaaacacatcagaagccccaaaatggagagaaaaaagaagagagcctaactgaaaggaagagggagcagagcaagaaaaaaaggaagacgatgacttcagaaattgcttcccaagaagaaggtgctactatacagtggatgtcatctgtagaagcaaagattgaagacaaaaaagttcagagagaaagtaaactaacttccggaaagttggagaatctcagaaaagaaaagataaacttcttgcggaataaacacaaaattcacgtccaaggaaccgatcttcctgacccaattgctacatttcagcaacttgaccaggaatataaaatcaattctcgactacttcagaacattctagatgcaggtttccaaatgcctacgccaatccaaatgcaagccatcccagttatgctgcatgtgagtatgaagatctagaatgcctgtaacattccttcctctgtgtgtttgctcattctcttccctctcttcttgaactctttctttccaccttatctcccctgttaaaatccttcacttccttttaaggttcatcaaatgcctgtgcctccataaaagttgtcttgatcactccatctagatgtgatcttcttccttttctagtaccctttcccccacactgcagttcttccatggtatttggtgtgttcttttccttgcaacatttattttacattttaaactactttgtattcgcaccaatcatatttatctttttcattttactagtgtgtaaccccttggagaatggggattatgttctattcattcatacattcattatttagtttataatgcccaggaactactccagaaatacaaatgctttctaaagttcttgtacataaactgacttatttttccgaatactttttattattaaagtatactttacatacaataaaatgcatagatttttaagtgcccagtttagtgagtttcagcaatgcatgccctgtgtaaccactattccagtgaagatagagaacatatgtattaccccagacaattttcttgtgccctttccattcagtcctcaccctgcccctgctcagaggcaactgctattctgatttctactgctgtatattccttttgcctcttctagagttttatatgagtggaatcacacattaatcttttatttctggtttctttcactttgcgtaatgctttgagattcttctgtattacatagagcaatagtttgttaccaagtagtattatgttgtatgaatataccacaatttgttatccagtcacttgttgatagaggtatggattaacttaggttttcggacgttaagtttttctgaggtttgtttctgtagcaataagagttgggttttttccccatgtaaccgagatggccttcagttctggtttccaaaggatntaagataccttttcatctctatactagtccttttcattttctttgagagatgaaatgagaatacattcatacatttaaatgatgctgttgacttatgttatagtaaatttgcttttaatttttgtttaagattgtttctgtcatggctttagcttaaagcttaaaaaatcacagtgggccaggtgcggtggctcacgcctctaatcccagcactttgggagaccgaggcgggcagataacgaggtcaggagttcaagaccagcctggccaatatggtgaaaccctgtctctactaaaaatacaaaaactagctgggcatggtggcgtgtgcctgtaatcccagctactcgggaggccaaggcagaagaaccacttgaacccgggaggcggaggttgcagtgagccgagatctcgccactgcactccagcctgggtgacagagtgagactctgtgtc

SEQ ID NO: 332308 - DNA, 4449 bp, Homo sapiens
cgcaggcgccgtagaactgtggcgctttctgggtaaagatggacgtccacgatctctttcgccggctcggcgcgggggccaaattcgacacgagacgcttctcggcagacgcagctcgattccagataggaaaaaggaaatatgactttgattcttcggaggtgcttcagggactggacttttttggaaacaagaagtctgtcccaggtgtgtgtggagcatcacaaacacatcagaagccccaaaatggagagaaaaaagaagagagcctaactgaaaggaagagggagcagagcaagaaaaaaaggaagacgatgacttcagaaattgcttcccaagaagaaggtgctactatacagtggatgtcatctgtagaagcaaagattgaagacaaaaaagttcagagagaaagtaaactaacttccggaaagttggagaatctcagaaaagaaaagataaacttcttgcggaataaacacaaaattcacgtccaaggaaccgatcttcctgacccaattgctacatttcagcaacttgaccaggaatataaaatcaattctcgactacttcagaacattctagatgcaggtttccaaatgcctacgccaatccaaatgcaagccatcccagttatgctgcatggtcgggaacttctggcttctgctccaactggatctggaaaaacattagcttttagcattcctattttaatgcagctgaaacaacccgcaaataaaggcttcagagccctgattatatcaccaacacgagaacttgccagccagattcacagagagttaataaaaatttctgagggaacaggattcagaatacacatgatccacaaagcagcagtggcagccaagaaatttggacctaaatcatctaaaaagtttgatattcttgtgactactccaaatcgactaatctatttattaaagcaagatccccccggaatcgacctagcaagtgttgagtggcttgtagtagacgaatcagataaactgtttgaagatggcaaaactgggttcagagaccagctggcttccattttcctggcctgcacatcccacaaggtccgaagagctatgttcagtgcaacttttgcatatgatgttgaacagtggtgcaaactcaacctggacaatgtcatcagtgtgtccattggagcaaggaattctgcagtagaaactgtagaacaagagcttctctttgttggatctgagaccggaaaacttctggccgtgagagaacttgttaaaaagggtttcaatccacctgttcttgtttttgttcagtccattgaaagggctaaagaactttttcatgagctcatatatgaaggtattaatgtggatgttattcatgcagagagaacacaacaacagagagataacacagtccacagtttcagagcaggaaaaatctgggttctgatttgtacagccttgctagcaagagggattgattttaaaggtgtgaacttggtgatcaactatgactttccaactagctcagtggaatatatccacaggataggtcgaactggaagagcagggaataagggaaaagcaattacatttttcactgaggatgataagccattattaagaagcgttgctaatgttatacagcaggctgggtgtcctgtaccagaatacataaaaggttttcagaaactactaagcaaacaaaagaaaaagatgattaagaaaccattggaaagggagagcattagtacaactccaaaatgtttcttagaaaaagctaaggataaacagaaaaaggtcactggtcagaacagcaagaagaaagtagctcttgaagacaaaagttaaaaacagactttaaaaatactgtcccagaaatgtaattttatgatcccagcatgaatgttattttcatggaatacttgaagtcttacagtcacctgtaccaaacatttgaaatcaactacaagtacatgggactggtgataaatgatcctaaactatcaagtcagtttcaatttgtaggtgccttttttttttcctgtagagatgagggtcttgccatgttgtccaggctggtcttgaactcctgacctcacacaatcctcctgccttagcctcctgagtaactgagattacaggcacaagctgctgcacccagctctgtaggtgacttttaaatgattatacaatggaaataacattcattgacatttctgtggtttgaatccagagagatacttcttatagaaaaacaaatgtttatgctaaaaataacaccaaaatgtggtgaactcttaaggacttttcccttcaagtgtgaaggaaggtgtgatgaatgctgtggagaggcatctggaacagaaattcaaaataaagccttgacattaaataccccttccactgctcactttgtggatggtagcatgagctgtctaccaagaagaaacctgctgctctcttaattttaatatttcctaatttgttgatggccttttgtgttgtgaaccacaacaaagagaggcctcttttgtggctggttattccagttccctgggattttaaattctttggtctattaagtatccttgtattggatacgtaataccttagtgctgtcataatgttgtacaagatcatgatcagcttctccctttcttcattttctgtgatttaaccatgttctttcctgtctctttccatttaagatattttatttgaatactgataaacattttatcctgataaggaagaatgttcttgttacttgatatacctctgtcttcattctcttacagcttatctttccttaggttgatggtgcctcatttaataagtagatctctacttaagctaaaggattatgatcatatggtgttggagactattagctattagatttttctcaaaatatgagttttgtacaatggaatgaaaaagtgacttcatatacgtaagactggtgcctaagaatgacttgaatgttatcagtactaccacagaactataatatacattgccttttctcagcagcatttgaattcaacttatttatttcctctatttgtagctttttgttctagagtcagaacaggtggactttgctttgaatattttagatgggacaaaaattgttcatcttcggaatttatttaaagaaagatctactggtacagggtgtaaaaatacttacaagaatatgatttttttgtttgttcatgcaaacagatcctttacccaatatatattctggaggtaggtatactggtgcaacccatttgccagctgtgtgactttgagtaagttcttaatttctcagagtttcagtgttctcatctataaaattatgtctccaattgtgagtacctagcactgtacctgatacatagtaaactcacaataaatatttcttaaacatagattttgttaggaatacaggcttgataacacagtccttacccttacaatgtaatgttagagataaaggagcaaatagagtcacgcatcacttaatgacagagatatgttctgagaaatgcatcgttaggtgatattgtcattgtgtaaacatcatgttgtttacttccacaaacctagatggtatagcctaccagtacacctaggctatatggtatagtctgttgctcctaggctacaaacccgtatagcatgttactgtcctgcatgctatagacagttggaacatgtagacttgtataaacactgcacacttaacctatactaaatttattgaaaatatttttcttggccaggcgtagtggctcatgcctgtaatcctaacacttcgggaggcctaggcgggcaggttgtctgagctcaggagtttagagaccagcccgggcaacatggcaaaaccccatctctactaaaaaaaataccaaaaaaagttagccgggtgtggtggcatagtcccggctactcaggagtctgaggcaggagaatagcttgaacctgtgaggcggaggttgcagtaagccgagatcgcgctatccagcctggacaacagagcaagaccctgtctcaaaaaaaaaaaaaaatcagtaaaaaatatgccgaaatagcttcagagtaattatgaattgccttccaaaaaccactgttttgcacttgcctgcaagaataggaaaaacaaaaggactgtaaggtggcaggatggcagaaccaaacaagagtagtacaccttggagttttttcgaaatatgggttgggtttttgggctcttggttgatttaaaataaaatttaaatgccttcagcgtctgtgataggtgccaacatgaagctaccgagttccagagaaagaggggagagctgatcactcatcagtgctgcgagactatcaaagggcccttcaggacctatctgttctttgtgtgtaaagagtaacaataaaagaacaccagtgtacccaccgtatagtttaaaaaaaaaaactcagc

SEQ ID NO: 332309 - DNA, 3824 bp, Homo sapiens
cgcaggcgccgtagaactgtggcgctttctgggtaaagatggacgtccacgatctctttcgccggctcggcgcgggggccaaattcgacacgagacgcttctcggcagacgcagctcgattccagataggaaaaaggaaatatgactttgattcttcggaggtgcttcagggactggacttttttggaaacaagaagtctgtcccaggtgtgtgtggagcatcacaaacacatcagaagccccaaaatggagagaaaaaagaagagagcctaactgaaaggaagagggagcagagcaagaaaaaaaggaagacgatgacttcagaaattgcttcccaagaagaaggtgctactatacagtggatgtcatctgtagaagcaaagattgaagacaaaaaagttcagagagaaagtaaactaacttccggaaagttggagaatctcagaaaagaaaagataaacttcttgcggaataaacacaaaattcacgtccaaggaaccgatcttcctgacccaattgctacatttcagcaacttgaccaggaatataaaatcaattctcgactacttcagaacattctagatgcaggtttccaaatgcctacgccaatccaaatgcaagccatcccagttatgctgcatggtcgggaacttctggcttctgctccaactggatctggaaaaacattagcttttagcattcctattttaatgcagctgaaacaacccgcaaataaaggcttcagagccctgattatatcaccaacacgagaacttgccagccagattcacagagagttaataaaaatttctgagggaacaggattcagaatacacatgatccacaaagcagcagtggcagccaagaaatttggacctaaatcatctaaaaagtttgatattcttgtgactactccaaatcgactaatctatttattaaagcaagatccccccggaatcgacctagcaagtgttgagtggcttgtagtagacgaatcagataaactgtttgaagatggcaaaactgggttcagagaccagctggcttccattttcctggcctgcacatcccacaaggtccgaagagctatgttcagtgcaacttttgcatatgatgttgaacagtggtgcaaactcaacctggacaatgtcatcagtgtgtccattggagcaaggaattctgcagtagaaactgtagaacaagagcttctctttgttggatctgagaccggaaaacttctggccgtgagagaacttgttaaaaagggtttcaatccacctgttcttgtttttgttcagtccattgaaagggctaaagaactttttcatgagctcatatatgaaggtattaatgtggatgttattcatgcagagagaacacaacaacagagagataacacagtccacagtttcagagcaggaaaaatctgggttctgatttgtacagccttgctagcaagagggattgattttaaaggtgtgaacttggtgatcaactatgactttccaactagctcagtggaatatatccacaggataggtcgaactggaagagcagggaataagggaaaagcaattacatttttcactgaggatgataagccattattaagaagcgttgctaatgttatacagcaggctgggtgtcctgtaccagaatacataaaaggttttcagaaactactaagcaaacaaaagaaaaagatgattaagaaaccattggaaagggagagcattagtacaactccaaaatgtttcttagaaaaagctaaggataaacagaaaaaggtcactggtcagaacagcaagaagaaagtagctcttgaagacaaaagttaaaaacagactttaaaaatactgtcccagaaatgtaattttatgatcccagcatgaatgttattttcatggaatacttgaagtcttacagtcacctgtaccaaacatttgaaatcaactacaagtacatgggactggtgataaatgatcctaaactatcaagtcagtttcaatttgtaggtgccttttttttttcctgtagagatgagggtcttgccatgttgtccaggctggtcttgaactcctgacctcacacaatcctcctgccttagcctcctgagtaactgagattacaggcacaagctgctgcacccagctctgtaggtgacttttaaatgattatacaatggaaataacattcattgacatttctgtggtttgaatccagagagatacttcttatagaaaaacaaatgtttatgctaaaaataacaccaaaatgtggtgaactcttaaggacttttcccttcaagtgtgaaggaaggtgtgatgaatgctgtggagaggcatctggaacagaaattcaaaataaagccttgacattaaataccccttccactgctcactttgtggatggtagcatgagctgtctaccaagaagaaacctgctgctctcttaattttaatatttcctaatttgttgatggccttttgtgttgtgaaccacaacaaagagaggcctcttttgtggctggttattccagttccctgggattttaaattctttggtctattaagtatccttgtattggatacgtaataccttagtgctgtcataatgttgtacaagatcatgatcagcttctccctttcttcattttctgtgatttaaccatgttctttcctgtctctttccatttaagatattttatttgaatactgataaacattttatcctgataaggaagaatgttcttgttacttgatatacctctgtcttcattctcttacagcttatctttccttaggttgatggtgcctcatttaataagtagatctctacttaagctaaaggattatgatcatatggtgttggagactattagctattagatttttctcaaaatatgagttttgtacaatggaatgaaaaagtgacttcatatacgtaagactggtgcctaagaatgacttgaatgttatcagtactaccacagaactataatatacattgccttttctcagcagcatttgaattcaacttatttatttcctctatttgtagctttttgttctagagtcagaacaggtggactttgctttgaatattttagatgggacaaaaattgttcatcttcggaatttatttaaagaaagatctactggtacagggtgtaaaaatacttacaagaatatgatttttttgtttgttcatgcaaacagatcctttacccaatatatattctggaggtaggtatactggtgcaacccatttgccagctgtgtgactttgagtaagttcttaatttctcagagtttcagtgttctcatctataaaattatgtctccaattgtgagtacctagcactgtacctgatacatagtaaactcacaataaatatttcttaaacatagattttgttaggaatacaggcttgataacacagtccttacccttacaatgtaatgttagagataaaggagcaaatagagtcacgcatcacttaatgacagagatatgttctgagaaatgcatcgttaggtgatattgtcattgtgtaaacatcatgttgtttacttccacaaacctagatggtatagcctaccagtacacctaggctatatggtatagtctgttgctcctaggctacaaacccgtatagcatgttactgtcctgcatgctatagacagttggaacatgtagacttgtataaacactgcacacttaacctatactaaatttattgaaaatatttttcttggccaggcgccaccacacccagctaatttttgtatttttagcaacatggcaaaaccccatctctact

SEQ ID NO: 332310 - DNA, 1562 bp, Homo sapiens
cgcaggcgccgtagaactgtggcgctttctgggtaaagatggacgtccacgatctctttcgccggctcggcgcgggggccaaattcgacacgagacgcttctcggcagacgcagctcgattccagataggaaaaaggaaatatgactttgattcttcggaggtgcttcagggactggacttttttggaaacaagaagtctgtcccaggtgtgtgtggagcatcacaaacacatcagaagccccaaaatggagagaaaaaagaagagagcctaactgaaaggaagagggagcagagcaagaaaaaaaggaagacgatgacttcagaaattgcttcccaagaagaaggtgctactatacagtggatgtcatctgtagaagcaaagattgaagacaaaaaagttcagagagaaagtaaactaacttccggaaagttggagaatctcagaaaagaaaagataaacttcttgcggaataaacacaaaattcacgtccaaggaaccgatcttcctgacccaattgctacatttcagcaacttgaccaggaatataaaatcaattctcgactacttcagaacattctagatgcaggtttccaaatgcctacgccaatccaaatgcaagccatcccagttatgctgcatggtcgggaacttctggcttctgctccaactggatctggaaaaacattagcttttagcattcctattttaatgcagctgaaacaacccgcaaataaaggcttcagagccctgattatatcaccaacacgagaacttgccagccagattcacagagagttaataaaaatttctgagggaacaggattcagaatacacatgatccacaaagcagcagtggcagccaagaaatttggacctaaatcatctaaaaagtttgatattcttgtgactactccaaatcgactaatctatttattaaagcaagatccccccggaatcgacctagcaagtgttgagtggcttgtagtagacgaatcagataaactgtttgaagatggcaaaactgggttcagagaccagctggcttccattttcctggcctgcacatcccacaaggtccgaagagctatgttcagtgcaacttttgcatatgatgttgaacagtggtgcaaactcaacctggacaatgtcatcagtgtgtccattggagcaaggaattctgcagtagaaactgtagaacaagagcttctctttgttggatctgagaccggaaaacttctggccgtgagagaacttgttaaaaaggtatatttgtattaccttcttgaattttggtaaagtttgccaagtcttatattactagtgggaggctattacagtggtagcactgtatcatcatcatcttggctcgtattcagtaatccattggtaaattgataagaaagtacattgtgctaactatatgatcatcctgcatcgtatttagtaatctaggagtaaatggttaagaagcgtgttgtcccagctcttatcccaagggacagaagcttgcctctcagaatatggtaagttgtcttttcgcagctcagattaggctaggaa

SEQ ID NO: 332311 - DNA, 204 bp, Homo sapiens
gtgtgtacgagctaagattattaaatgtagggagagtaaaaggcaagtgaaaagaaaaaaaggaaaggaagttttcccatagaggtaagaatggaaataagttttgaatgattacagataggcaaggttaggagaatagaagtatcactctaggcagagggagagaacgtatgcatggagacatgaatgagtcggtcatatctg

SEQ ID NO: 332312 - DNA, 391 bp, Homo sapiens
cactggggccacacctacagctgggacaagtttgccaaccacacagtgagaggggcaaactgaatgattcgtattccttaggggagaggagcacgaccttagagattgcagtcagagacatggtggggcaggacacacagctgcaccaccaggccaggtgaggatgacaagttcacataaattgcagtctctgaaatgggtggcagggatgtatacacaagaataagaagtcacaaacgtcagagtggaagcaaagtagagagcatatggatgagattttcaaaaggatgaaatagaaaggattttgctggcagggtctaccgcagtcttctcaggcagagcgaggctctggctcatgctttcctatttaagattttttaaactggcacag

SEQ ID NO: 332313 - DNA, 520 bp, Homo sapiens
tgtgtggaggatagatatggttgagggcagaggtagtggtgcaaggcatggacccagagggatggaggccacttagaaggccattatagtcacacaagtgagataatgagaatttgaactaaggcagtgaggatggagaagaggggccatattcaataaatatgtagagtgtgatattggcaagaggtagtgcttgattgatctaaagtaagaaagccagaggagttgaggacaatacccacattttaatcctttctgacggctgggcacagtggctcatgcctgtaatcccagcactttgggaggccaagacaggtggatcacctgaggtcaggagttcgagatgagcctggctgacatggcaaaaccccatctctactaaaaatacaaaaattagcctgacatggtgacatgcgcctgtaattccagctacttgggaggctgaagctggaggatcacttgtacctgggaggcagaggttgcagtaagccaagattgcaccattgcaccccagcctggg

SEQ ID NO: 332314 - DNA, 588 bp, Homo sapiens
tgttcattccccaggctggttctttcataaacgctgtctgcaggaatgaaaggcatcgcctatggaaagggctaagaggaagaggacactcccatgtgcggtgggagtaatggcccctccgtcttcctagcagttcactgaagcctgaagcagtgagaggctgctggatcccactgtgcttttgttaaagccctgtccccacatgctgttcttggcttgttatagtggcacgcagttcacttccagagactccccagccccaaacacgtatagcgccaggtgaatggaagtttcctccagtgcaactcctggatgggtctgagaagggaagcaagaaccaggatgtgactcaatggtgaacttacgactcggccctgggggtgcagcgtgcacatagataccatggagctaggtgctgacattgtaaaaagtggacccctgtccggaagactttcattttctttcggcagttcttaactctcttccttggtcacatttgaggagttgccctgttggtaagctcaaggtgccactcagccagagagtcctcctgggcatgtgaactgtgcggtgacctgggaccccaca

SEQ ID NO: 332315 - DNA, 305 bp, Homo sapiens
ggaagtggggaagatgagggagggataggcgagaagggaagggcttctggaaggtgagagaaggaggagcagcaagcagcaggcagagaagagagggcaagtccaaacaaagaagaacacaaacaatagaagggctggctatcaagaagatcttttctttgggggccaatgccatattccagcatgggcaggaaaccacaacaagcctttctgagcctcactctgagtgtctaggcttgtgggaggtgtagaagcatgacacgcagcctttgtcccacaggggcttgcaactgggctgaagggct

SEQ ID NO: 332316 - DNA, 270 bp, Homo sapiens
tctcagttagttggacagagtggttcaccaatgcgtgtcctgtgcctagtacagagtcaggcattaaataaaggtttgctgagtgaatgaatattaagaatttacttcccatatcatggtgaagctcaggtctactggtattgcatgcaagtcattctttggaacatgaaaataattctttgggatactggcacagaatgcaactgcacctactacttgatagcacaacagggtgactatagtcaataataatttaattttttttttttt

SEQ ID NO: 332317 - DNA, 377 bp, Homo sapiens
cttttaaacagacctgggaaaaacagaatcaagaaatttcaaccaataaaacacaactctttactggtatgaaagtaaagtaaaattcagtaatgaaaggaaggaagtctcttaaacatttactgcattccaaagcttggaattgtggtttattgctgaggtctcttctgatgtcccacagtgctcctgctccagcatctttaatgaagtcccataaactcccataaaatcctcgatcgttgacaaatcatacacacacgcttagggcaaggctcactggatcacgatgctctcttcctgaatgaatgaaatttacaagtcacagcatggacagtgtcgccaagtggcccaagacagaacagggatggacaaacaac

SEQ ID NO: 332318 - DNA, 231 bp, Homo sapiens
aaaattcctttcatttactcagtaataaacaaatccaaggcaatgtaaatgatgttttcaactatctccttttatctataatctgccttcaatagtgatgatgtggtgtattccagctctgtgggtattaagatggttttgtgttcattatttttgcttgtgatgagcaatatgatggaaacctagagagaaaattgacccccaaataaaaacctctttcaatatggtagt

SEQ ID NO: 332319 - DNA, 390 bp, Homo sapiens
caaggtgggcagatcacttgaggtcaggagtttgagaccagcctggccaacacagtgagaccccgtctctactaaaaatacaaaattagctgggcatggtggcgggtgcctgtaatcccaggttgctcttttttatttcgataagcaaaggtaaagggaattccccagatgatattagagggaaagatggatagttttgtgagatgatcagtcagatcagacataacaaatcatcatcccacaaacttaaaggctggaaacaacaatcttcacttatgacacctcacaggttcataggaacaccagatagggaagagtagggatgaccttctctgcttcaccacgtctgggagctgacctggaagatccaaaggctctactgaccctggc

SEQ ID NO: 332320 - DNA, 294 bp, Homo sapiens
ttaaaattttttaagcatttttcaatttggtatttgatttactcacatcgcccatggcttggaggatagaatttaaagtcagacaaatctgggtttgaatcagacttgacactagctgtgggaaattgggcaaatcacttcatctttctgaacctcagttttctccttggtaaaatgtaagtcatgatgcttgtctcaaaaagttgccctgaaggttaaataaggttatgtaatcatgttagatgttaatgcatactatatacttgtttaatttacttgcagcatttctatgaa

SEQ ID NO: 332321 - DNA, 470 bp, Homo sapiens
ccagaatgagtgctcacaaagtatttgctgaatgacctaataaaagctcgatgaaatggaaagacttgcccaaagtctcagaaatagctatggctgcaccaaagctaaaaagagggtcttctgccttctaccgggtgacctttgtatccctctacactgtgtcctcctcttcccctcctcacactcactcccctgcctccctctggaaccatcagcctctgtccacttgtggactctggtcccacacaaaccccgcctcccagtcagtagaaagagtgtcaaaagcaacacgtttaccttacgtcttatccctcacctgtaataccacctccttaatatcaccctactgagaactaggcaggccagaaattctgcagactgaggcccacgaaagataatctagagaattaacaggaaacaaacaaacaaaaaatgtggatctgaatcttcagagtcaggcccagagctcc

SEQ ID NO: 332322 - DNA, 424 bp, Homo sapiens
tctttgctctgtttaacaaaaatatagtagatgtctatgtatacagcactgtgcaagggctaagaggaataaacagaagtaaactgcataaatcctgccctcgagactcaagagcagataaacacatgaagttaaataatacaaaaaactactaaagagttggtatcacacaacataaagtcaagagggacaaaagatatcctaaaaatgagtgcccatgagaacaaagcatgagcttgggcttgaaagacagtgggaatgatgaatacagagggctcaagaaggcctgcagtgggaatatatgagccaagggcttctctcttgctcatttctgtcccttaactcatgaccctacaactttccacatatgctttggttctaagctttacaatcagatccaaggggacactgccccctccttggc

SEQ ID NO: 332323 - DNA, 344 bp, Homo sapiens
gtgccgaggtcctgaatggcatcactgatcagaatggagaaacatcatctctctagacacagagtgtggcagaaagagacaacttcccctgttgggtatagaattgttactggaacgtggctcctagccagtaacaacaggttcccagccttccctgcatccggcgtggccatgtgactattctcaccaatgaagggtgagcattattgatgtgtctctcccacaccaaagcagccaagaagaaggtgtgcctcctccaccctctcccctcttccgctggctaagcagagaagactgtgaggccccagaggtataaaagaggctccaggatatagaagaaaaac

SEQ ID NO: 332324 - DNA, 542 bp, Homo sapiens
aacaatgtgtttacttttgtttttccatttcttagcattttagaataaacaggctagaaatagaactttttgctttctttcccttcagagaagggccccaaataaaaatacccgacttttaccagctagaatgcaactattgctcatgttatgtgaagaacgtgtggctccaagaagacaacattgataaaacaggaacctaaattaactttcatcacctgaggcctcaatgttaattctgagatgagattaataattgtgatatggctccatgcatgcactgaggtaccatgagaggcagtgtcacctcagttacctgaaccatagacagaaacctcaagttacccaaagcataaagggacagggcggtgttacggagattaagaaaggaggagatgattggccagcagtggtggctcacgcctctaatcccagcattttgggtggctgagacgggcagatcacagggtcaggagatcgagaccatcctggctaacacagtgaaaccctgtctctactaaaaatacaaaaaaaaaaaaaaa

SEQ ID NO: 332325 - DNA, 525 bp, Homo sapiens
tctcaacaacaacaaaaaggaacgacagtaacagagccaggcatagtggtgcatgcacatggtcccagctactcagaaggcttgtgcccaggagtttgaggttgcagaaagcagcctgggtgacagagcgagaccttgttctaaaaaaacacaaacaaaaacaaaacaacccaccaataacaataacaagggaaaataccgttaaaaaacaggtttcaaaatgttattatttcatttgggtaagaaaaaaacatgtgtgcctgcttacataagtataaaacatatcacagggccaggcacggtggctcacgcctgtaattcgagcactttgagaggccaagtcgggtggatcacctgaggtcaggagatcgcttgaacctgggaggcagaggttgcagtgagccaagatcacaccattgcactccagcctgggtgacgagagcgaaactctgtttccaaaaaaaataaaaaataaaaagccaaaataaagtaaatcaccacctcccagatgagaccgcatatcgg

SEQ ID NO: 332326 - DNA, 140 bp, Homo sapiens
aatgtgctggtgccttcaccctgaactacccagcagacccctaggccacagacaaaggacacagcttcccccttggctccacccatctcttctgctcttctgttacacacatccatgtgactagcctcaatcagcccaga

SEQ ID NO: 332327 - DNA, 723 bp, Homo sapiens
taatcccaggattttgggaggccaagacaggaggatacctggagcccaaaagtttgagaccagcctgggcagcatatggagactctcctctataaaaaaaattaataatagccaggcatggtggtgtgcagctgtggtcccagctacttgggagattgagggggagtcaaaattgtgccactacactttagcttaggtgacacagtgagaccccgtctcaaaaaaagagctgttcgtttcaggcatgttaattatattcacactgtcatgcaaaaggcttctagaaactttacatcttgtaaaactaaaactcaatgcccattaagtaacaactgctcattttacactctttccagcccttgacagacaaaccttctactttctgattttatgattttgactacttaagatatctcatataagtggaatcatacagtatccataattttgttactggattaattcaggtggcataatattttcaatgttcatcttaaaatgtgacaagattattctttttaaagtggaataatattccattgtatgtgtatgttatattttttgatgtgtttataaatcaagatatatatggtggtttagccttttggcttttgtgaatactggtacaaaatacatgtattttcaattatgtcttccaggtcctgtgttgcatattttgtttttttgttgttgttttctttctttctttctttctttttcttt

SEQ ID NO: 332328 - DNA, 463 bp, Homo sapiens
agaggtgacatgcccttgcatcacttaatataaatgggtacatgatatccacctgacttatcactagtgatattaaccatgatcacttggttaatatcacttgtttaaggtggtgtctgtcaactttctccaccgtaaagttactatttttttccctactctaatctttagaaatgaatcattaagtccagtccacactgaaggggatgctttatttattccttatttgaaaaaattttttttaacttacagaaaagttacaaaaatcctacaatgaattcccatatacacttcatctagattcaccactgataacattttccatatgtggtttatcaagatctctcctgctccctctacaaatatacatattattgctattcatatgactatttgaactgaaacatttgagagtaaattgaagacatcataaccttttgtcccatatacttcatcatgtata

SEQ ID NO: 332329 - DNA, 498 bp, Homo sapiens
caagtattataccatatgcttcccatatagttgtgtcttttcatccttataaccacactacaaagcagttacaagtatcccactgtagagtaaagaaaacaaagctcagagcagttagggatgttgtctgaactcaccaagttggaatgaaaagtatgggccttgaaatgtcagcccaggtctgcctgaccctgaagcccaagttctttctgctctgcccagtgacccagaaagggccagatagtggactctggactgaacacaaggccaacactcctagatgccagctgtccaactggatttattcaacaaatagctatgaagttcctgctctgggccacacaacttgcctgaagagctagaaacagaacagagtcctctggaggtttttgagcagatgaaagagagaatcaaaggagaaattttagaaaattaatccagtgcctgtcaacctaaaataatcaaaaggctcaggatctggttaaaaagagttttttc

SEQ ID NO: 332330 - DNA, 308 bp, Homo sapiens
  misc_feature (288)..(288): n is a, c, g, or t
  misc_feature (291)..(291): n is a, c, g, or t
  misc_feature (294)..(294): n is a, c, g, or t
gaatcagaagctacattttaataaaatctccaggtgattcataggaatattaaagtttgagaagcactgtcatagagtagatgttaggagtgagtataatagatgggacattgcctggactttgaattacttccaaaacttgaagtggtggtagtctctcagcttccacaggccactcctatcccccacagggaagtggtggaatacatggtccagcatttcaagcctcagatctttggtgatcgcaagccaaatcggggagagatgggaaatgcagaaagaaccaanaancanaagagggggggggg

SEQ ID NO: 332331 - DNA, 513 bp, Homo sapiens
agttcgacggagactctcaaatctgtcccctggcataggaggaagataatgagggagtggaataaggctacaacaacgaatatagggaggaagggacagatttgagagacgaggtagaattaataggactcgatggctggtgggaggagaagacaggagtagaggttagctcccaggtttctccttgaccataggagtgtgttgggacattctgccagtcaagatgggggtgacggggagactgtagaaggaaggtggggagtttttgaagaaacagaatgttgtatagactgagttttgaggtgtttgtggggcagtaagggtaaggtgtccagtaaacacaggttggtgctcaggtaagactgtaaaactgcatttatagatacaggagtcttatagatggtagttaaagccataggcatgaatgagatagcttagaaaaagagaagagaaactagtatacagccccctaagaaactcaatttaaaggttcgggagagtctcagcagatct

SEQ ID NO: 332332 - DNA, 257 bp, Homo sapiens
  misc_feature (39)..(39): n is a, c, g, or t
  misc_feature (59)..(59): n is a, c, g, or t
tttttagaaatagaagccactgttgtctttataaaacanagaattgtgctgctgctgcngctgctgctgtgtacttgtttgcatttgtttccctttgagatttgtgtttgtgtcctgctttgagctgtaccttgtccagtccattgtgaaattatcccagcagctgtaatgtacagttccttctgaagcaagcaacatcagcagcagcagcagcagcagcacaattctgtgttttataaagacaacagtggcttcta

SEQ ID NO: 332333 - DNA, 372 bp, Homo sapiens
cccggccaggactgctgtcgtaataagccctgagtacacttgcaggttgcttataagaagagtgctttatgacattggtagttttgcatctgcctgttcatgggtgaattatctacccagccatattcttaacagtgatcctgttcccctattatcagccatcttctctgcccagcctgggacccctcaccttcctatcttcccagggcaccagccgaccatcccattactatgttctttgggatgacaaccgtttcacagcagatgagctccagatcctgacgtaccagtaaccaggaggcgatctcaaagcagaacttcgcctatcactcacagaagatcaagatccagaacatctccggtcacacgaag

SEQ ID NO: 332334 - DNA, 7329 bp, Homo sapiens
  misc_feature (656)..(656): n is a, c, g, or t
tgaggcaagcgcctcaggagtgcgtgaggcccacgcagaactcggggagccttttatcctgaggacacaggggaagaattggaggactatattcagctgcgggcgcttacctgccccccctgcagcaggtgttccaggcacctcgccggcctggcattggcactgtggggaaaccaatcaagctcctggccaattactttgaggtggacatccctaagatcgacgtgtaccactacgaggtggacatcaagccggataagtgtccccgtagagtcaaccgggaagtggtggaatacatggtccagcatttcaagcctcagatctttggtgatcgcaagcctgtgtatgatggaaagaagaacatttacactgtcacagcactgcccattggcaacgaacgggtcgactttgaggtgacaatccctggggaagggaaggatcgaatctttaaggtctccatcaagtggctagccattgtgagctggcgaatgctgcatgaggccctggtcagcggccagatccctgttcccttggagtctgtgcaagccctggatgtggccatgaggcacctggcatccatgaggtacacccctgtgggccgctccttcttctcaccgcctgagggctactaccacccgctggggggtgggcgcgangtctggttcggctttcaccagtctgtgcgccctgccatgtggaagatgatgctcaacattgatgtctcagccactgccttttataaggcacagccagtgattgagttcatgtgtgaggtgctggacatcaggaacatagatgagcagcccaagcccctcacggactctcagcgcgttcgcttcaccaaggagatcaagggcctgaaggtggaagtcacccactgtggacagatgaagaggaagtaccgcgtgtgtaatgttacccgtcgccctgctagccatcagacattccccttacagctggagagtggacagactgtggagtgcacagtggcacagtatttcaagcagaaatataaccttcagctcaagtatccccatctgccctgcctacaagttggccaggaacaaaagcatacctaccttcccctagaggtctgtaacattgtggctgggcagcgctgtattaaaaagctgaccgacaaccagacctcgaccatgataaaggccacagctagatccgctccagacagacaggaggagatcagtcgcctgatgaagaatgccagctacaacttagatccctacatccaggaatttgggatcaaagtgaaggatgacatgacggaggtgacagggcgagtgctgccggcgcccatcttgcagtacggcggccggaaccgggccattgccacacccaatcagggtgtctgggacatgcgggggaaacagttctacaatgggattgagatcaaagtctgggccatcgcctgcttcgcaccccaaaaacagtgtcgagaagaggtgctcaagaacttcacagaccagctgcggaagatttccaaggatgcggggatgcctatccagggtcaaccttgtttctgcaaatatgcacagggggcagacagcgtggagcctatgttccggcatctcaagaacacctactcagggctgcagctcattattgtcatcctgccagggaagacgccggtgtatgctgaggtgaaacgtgtcggagatacactcttgggaatggctacgcagtgtgtgcaggtgaagaacgtggtcaagacctcacctcagactctgtccaacctctgcctcaagatcaatgtcaaacttggtggcattaacaacatcctagtcccacaccagcgctctgccgtttttcaacagccagtgatattcctgggagcagatgttacacaccccccagcaggggatgggaaaaaaccttctatcacagcagtggtaggcagtatggatgcccaccccagccgatactgtgctactgtgcgggtacagcgaccacggcaagagatcattgaagacttgtcctacatggtgcgtgagctcctcatccaattctacaagtccacccgtttcaagcctacccgcatcatcttctaccgagatggggtgcctgaaggccagctaccccagatactccactatgagctactggccattcgtgatgcctgcatcaaactggaaaaggactaccagcctgggatcacttatattgtggtgcagaaacgccatcacacccgccttttctgtgctgacaagaatgagcgaattgggaagagtggtaacatcccagctgggaccacagtggacaccaacatcacccacccatttgagtttgacttctatctgtgcagccacgcaggcatccagggcaccagccgaccatcccattactatgttctttgggatgacaaccgtttcacagcagatgagctccagatcctgacgtaccagctgtgccacacttacgtacgatgcacacgctctgtctctatcccagcacctgcctactatgcccgcctggtggctttccgggcacgataccacctggtggacaaggagcatgacagtggagaggggagccacatatcggggcagagcaatgggcgggacccccaggccctggccaaagccgtgcaggttcaccaggatactctgcgcaccatgtacttcgcttgaaggcagaacgctgttacctcactggatagaagaaagctttccaagccccaggagctgtgccacccaaatccagaggaagcaaggaggagggaggtggggtagggaggagtgtaggatgccttgtttccttctatagaggtggtgtaagagtggggaacagggccagcaagacagaccaccagccagaaatctctgatatcaacctcatgtcccccacccctcaccccatcttgtcacatctggccctgaccccactggaccaaaaggggcagcactggtgcccaccatacacacaggtgtctcatgtgactcacagtgctaaagactcatgcttgacagcttggtaaggtcaactctgtagccctgcagacaaaagctggttaggtttgggtttgatactttagatgggaaagtgaggggcttgagaaagtgggtgggaggagggaaggattttttaggagccttaatcagaaaaggactagatttgtttaagaagaaaaatgaaaccagacccagatcaatattttaggatactagatgttttaatgggttcagaatccagtttgtaggaagattttttaatggttttggttgctcctcccccagctgccaccccccaccttacccttattcctctctgtccacattttctgccccaccttacttctcctccctgacagacatccagcccctagtaatacttaaggcactatggcacttagctttgaagtgacacgaccctgtcttccttccgcccgctggtgggtaaccagtgccttccctgtaacggtaatgctgcagaactgcaaccttttgtacctttctttggggaatggggtgggggtgggagaggaggtagatggggaagaaataccccagacccaacaaacctccagccagaaagccagctattttgcatttgaaggaattgacttcctcattcattgagctttttaaaagatcacaacctcaagatggttaaaatccattgacatttgcactttcaaacatgacaagtctcggagctgctgagatgacaggcccctggcctttccacttatgcctccttttctccttattcctcctacctcccgccccgcccaggtctggagttactttcatagcatttttcactcttggcttcttttctcccttgatggtcaagtctcttatgtttcaatatttcttaactggggtgtcttataacaaaaaactcttaggtctaaaatgagaaaaaagagagaaaacaaaatgttatttttataccataacttgagtgtattgccaaaatttggaaatccttcccatgcctgatgagtttatatcccagaaacattgagccatcagaatgaactgtgtacctgatttgttctctgacctggctaggtagggagggggtggttatcgccccaagatggggtccaggctccatccttcctctgtgcagataatacctttttcttgctatagcctccctcctctgcactgtcctgcactctttcttgcaagtgcatctttttccttcccctggactgtcctctgaccctttggctcatcctagattgcagtgtgtcctgtggacaggctggggaattttgctgctccctattgcttctgtttacaaaaatgaatttttcctggtttcccactagggcatgtgggtgggtggcatggacttttttttttttttttttttgtcttgagacatggggtttggctgtcttgcaggactggagaaggtggtggttctagcttggtctctgttggccttgaagcaagcatcccccctgccctttttccttgactgttcatttttttcctgccccactgcttgggatggggagttgcaacttcagtgtggaatttcctctttgaggagcctgggcttggatctatcctgatctggtgatgaagccatgattactttagacctagcccaggcttggaggccagctggaggaagaagggtctaaatcctggcctgtagagttagaactaccatttcctccccttagctgcccttgtatgacccggatttgctatgcaaaacaatctatcccaggttctgttctggttggctacattgttcagcaactcacaaaacgtagcacaaacattcattatggagaaagcatcaggactgttgagtaactcctcctttacttttttcctgctggctacagcatggggtgccctataggcacaagcccagctgaagaacagaatggagggctctgggaggaggcagctcactggagagcctacattccttacacaagtgcctaaagagagtgatgctaacactccatctgccctgtccattgccttcatatacagtctacttcgtgttctgtcaccctttggggaggggagttctcctgggacagtgggctctgcatgttctccacttggatacattttggggctaggatcagggcactattcctggagggtccagtcattcaccagcatttgcaaatgtccatagggagcaggtggcagcctctactcccagcaacaagtttgtgttctctccttttctctctttgcctcactctctccagttggttttcagctggggcttgaaatgcatttttagccctttgacgtggcttatgccattcaagaaataaaaagcaagagaatcagctttgggcaatgacaagaaatgagttcttactctgatttttttgtaaaaagataatttttgagacttgaaaaataccccgaccttgagattattcctgtttgaaaggtggtgcatgcagatggagaagtggtgttggcagcaagctttggctcatgtggatttggtttaagtggtgcttcttacccaagcttcaaggaagtgcttgggggacccccagcctcatcctcttagttgggtctcttgttccctttgtaccactgttttgccttccttttcctcttctctctttgcctggcttcctttcccttttcttctattcactctgcttgcttgctggccggcctgcctgcctgcctgcctgcctgcctgcctgtctgcctatgtgatgatgaaatctctgcatggctgcaatgatcccactgttagctggcagggtcaggcttagctccttgactgcagaagaccaagaacctgttccccaagcccagagatgtccacctgggctggactgccctcaagcttatactagagaagagcaactgacctgcccaacttgtgtgaagtcaggagggtttctggcattttccacacctgtccactccttggagctggtttctctcattgctttttctaaatctggttctttttctctttacctggggcctggcttttctgagattgtcttagggttgagctatttgggtatcctgggtttgagtgttaggggatggacataaaggaaaaagagtgatgagaagagaatggagagaatttgaataaaaggtgggaaaggagagcactgttctttgattgtttatccagtccaacctgatccattagggatcgaggtgctacactggcctccagggataagcctggggctactgttgctgggaacttaggcttaacataaagccgaagaaggtacctagaaatttgaaacttccctaaaaagctcctaatgcccacctgctagatagcttctctgtggcctcctatttagctaagcagcagtgtttttggatactttttttttctgtttgtgaataaggccagcactcaagatgggcagccaagggtgcactgactattagctggcccataggatatctgtaaggctggtgggacagttttggacctggaatcatgtgtaactaacaaggttggacgtttcttccccatcagggtagaaaaatcatctcaaactagccaaaaggcagttttggaaactacattgggggacgttatttttatttatatatggggcctaggccaatccaggatggtagctggaataccttccttcttaaaatctgatcatggcagggatatgcagggcactttttactatttggccttctaagcagattgggaaggaggtattttctggttttcgctttcctccgacttaataggacttgccttctccctgggcagggagagaggctgggttggtgctctcccttactctactcatactgacttagagcctctggctgctgtttgggcatccaagaaagggaggggaaggaatgagctaaaaacaaaacagaatgaggtgggaaagggagattttcttctttacagaggaaaataggaaaccctccaagaattgtgcaagtaaagacatttgttgaatgcactgagtcccttggtgtagtagcaataaggaaaaatgaaattactttcctgtgcacacagtccagcctaattggtatgtgatgttgcacttagcagccatgtggtgggcatgtgtgactactctggttttcactttagtttctaaactttttatccctctcaagtccagcatggatggggaaatgtctctggatccccacagctgtgtacttgtttgcatttgtttccctttgagatttgtgtttgtgtcctgctttgagctgtaccttgtccagtccattgtgaaattatcccagcagctgtaatgtacagttccttctgaagcaagcaacatcagcagcagcagcagcagcagcacaattctgtgttttataaagacaacagtggcttcta

SEQ ID NO: 332335 - DNA, 7276 bp, Homo sapiens
  misc_feature (656)..(656): n is a, c, g, or t
tgaggcaagcgcctcaggagtgcgtgaggcccacgcagaactcggggagccttttatcctgaggacacaggggaagaattggaggactatattcagctgcgggcgcttacctgccccccctgcagcaggtgttccaggcacctcgccggcctggcattggcactgtggggaaaccaatcaagctcctggccaattactttgaggtggacatccctaagatcgacgtgtaccactacgaggtggacatcaagccggataagtgtccccgtagagtcaaccgggaagtggtggaatacatggtccagcatttcaagcctcagatctttggtgatcgcaagcctgtgtatgatggaaagaagaacatttacactgtcacagcactgcccattggcaacgaacgggtcgactttgaggtgacaatccctggggaagggaaggatcgaatctttaaggtctccatcaagtggctagccattgtgagctggcgaatgctgcatgaggccctggtcagcggccagatccctgttcccttggagtctgtgcaagccctggatgtggccatgaggcacctggcatccatgaggtacacccctgtgggccgctccttcttctcaccgcctgagggctactaccacccgctggggggtgggcgcgangtctggttcggctttcaccagtctgtgcgccctgccatgtggaagatgatgctcaacattgatgtctcagccactgccttttataaggcacagccagtgattgagttcatgtgtgaggtgctggacatcaggaacatagatgagcagcccaagcccctcacggactctcagcgcgttcgcttcaccaaggagatcaagggcctgaaggtggaagtcacccactgtggacagatgaagaggaagtaccgcgtgtgtaatgttacccgtcgccctgctagccatcagacattccccttacagctggagagtggacagactgtggagtgcacagtggcacagtatttcaagcagaaatataaccttcagctcaagtatccccatctgccctgcctacaagttggccaggaacaaaagcatacctaccttcccctagaggtctgtaacattgtggctgggcagcgctgtattaaaaagctgaccgacaaccagacctcgaccatgataaaggccacagctagatccgctccagacagacaggaggagatcagtcgcctgatgaagaatgccagctacaacttagatccctacatccaggaatttgggatcaaagtgaaggatgacatgacggaggtgacagggcgagtgctgccggcgcccatcttgcagtacggcggccggaaccgggccattgccacacccaatcagggtgtctgggacatgcgggggaaacagttctacaatgggattgagatcaaagtctgggccatcgcctgcttcgcaccccaaaaacagtgtcgagaagaggtgctcaagaacttcacagaccagctgcggaagatttccaaggatgcggggatgcctatccagggtcaaccttgtttctgcaaatatgcacagggggcagacagcgtggagcctatgttccggcatctcaagaacacctactcagggctgcagctcattattgtcatcctgccagggaagacgccggtgtatgctgaggtgaaacgtgtcggagatacactcttgggaatggctacgcagtgtgtgcaggtgaagaacgtggtcaagacctcacctcagactctgtccaacctctgcctcaagatcaatgtcaaacttggtggcattaacaacatcctagtcccacaccagcgctctgccgtttttcaacagccagtgatattcctgggagcagatgttacacaccccccagcaggggatgggaaaaaaccttctatcacagcagtggtaggcagtatggatgcccaccccagccgatactgtgctactgtgcgggtacagcgaccacggcaagagatcattgaagacttgtcctacatggtgcgtgagctcctcatccaattctacaagtccacccgtttcaagcctacccgcatcatcttctaccgagatggggtgcctgaaggccagctaccccagatactccactatgagctactggccattcgtgatgcctgcatcaaactggaaaaggactaccagcctgggatcacttatattgtggtgcagaaacgccatcacacccgccttttctgtgctgacaagaatgagcgaattgggaagagtggtaacatcccagctgggaccacagtggacaccaacatcacccacccatttgagtttgacttctatctgtgcagccacgcaggcatccagggcaccagccgaccatcccattactatgttctttgggatgacaaccgtttcacagcagatgagctccagatcctgacgtaccagctgtgccacacttacgtacgatgcacacgctctgtctctatcccagcacctgcctactatgcccgcctggtggctttccgggcacgataccacctggtggacaaggagcatgacagtggagaggggagccacatatcggggcagagcaatgggcgggacccccaggccctggccaaagccgtgcaggttcaccaggatactctgcgcaccatgtacttcgcttgaaggcagaacgctgttacctcactggatagaagaaagctttccaagccccaggagctgtgccacccaaatccagaggaagcaaggaggagggaggtggggtagggaggagtgtaggatgccttgtttccttctatagaggtggtgtaagagtggggaacagggccagcaagacagaccaccagccagaaatctctgatatcaacctcatgtcccccacccctcaccccatcttgtcacatctggccctgaccccactggaccaaaaggggcagcactggtgcccaccatacacacaggtgtctcatgtgactcacagtgctaaagactcatgcttgacagcttggtaaggtcaactctgtagccctgcagacaaaagctggttaggtttgggtttgatactttagatgggaaagtgaggggcttgagaaagtgggtgggaggagggaaggattttttaggagccttaatcagaaaaggactagatttgtttaagaagaaaaatgaaaccagacccagatcaatattttaggatactagatgttttaatgggttcagaatccagtttgtaggaagattttttaatggttttggttgctcctcccccagctgccaccccccaccttacccttattcctctctgtccacattttctgccccaccttacttctcctccctgacagacatccagcccctagtaatacttaaggcactatggcacttagctttgaagtgacacgaccctgtcttccttccgcccgctggtgggtaaccagtgccttccctgtaacggtaatgctgcagaactgcaaccttttgtacctttctttggggaatggggtgggggtgggagaggaggtagatggggaagaaataccccagacccaacaaacctccagccagaaagccagctattttgcatttgaaggaattgacttcctcattcattgagctttttaaaagatcacaacctcaagatggttaaaatccattgacatttgcactttcaaacatgacaagtctcggagctgctgagatgacaggcccctggcctttccacttatgcctccttttctccttattcctcctacctcccgccccgcccaggtctggagttactttcatagcatttttcactcttggcttcttttctcccttgatggtcaagtctcttatgtttcaatatttcttaactggggtgtcttataacaaaaaactcttaggtctaaaatgagaaaaaagagagaaaacaaaatgttatttttataccataacttgagtgtattgccaaaatttggaaatccttcccatgcctgatgagtttatatcccagaaacattgagccatcagaatgaactgtgtacctgatttgttctctgacctggctaggtagggagggggtggttatcgccccaagatggggtccaggctccatccttcctctgtgcagataatacctttttcttgctatagcctccctcctctgcactgtcctgcactctttcttgcaagtgcatctttttccttcccctggactgtcctctgaccctttggctcatcctagattgcagtgtgtcctgtggacaggctggggaattttgctgctccctattgcttctgtttacaaaaatgaatttttcctggtttcccactagggcatgtgggtgggtggcatggacttttttttttttttttttttgtcttgagacatggggtttggctgtcttgcaggactggagaaggtggtggttctagcttggtctctgttggccttgaagcaagcatcccccctgccctttttccttgactgttcatttttttcctgccccactgcttgggatggggagttgcaacttcagtgtggaatttcctctttgaggagcctgggcttggatctatcctgatctggtgatgaagccatgattactttagacctagcccaggcttggaggccagctggaggaagaagggtctaaatcctggcctgtagagttagaactaccatttcctccccttagctgcccttgtatgacccggatttgctatgcaaaacaatctatcccaggttctgttctggttggctacattgttcagcaactcactcctcctttacttttttcctgctggctacagcatggggtgccctataggcacaagcccagctgaagaacagaatggagggctctgggaggaggcagctcactggagagcctacattccttacacaagtgcctaaagagagtgatgctaacactccatctgccctgtccattgccttcatatacagtctacttcgtgttctgtcaccctttggggaggggagttctcctgggacagtgggctctgcatgttctccacttggatacattttggggctaggatcagggcactattcctggagggtccagtcattcaccagcatttgcaaatgtccatagggagcaggtggcagcctctactcccagcaacaagtttgtgttctctccttttctctctttgcctcactctctccagttggttttcagctggggcttgaaatgcatttttagccctttgacgtggcttatgccattcaagaaataaaaagcaagagaatcagctttgggcaatgacaagaaatgagttcttactctgatttttttgtaaaaagataatttttgagacttgaaaaataccccgaccttgagattattcctgtttgaaaggtggtgcatgcagatggagaagtggtgttggcagcaagctttggctcatgtggatttggtttaagtggtgcttcttacccaagcttcaaggaagtgcttgggggacccccagcctcatcctcttagttgggtctcttgttccctttgtaccactgttttgccttccttttcctcttctctctttgcctggcttcctttcccttttcttctattcactctgcttgcttgctggccggcctgcctgcctgcctgcctgcctgcctgcctgtctgcctatgtgatgatgaaatctctgcatggctgcaatgatcccactgttagctggcagggtcaggcttagctccttgactgcagaagaccaagaacctgttccccaagcccagagatgtccacctgggctggactgccctcaagcttatactagagaagagcaactgacctgcccaacttgtgtgaagtcaggagggtttctggcattttccacacctgtccactccttggagctggtttctctcattgctttttctaaatctggttctttttctctttacctggggcctggcttttctgagattgtcttagggttgagctatttgggtatcctgggtttgagtgttaggggatggacataaaggaaaaagagtgatgagaagagaatggagagaatttgaataaaaggtgggaaaggagagcactgttctttgattgtttatccagtccaacctgatccattagggatcgaggtgctacactggcctccagggataagcctggggctactgttgctgggaacttaggcttaacataaagccgaagaaggtacctagaaatttgaaacttccctaaaaagctcctaatgcccacctgctagatagcttctctgtggcctcctatttagctaagcagcagtgtttttggatactttttttttctgtttgtgaataaggccagcactcaagatgggcagccaagggtgcactgactattagctggcccataggatatctgtaaggctggtgggacagttttggacctggaatcatgtgtaactaacaaggttggacgtttcttccccatcagggtagaaaaatcatctcaaactagccaaaaggcagttttggaaactacattgggggacgttatttttatttatatatggggcctaggccaatccaggatggtagctggaataccttccttcttaaaatctgatcatggcagggatatgcagggcactttttactatttggccttctaagcagattgggaaggaggtattttctggttttcgctttcctccgacttaataggacttgccttctccctgggcagggagagaggctgggttggtgctctcccttactctactcatactgacttagagcctctggctgctgtttgggcatccaagaaagggaggggaaggaatgagctaaaaacaaaacagaatgaggtgggaaagggagattttcttctttacagaggaaaataggaaaccctccaagaattgtgcaagtaaagacatttgttgaatgcactgagtcccttggtgtagtagcaataaggaaaaatgaaattactttcctgtgcacacagtccagcctaattggtatgtgatgttgcacttagcagccatgtggtgggcatgtgtgactactctggttttcactttagtttctaaactttttatccctctcaagtccagcatggatggggaaatgtctctggatccccacagctgtgtacttgtttgcatttgtttccctttgagatttgtgtttgtgtcctgctttgagctgtaccttgtccagtccattgtgaaattatcccagcagctgtaatgtacagttccttctgaagcaagcaacatcagcagcagcagcagcagcagcacaattctgtgttttataaagacaacagtggcttcta

SEQ ID NO: 332336 - DNA, 8090 bp, Homo sapiens
  misc_feature (656)..(656): n is a, c, g, or t
tgaggcaagcgcctcaggagtgcgtgaggcccacgcagaactcggggagccttttatcctgaggacacaggggaagaattggaggactatattcagctgcgggcgcttacctgccccccctgcagcaggtgttccaggcacctcgccggcctggcattggcactgtggggaaaccaatcaagctcctggccaattactttgaggtggacatccctaagatcgacgtgtaccactacgaggtggacatcaagccggataagtgtccccgtagagtcaaccgggaagtggtggaatacatggtccagcatttcaagcctcagatctttggtgatcgcaagcctgtgtatgatggaaagaagaacatttacactgtcacagcactgcccattggcaacgaacgggtcgactttgaggtgacaatccctggggaagggaaggatcgaatctttaaggtctccatcaagtggctagccattgtgagctggcgaatgctgcatgaggccctggtcagcggccagatccctgttcccttggagtctgtgcaagccctggatgtggccatgaggcacctggcatccatgaggtacacccctgtgggccgctccttcttctcaccgcctgagggctactaccacccgctggggggtgggcgcgangtctggttcggctttcaccagtctgtgcgccctgccatgtggaagatgatgctcaacattgatgtctcagccactgccttttataaggcacagccagtgattgagttcatgtgtgaggtgctggacatcaggaacatagatgagcagcccaagcccctcacggactctcagcgcgttcgcttcaccaaggagatcaagggcctgaaggtggaagtcacccactgtggacagatgaagaggaagtaccgcgtgtgtaatgttacccgtcgccctgctagccatcagacattccccttacagctggagagtggacagactgtggagtgcacagtggcacagtatttcaagcagaaatataaccttcagctcaagtatccccatctgccctgcctacaagttggccaggaacaaaagcatacctaccttcccctagaggtctgtaacattgtggctgggcagcgctgtattaaaaagctgaccgacaaccagacctcgaccatgataaaggccacagctagatccgctccagacagacaggaggagatcagtcgcctgatgaagaatgccagctacaacttagatccctacatccaggaatttgggatcaaagtgaaggatgacatgacggaggtgacagggcgagtgctgccggcgcccatcttgcagtacggcggccggaaccgggccattgccacacccaatcagggtgtctgggacatgcgggggaaacagttctacaatgggattgagatcaaagtctgggccatcgcctgcttcgcaccccaaaaacagtgtcgagaagaggtgctcaagaacttcacagaccagctgcggaagatttccaaggatgcggggatgcctatccagggtcaaccttgtttctgcaaatatgcacagggggcagacagcgtggagcctatgttccggcatctcaagaacacctactcagggctgcagctcattattgtcatcctgccagggaagacgccggtgtatgctgaggtgaaacgtgtcggagatacactcttgggaatggctacgcagtgtgtgcaggtgaagaacgtggtcaagacctcacctcagactctgtccaacctctgcctcaagatcaatgtcaaacttggtggcattaacaacatcctagtcccacaccagcgctctgccgtttttcaacagccagtgatattcctgggagcagatgttacacaccccccagcaggggatgggaaaaaaccttctatcacagcagtggtaggcagtatggatgcccaccccagccgatactgtgctactgtgcgggtacagcgaccacggcaagagatcattgaagacttgtcctacatggtgcgtgagctcctcatccaattctacaagtccacccgtttcaagcctacccgcatcatcttctaccgagatggggtgcctgaaggccagctaccccagatactccactatgagctactggccattcgtgatgcctgcatcaaactggaaaaggactaccagcctgggatcacttatattgtggtgcagaaacgccatcacacccgccttttctgtgctgacaagaatgagcgaattgggaagagtggtaacatcccagctgggaccacagtggacaccaacatcacccacccatttgagtttgacttctatctgtgcagccacgcaggcatccagggcaccagccgaccatcccattactatgttctttgggatgacaaccgtttcacagcagatgagctccagatcctgacgtaccagctgtgccacacttacgtacgatgcacacgctctgtctctatcccagcacctgcctactatgcccgcctggtggctttccgggcacgataccacctggtggacaaggagcatgacagtggagaggggagccacatatcggggcagagcaatgggcgggacccccaggccctggccaaagccgtgcaggttcaccaggatactctgcgcaccatgtacttcgcttgaaggcagaacgctgttacctcactggatagaagaaagctttccaagccccaggagctgtgccacccaaatccagaggaagcaaggaggagggaggtggggtagggaggagtgtaggatgccttgtttccttctatagaggtggtgtaagagtggggaacagggccagcaagacagaccaccagccagaaatctctgatatcaacctcatgtcccccacccctcaccccatcttgtcacatctggccctgaccccactggaccaaaaggggcagcactggtgcccaccatacacacaggtgtctcatgtgactcacagtgctaaagactcatgcttgacagcttggtaaggtcaactctgtagccctgcagacaaaagctggttaggtttgggtttgatactttagatgggaaagtgaggggcttgagaaagtgggtgggaggagggaaggattttttaggagccttaatcagaaaaggactagatttgtttaagaagaaaaatgaaaccagacccagatcaatattttaggatactagatgttttaatgggttcagaatccagtttgtaggaagattttttaatggttttggttgctcctcccccagctgccaccccccaccttacccttattcctctctgtccacattttctgccccaccttacttctcctccctgacagacatccagcccctagtaatacttaaggcactatggcacttagctttgaagtgacacgaccctgtcttccttccgcccgctggtgggtaaccagtgccttccctgtaacggtaatgctgcagaactgcaaccttttgtacctttctttggggaatggggtgggggtgggagaggaggtagatggggaagaaataccccagacccaacaaacctccagccagaaagccagctattttgcatttgaaggaattgacttcctcattcattgagctttttaaaagatcacaacctcaagatggttaaaatccattgacatttgcactttcaaacatgacaagtctcggagctgctgagatgacaggcccctggcctttccacttatgcctccttttctccttattcctcctacctcccgccccgcccaggtctggagttactttcatagcatttttcactcttggcttcttttctcccttgatggtcaagtctcttatgtttcaatatttcttaactggggtgtcttataacaaaaaactcttaggtctaaaatgagaaaaaagagagaaaacaaaatgttatttttataccataacttgagtgtattgccaaaatttggaaatccttcccatgcctgatgagtttatatcccagaaacattgagccatcagaatgaactgtgtacctgatttgttctctgacctggctaggtagggagggggtggttatcgccccaagatggggtccaggctccatccttcctctgtgcagataatacctttttcttgctatagcctccctcctctgcactgtcctgcactctttcttgcaagtgcatctttttccttcccctggactgtcctctgaccctttggctcatcctagattgcagtgtgtcctgtggacaggctggggaattttgctgctccctattgcttctgtttacaaaaatgaatttttcctggtttcccactagggcatgtgggtgggtggcatggacttttttttttttttttttttgtcttgagacatggggtttggctgtcttgcaggactggagaaggtggtggttctagcttggtctctgttggccttgaagcaagcatcccccctgccctttttccttgactgttcatttttttcctgccccactgcttgggatggggagttgcaacttcagtgtggaatttcctctttgaggagcctgggcttggatctatcctgatctggtgatgaagccatgattactttagacctagcccaggcttggaggccagctggaggaagaagggtctaaatcctggcctgtagagttagaactaccatttcctccccttagctgcccttgtatgacccggatttgctatgcaaaacaatctatcccaggttctgttctggttggctacattgttcagcaactcacaaaacgtagcacaaacattcattatggagaaagcatcaggactgttgagtaactcctcctttacttttttcctgctggctacagcatggggtgccctataggcacaagcccagctgaagaacagaatggagggctctgggaggaggcagctcactggagagcctacattccttacacaagtgcctaaagagagtgatgctaacactccatctgccctgtccattgccttcatatacagtctacttcgtgttctgtcaccctttggggaggggagttctcctgggacagtgggctctgcatgttctccacttggatacattttggggctaggatcagggcactattcctggagggtccagtcattcaccagcatttgcaaatgtccatagggagcaggtggcagcctctactcccagcaacaagtttgtgttctctccttttctctctttgcctcactctctccagttggttttcagctggggcttgaaatgcatttttagccctttgacgtggcttatgccattcaagaaataaaaagcaagagaatcagctttgggcaatgacaagaaatgagttcttactctgatttttttgtaaaaagataatttttgagacttgaaaaataccccgaccttgagattattcctgtttgaaaggtggtgcatgcagatggagaagtggtgttggcagcaagctttggctcatgtggatttggtttaagtggtgcttcttacccaagcttcaaggaagtgcttgggggacccccagcctcatcctcttagttgggtctcttgttccctttgtaccactgttttgccttccttttcctcttctctctttgcctggcttcctttcccttttcttctattcactctgcttgcttgctggccggcctgcctgcctgcctgcctgcctgcctgcctgtctgcctatgtgatgatgaaatctctgcatggctgcaatgatcccactgttagctggcagggtcaggcttagctccttgactgcagaagaccaagaacctgttccccaagcccagagatgtccacctgggctggactgccctcaagcttatactagagaagagcaactgacctgcccaacttgtgtgaagtcaggagggtttctggcattttccacacctgtccactccttggagctggtttctctcattgctttttctaaatctggttctttttctctttacctggggcctggcttttctgagattgtcttagggttgagctatttgggtatcctgggtttgagtgttaggggatggacataaaggaaaaagagtgatgagaagagaatggagagaatttgaataaaaggtgggaaaggagagcactgttctttgattgtttatccagtccaacctgatccattagggatcgaggtgctacactggcctccagggataagcctggggctactgttgctgggaacttaggcttaacataaagccgaagaaggtacctagaaatttgaaacttccctaaaaagctcctaatgcccacctgctagatagcttctctgtggcctcctatttagctaagcagcagtgtttttggatactttttttttctgtttgtgaataaggccagcactcaagatgggcagccaagggtgcactgactattagctggcccataggatatctgtaaggctggtgggacagttttggacctggaatcatgtgtaactaacaaggttggacgtttcttccccatcagggtagaaaaatcatctcaaactagccaaaaggcagttttggaaactacattgggggacgttatttttatttatatatggggcctaggccaatccaggatggtagctggaataccttccttcttaaaatctgatcatggcagggatatgcagggcactttttactatttggccttctaagcagattgggaaggaggtattttctggttttcgctttcctccgacttaataggacttgccttctccctgggcagggagagaggctgggttggtgctctcccttactctactcatactgacttagagcctctggctgctgtttgggcatccaagaaagggaggggaaggaatgagctaaaaacaaaacagaatgaggtgggaaagggagattttcttctttacagaggaaaataggaaaccctccaagaattgtgcaagtaaagacatttgttgaatgcactgagtcccttggtgtagtagcaataaggaaaaatgaaattactttcctgtgcacacagtccagcctaattggtatgtgatgttgcacttagcagccatgtggtgggcatgtgtgactactctggttttcactttagtttctaaactttttatccctctcaagtccagcatggatggggaaatgtctctggatccccacagctgtgtacttgtttgcatttgtttccctttgagatttgtgtttgtgtcctgctttgagctgtaccttgtccagtccattgtgaaattatcccagcagctgtaatgtacagttccttctgaagcaagcaacatcagcagcagcagcagcagcagcacaattctgtgttttataaagacaacagtggcttctatttctaaagtgcggtctttctctttttttttcctaccagcaaaacaaacttttgggactgattacatctctaatagattttaggtgagaataatactgtagattgttatgcaggaatacttcacagagccttcatttattcttcattcaacaaacatgcaaagcactgtgccagcagtattgtggggaggggaggcacaattcaaaatgaggaaaatagtgtccgtctcattaagggaattaagtttggtgggggatatgattagccaaatagtcccctggcataggaggaagataatgagggagtggaataaggctacaacaacgaatatagggaggaagggacagatttgagagacgaggtagaattaataggactcgatggctggtgggaggagaagacaggagtagaggttagctcccaggtttctccttgaccataggagtgtgttgggacattctgccagtcaagatgggggtgacggggagactgtagaaggaaggtggggagtttttgaagaaacagaatgttgtatagactgagttttgaggtgtttgtggggcagtaagggtaaggtgtccagtaaacacaggttggtgctcaggtaagactgtaaaactgcatttatagatacaggagtcttatagatggtagttaaagccataggcatgaatgagatagcttagaaaaagagaagagaaactagtatacagccccctaagaaactcaatttaaaggttcgggagagtctcagcagatct

SEQ ID NO: 332337 - DNA, 7240 bp, Homo sapiens
  misc_feature (567)..(567): n is a, c, g, or t
gaatcagaagctacattttaataaaatctccaggtgattcataggaatattaaagtttgagaagcactgtcatagagtagatgttaggagtgagtataatagatgggacattgcctggactttgaattacttccaaaacttgaagtggtggtagtctctcagcttccacaggccactcctatcccccacagggaagtggtggaatacatggtccagcatttcaagcctcagatctttggtgatcgcaagcctgtgtatgatggaaagaagaacatttacactgtcacagcactgcccattggcaacgaacgggtcgactttgaggtgacaatccctggggaagggaaggatcgaatctttaaggtctccatcaagtggctagccattgtgagctggcgaatgctgcatgaggccctggtcagcggccagatccctgttcccttggagtctgtgcaagccctggatgtggccatgaggcacctggcatccatgaggtacacccctgtgggccgctccttcttctcaccgcctgagggctactaccacccgctggggggtgggcgcgangtctggttcggctttcaccagtctgtgcgccctgccatgtggaagatgatgctcaacattgatgtctcagccactgccttttataaggcacagccagtgattgagttcatgtgtgaggtgctggacatcaggaacatagatgagcagcccaagcccctcacggactctcagcgcgttcgcttcaccaaggagatcaagggcctgaaggtggaagtcacccactgtggacagatgaagaggaagtaccgcgtgtgtaatgttacccgtcgccctgctagccatcagacattccccttacagctggagagtggacagactgtggagtgcacagtggcacagtatttcaagcagaaatataaccttcagctcaagtatccccatctgccctgcctacaagttggccaggaacaaaagcatacctaccttcccctagaggtctgtaacattgtggctgggcagcgctgtattaaaaagctgaccgacaaccagacctcgaccatgataaaggccacagctagatccgctccagacagacaggaggagatcagtcgcctgatgaagaatgccagctacaacttagatccctacatccaggaatttgggatcaaagtgaaggatgacatgacggaggtgacagggcgagtgctgccggcgcccatcttgcagtacggcggccggaaccgggccattgccacacccaatcagggtgtctgggacatgcgggggaaacagttctacaatgggattgagatcaaagtctgggccatcgcctgcttcgcaccccaaaaacagtgtcgagaagaggtgctcaagaacttcacagaccagctgcggaagatttccaaggatgcggggatgcctatccagggtcaaccttgtttctgcaaatatgcacagggggcagacagcgtggagcctatgttccggcatctcaagaacacctactcagggctgcagctcattattgtcatcctgccagggaagacgccggtgtatgctgaggtgaaacgtgtcggagatacactcttgggaatggctacgcagtgtgtgcaggtgaagaacgtggtcaagacctcacctcagactctgtccaacctctgcctcaagatcaatgtcaaacttggtggcattaacaacatcctagtcccacaccagcgctctgccgtttttcaacagccagtgatattcctgggagcagatgttacacaccccccagcaggggatgggaaaaaaccttctatcacagcagtggtaggcagtatggatgcccaccccagccgatactgtgctactgtgcgggtacagcgaccacggcaagagatcattgaagacttgtcctacatggtgcgtgagctcctcatccaattctacaagtccacccgtttcaagcctacccgcatcatcttctaccgagatggggtgcctgaaggccagctaccccagatactccactatgagctactggccattcgtgatgcctgcatcaaactggaaaaggactaccagcctgggatcacttatattgtggtgcagaaacgccatcacacccgccttttctgtgctgacaagaatgagcgaattgggaagagtggtaacatcccagctgggaccacagtggacaccaacatcacccacccatttgagtttgacttctatctgtgcagccacgcaggcatccagggcaccagccgaccatcccattactatgttctttgggatgacaaccgtttcacagcagatgagctccagatcctgacgtaccagctgtgccacacttacgtacgatgcacacgctctgtctctatcccagcacctgcctactatgcccgcctggtggctttccgggcacgataccacctggtggacaaggagcatgacagtggagaggggagccacatatcggggcagagcaatgggcgggacccccaggccctggccaaagccgtgcaggttcaccaggatactctgcgcaccatgtacttcgcttgaaggcagaacgctgttacctcactggatagaagaaagctttccaagccccaggagctgtgccacccaaatccagaggaagcaaggaggagggaggtggggtagggaggagtgtaggatgccttgtttccttctatagaggtggtgtaagagtggggaacagggccagcaagacagaccaccagccagaaatctctgatatcaacctcatgtcccccacccctcaccccatcttgtcacatctggccctgaccccactggaccaaaaggggcagcactggtgcccaccatacacacaggtgtctcatgtgactcacagtgctaaagactcatgcttgacagcttggtaaggtcaactctgtagccctgcagacaaaagctggttaggtttgggtttgatactttagatgggaaagtgaggggcttgagaaagtgggtgggaggagggaaggattttttaggagccttaatcagaaaaggactagatttgtttaagaagaaaaatgaaaccagacccagatcaatattttaggatactagatgttttaatgggttcagaatccagtttgtaggaagattttttaatggttttggttgctcctcccccagctgccaccccccaccttacccttattcctctctgtccacattttctgccccaccttacttctcctccctgacagacatccagcccctagtaatacttaaggcactatggcacttagctttgaagtgacacgaccctgtcttccttccgcccgctggtgggtaaccagtgccttccctgtaacggtaatgctgcagaactgcaaccttttgtacctttctttggggaatggggtgggggtgggagaggaggtagatggggaagaaataccccagacccaacaaacctccagccagaaagccagctattttgcatttgaaggaattgacttcctcattcattgagctttttaaaagatcacaacctcaagatggttaaaatccattgacatttgcactttcaaacatgacaagtctcggagctgctgagatgacaggcccctggcctttccacttatgcctccttttctccttattcctcctacctcccgccccgcccaggtctggagttactttcatagcatttttcactcttggcttcttttctcccttgatggtcaagtctcttatgtttcaatatttcttaactggggtgtcttataacaaaaaactcttaggtctaaaatgagaaaaaagagagaaaacaaaatgttatttttataccataacttgagtgtattgccaaaatttggaaatccttcccatgcctgatgagtttatatcccagaaacattgagccatcagaatgaactgtgtacctgatttgttctctgacctggctaggtagggagggggtggttatcgccccaagatggggtccaggctccatccttcctctgtgcagataatacctttttcttgctatagcctccctcctctgcactgtcctgcactctttcttgcaagtgcatctttttccttcccctggactgtcctctgaccctttggctcatcctagattgcagtgtgtcctgtggacaggctggggaattttgctgctccctattgcttctgtttacaaaaatgaatttttcctggtttcccactagggcatgtgggtgggtggcatggacttttttttttttttttttttgtcttgagacatggggtttggctgtcttgcaggactggagaaggtggtggttctagcttggtctctgttggccttgaagcaagcatcccccctgccctttttccttgactgttcatttttttcctgccccactgcttgggatggggagttgcaacttcagtgtggaatttcctctttgaggagcctgggcttggatctatcctgatctggtgatgaagccatgattactttagacctagcccaggcttggaggccagctggaggaagaagggtctaaatcctggcctgtagagttagaactaccatttcctccccttagctgcccttgtatgacccggatttgctatgcaaaacaatctatcccaggttctgttctggttggctacattgttcagcaactcacaaaacgtagcacaaacattcattatggagaaagcatcaggactgttgagtaactcctcctttacttttttcctgctggctacagcatggggtgccctataggcacaagcccagctgaagaacagaatggagggctctgggaggaggcagctcactggagagcctacattccttacacaagtgcctaaagagagtgatgctaacactccatctgccctgtccattgccttcatatacagtctacttcgtgttctgtcaccctttggggaggggagttctcctgggacagtgggctctgcatgttctccacttggatacattttggggctaggatcagggcactattcctggagggtccagtcattcaccagcatttgcaaatgtccatagggagcaggtggcagcctctactcccagcaacaagtttgtgttctctccttttctctctttgcctcactctctccagttggttttcagctggggcttgaaatgcatttttagccctttgacgtggcttatgccattcaagaaataaaaagcaagagaatcagctttgggcaatgacaagaaatgagttcttactctgatttttttgtaaaaagataatttttgagacttgaaaaataccccgaccttgagattattcctgtttgaaaggtggtgcatgcagatggagaagtggtgttggcagcaagctttggctcatgtggatttggtttaagtggtgcttcttacccaagcttcaaggaagtgcttgggggacccccagcctcatcctcttagttgggtctcttgttccctttgtaccactgttttgccttccttttcctcttctctctttgcctggcttcctttcccttttcttctattcactctgcttgcttgctggccggcctgcctgcctgcctgcctgcctgcctgcctgtctgcctatgtgatgatgaaatctctgcatggctgcaatgatcccactgttagctggcagggtcaggcttagctccttgactgcagaagaccaagaacctgttccccaagcccagagatgtccacctgggctggactgccctcaagcttatactagagaagagcaactgacctgcccaacttgtgtgaagtcaggagggtttctggcattttccacacctgtccactccttggagctggtttctctcattgctttttctaaatctggttctttttctctttacctggggcctggcttttctgagattgtcttagggttgagctatttgggtatcctgggtttgagtgttaggggatggacataaaggaaaaagagtgatgagaagagaatggagagaatttgaataaaaggtgggaaaggagagcactgttctttgattgtttatccagtccaacctgatccattagggatcgaggtgctacactggcctccagggataagcctggggctactgttgctgggaacttaggcttaacataaagccgaagaaggtacctagaaatttgaaacttccctaaaaagctcctaatgcccacctgctagatagcttctctgtggcctcctatttagctaagcagcagtgtttttggatactttttttttctgtttgtgaataaggccagcactcaagatgggcagccaagggtgcactgactattagctggcccataggatatctgtaaggctggtgggacagttttggacctggaatcatgtgtaactaacaaggttggacgtttcttccccatcagggtagaaaaatcatctcaaactagccaaaaggcagttttggaaactacattgggggacgttatttttatttatatatggggcctaggccaatccaggatggtagctggaataccttccttcttaaaatctgatcatggcagggatatgcagggcactttttactatttggccttctaagcagattgggaaggaggtattttctggttttcgctttcctccgacttaataggacttgccttctccctgggcagggagagaggctgggttggtgctctcccttactctactcatactgacttagagcctctggctgctgtttgggcatccaagaaagggaggggaaggaatgagctaaaaacaaaacagaatgaggtgggaaagggagattttcttctttacagaggaaaataggaaaccctccaagaattgtgcaagtaaagacatttgttgaatgcactgagtcccttggtgtagtagcaataaggaaaaatgaaattactttcctgtgcacacagtccagcctaattggtatgtgatgttgcacttagcagccatgtggtgggcatgtgtgactactctggttttcactttagtttctaaactttttatccctctcaagtccagcatggatggggaaatgtctctggatccccacagctgtgtacttgtttgcatttgtttccctttgagatttgtgtttgtgtcctgctttgagctgtaccttgtccagtccattgtgaaattatcccagcagctgtaatgtacagttccttctgaagcaagcaacatcagcagcagcagcagcagcagcacaattctgtgttttataaagacaacagtggcttcta

SEQ ID NO: 332338 - DNA, 6091 bp, Homo sapiens
  misc_feature (656)..(656): n is a, c, g, or t
tgaggcaagcgcctcaggagtgcgtgaggcccacgcagaactcggggagccttttatcctgaggacacaggggaagaattggaggactatattcagctgcgggcgcttacctgccccccctgcagcaggtgttccaggcacctcgccggcctggcattggcactgtggggaaaccaatcaagctcctggccaattactttgaggtggacatccctaagatcgacgtgtaccactacgaggtggacatcaagccggataagtgtccccgtagagtcaaccgggaagtggtggaatacatggtccagcatttcaagcctcagatctttggtgatcgcaagcctgtgtatgatggaaagaagaacatttacactgtcacagcactgcccattggcaacgaacgggtcgactttgaggtgacaatccctggggaagggaaggatcgaatctttaaggtctccatcaagtggctagccattgtgagctggcgaatgctgcatgaggccctggtcagcggccagatccctgttcccttggagtctgtgcaagccctggatgtggccatgaggcacctggcatccatgaggtacacccctgtgggccgctccttcttctcaccgcctgagggctactaccacccgctggggggtgggcgcgangtctggttcggctttcaccagtctgtgcgccctgccatgtggaagatgatgctcaacattgatgtctcagccactgccttttataaggcacagccagtgattgagttcatgtgtgaggtgctggacatcaggaacatagatgagcagcccaagcccctcacggactctcagcgcgttcgcttcaccaaggagatcaagggcctgaaggtggaagtcacccactgtggacagatgaagaggaagtaccgcgtgtgtaatgttacccgtcgccctgctagccatcagacattccccttacagctggagagtggacagactgtggagtgcacagtggcacagtatttcaagcagaaatataaccttcagctcaagtatccccatctgccctgcctacaagttggccaggaacaaaagcatacctaccttcccctagaggtctgtaacattgtggctgggcagcgctgtattaaaaagctgaccgacaaccagacctcgaccatgataaaggccacagctagatccgctccagacagacaggaggagatcagtcgcctgatgaagaatgccagctacaacttagatccctacatccaggaatttgggatcaaagtgaaggatgacatgacggaggtgacagggcgagtgctgccggcgcccatcttgcagtacggcggccggaaccgggccattgccacacccaatcagggtgtctgggacatgcgggggaaacagttctacaatgggattgagatcaaagtctgggccatcgcctgcttcgcaccccaaaaacagtgtcgagaagaggtgctcaagaacttcacagaccagctgcggaagatttccaaggatgcggggatgcctatccagggtcaaccttgtttctgcaaatatgcacagggggcagacagcgtggagcctatgttccggcatctcaagaacacctactcagggctgcagctcattattgtcatcctgccagggaagacgccggtgtatgctgaggtgaaacgtgtcggagatacactcttgggaatggctacgcagtgtgtgcaggtgaagaacgtggtcaagacctcacctcagactctgtccaacctctgcctcaagatcaatgtcaaacttggtggcattaacaacatcctagtcccacaccagcgctctgccgtttttcaacagccagtgatattcctgggagcagatgttacacaccccccagcaggggatgggaaaaaaccttctatcacagcagtggtaggcagtatggatgcccaccccagccgatactgtgctactgtgcgggtacagcgaccacggcaagagatcattgaagacttgtcctacatggtgcgtgagctcctcatccaattctacaagtccacccgtttcaagcctacccgcatcatcttctaccgagatggggtgcctgaaggccagctaccccagatactccactatgagctactggccattcgtgatgcctgcatcaaactggaaaaggactaccagcctgggatcacttatattgtggtgcagaaacgccatcacacccgccttttctgtgctgacaagaatgagcgaattgggaagagtggtaacatcccagctgggaccacagtggacaccaacatcacccacccatttgagtttgacttctatctgtgcagccacgcaggcatccagggcaccagccgaccatcccattactatgttctttgggatgacaaccgtttcacagcagatgagctccagatcctgacgtaccagctgtgccacacttacgtacgatgcacacgctctgtctctatcccagcacctgcctactatgcccgcctggtggctttccgggcacgataccacctggtggacaaggagcatgacagtggagaggggagccacatatcggggcagagcaatgggcgggacccccaggccctggccaaagccgtgcaggttcaccaggatactctgcgcaccatgtacttcgcttgaaggcagaacgctgttacctcactggatagaagaaagctttccaagccccaggagctgtgccacccaaatccagaggaagcaaggaggagggaggtggggtagggaggagtgtaggatgccttgtttccttctatagaggtggtgtaagagtggggaacagggccagcaagacagaccaccagccagaaatctctgatatcaacctcatgtcccccacccctcaccccatcttgtcacatctggccctgaccccactggaccaaaaggggcagcactggtgcccaccatacacacaggtgtctcatgtgactcacagtgctaaagactcatgcttgacagcttggtaaggtcaactctgtagccctgcagacaaaagctggttaggtttgggtttgatactttagatgggaaagtgaggggcttgagaaagtgggtgggaggagggaaggattttttaggagccttaatcagaaaaggactagatttgtttaagaagaaaaatgaaaccagacccagatcaatattttaggatactagatgttttaatgggttcagaatccagtttgtaggaagattttttaatggttttggttgctcctcccccagctgccaccccccaccttacccttattcctctctgtccacattttctgccccaccttacttctcctccctgacagacatccagcccctagtaatacttaaggcactatggcacttagctttgaagtgacacgaccctgtcttccttccgcccgctggtgggtaaccagtgccttccctgtaacggtaatgctgcagaactgcaaccttttgtacctttctttggggaatggggtgggggtgggagaggaggtagatggggaagaaataccccagacccaacaaacctccagccagaaagccagctattttgcatttgaaggaattgacttcctcattcattgagctttttaaaagatcacaacctcaagatggttaaaatccattgacatttgcactttcaaacatgacaagtctcggagctgctgagatgacaggcccctggcctttccacttatgcctccttttctccttattcctcctacctcccgccccgcccaggtctggagttactttcatagcatttttcactcttggcttcttttctcccttgatggtcaagtctcttatgtttcaatatttcttaactggggtgtcttataacaaaaaactcttaggtctaaaatgagaaaaaagagagaaaacaaaatgttatttttataccataacttgagtgtattgccaaaatttggaaatccttcccatgcctgatgagtttatatcccagaaacattgagccatcagaatgaactgtgtacctgatttgttctctgacctggctaggtagggagggggtggttatcgccccaagatggggtccaggctccatccttcctctgtgcagataatacctttttcttgctatagcctccctcctctgcactgtcctgcactctttcttgcaagtgcatctttttccttcccctggactgtcctctgaccctttggctcatcctagattgcagtgtgtcctgtggacaggctggggaattttgctgctccctattgcttctgtttacaaaaatgaatttttcctggtttcccactagggcatgtgggtgggtggcatggacttttttttttttttttttttgtcttgagacatggggtttggctgtcttgcaggactggagaaggtggtggttctagcttggtctctgttggccttgaagcaagcatcccccctgccctttttccttgactgttcatttttttcctgccccactgcttgggatggggagttgcaacttcagtgtggaatttcctctttgaggagcctgggcttggatctatcctgatctggtgatgaagccatgattactttagacctagcccaggcttggaggccagctggaggaagaagggtctaaatcctggcctgtagagttagaactaccatttcctccccttagctgcccttgtatgacccggatttgctatgcaaaacaatctatcccaggttctgttctggttggctacattgttcagcaactcacaaaacgtagcacaaacattcattatggagaaagcatcaggactgttgagtaactcctcctttacttttttcctgctggctacagcatggggtgccctataggcacaagcccagctgaagaacagaatggagggctctgggaggaggcagctcactggagagcctacattccttacacaagtgcctaaagagagtgatgctaacactccatctgccctgtccattgccttcatatacagtctacttcgtgttctgtcaccctttggggaggggagttctcctgggacagtgggctctgcatgttctccacttggatacattttggggctaggatcagggcactattcctggagggtccagtcattcaccagcatttgcaaatgtccatagggagcaggtggcagcctctactcccagcaacaagtttgtgttctctccttttctctctttgcctcactctctccagttggttttcagctggggcttgaaatgcatttttagccctttgacgtggcttatgccattcaagaaataaaaagcaagagaatcagctttgggcaatgacaagaaatgagttcttactctgatttttttgtaaaaagataatttttgagacttgaaaaataccccgaccttgagattattcctgtttgaaaggtggtgcatgcagatggagaagtggtgttggcagcaagctttggctcatgtggatttggtttaagtggtgcttcttacccaagcttcaaggaagtgcttgggggacccccagcctcatcctcttagttgggtctcttgttccctttgtaccactgttttgccttccttttcctcttctctctttgcctggcttcctttcccttttcttctattcactctgcttgcttgctggccggcctgcctgcctgcctgcctgcctgcctgcctgtctgcctatgtgatgatgaaatctctgcatggctgcaatgatcccactgttagctggcagggtcaggcttagctccttgactgcagaagaccaagaacctgttccccaagcccagagatgtccacctgggctggactgccctcaagcttatactagagaagagcaactgacctgcccaacttgtgtgaagtcaggagggtttctggcattttccacacctgtccactccttggagctggtttctctcattgctttttctaaatctggttctttttctctttacctggggcctggcttttctgagattgtcttagggttgagctatttgggtatcctgggtttgagtgttaggggatggacataaaggaaaaagagtgatgagaagagaatggagagaatttgaataaaaggtgggaaaggaga

SEQ ID NO: 332339 - DNA, 859 bp, Homo sapiens
cggtaccctccccgtacgcccaatctcaaactagccaaaaggcagttttggaaactacattgggggacgttatttttatttatatatggggcctaggccaatccaggatggtagctggaataccttccttcttaaaatctgatcatggcagggatatgcagggcactttttactatttggccttctaagcagattgggaaggaggtattttctggttttcgctttcctccgacttaataggacttgccttctccctgggcagggagagaggctgggttggtgctctcccttactctactcatactgacttagagcctctggctgctgtttgggcatccaagaaagggaggggaaggaatgagctaaaaacaaaacagaatgaggtgggaaagggagattttcttctttacagaggaaaataggaaaccctccaagaattgtgcaagtaaagacatttgttgaatgcactgagtcccttggtgtagtagcaataaggaaaaatgaaattactttcctgtgcacacagtccagcctaattggtatgtgatgttgcacttagcagccatgtggtgggcatgtgtgactactctggttttcactttagtttctaaactttttatccctctcaagtccagcatggatggggaaatgtctctggatccccacagctgtgtacttgtttgcatttgtttccctttgagatttgtgtttgtgtcctgctttgagctgtaccttgtccagtccattgtgaaattatcccagcagctgtaatgtacagttccttctgaagcaagcaacatcagcagcagcagcagcagcagcacaattctgtgttttataaagacaacagtggcttcta

SEQ ID NO: 332340 - DNA, 1018 bp, Homo sapiens
  misc_feature (39)..(39): n is a, c, g, or t
  misc_feature (59)..(59): n is a, c, g, or t
tttttagaaatagaagccactgttgtctttataaaacanagaattgtgctgctgctgcngctgctgctgtgtacttgtttgcatttgtttccctttgagatttgtgtttgtgtcctgctttgagctgtaccttgtccagtccattgtgaaattatcccagcagctgtaatgtacagttccttctgaagcaagcaacatcagcagcagcagcagcagcagcacaattctgtgttttataaagacaacagtggcttctatttctaaagtgcggtctttctctttttttttcctaccagcaaaacaaacttttgggactgattacatctctaatagattttaggtgagaataatactgtagattgttatgcaggaatacttcacagagccttcatttattcttcattcaacaaacatgcaaagcactgtgccagcagtattgtggggaggggaggcacaattcaaaatgaggaaaatagtgtccgtctcattaagggaattaagtttggtgggggatatgattagccaaatagtcccctggcataggaggaagataatgagggagtggaataaggctacaacaacgaatatagggaggaagggacagatttgagagacgaggtagaattaataggactcgatggctggtgggaggagaagacaggagtagaggttagctcccaggtttctccttgaccataggagtgtgttgggacattctgccagtcaagatgggggtgacggggagactgtagaaggaaggtggggagtttttgaagaaacagaatgttgtatagactgagttttgaggtgtttgtggggcagtaagggtaaggtgtccagtaaacacaggttggtgctcaggtaagactgtaaaactgcatttatagatacaggagtcttatagatggtagttaaagccataggcatgaatgagatagcttagaaaaagagaagagaaactagtatacagccccctaagaaactcaatttaaaggttcgggagagtctcagcagatct

SEQ ID NO: 332341 - DNA, 371 bp, Homo sapiens
acttagatccctacatccaggaatttgggatcaaagtgaaggatgacatgacggaggtgacagggcgagtgctgccggcgcccatcttgcagtacggcggccgggtgagcagggtcagggccagacaacatctcggggcatatgggggtggttgggttgtatagccaggggcttttgctcccctacccacctgactctactgaggctcacctaggcgccccctctacctatccccagaaccgggccattgccacacccaatcagggtgtctgggacatgcgggggaaacagttctacaatgggattgagatcaaagtctgggccatcgcctgcttcgcaccccaaaaacagtgtcgagaagaggtgctcaa

SEQ ID NO: 332342 - DNA, 7471 bp, Homo sapiens
  misc_feature (798)..(798): n is a, c, g, or t
actggcagctggccgggcgctcgcagtgggagctgctgcaggctccgcggcggcggcaacggaggctgcgggggcggcggcgcgagcggccgggcttggtaggggagccgagcccggcccgggatcccgagcagcgagagtgtggggtacctaggcccctcacgctggacttcacagtctccgggccgcctgacctccgcacgggtatatgggatggaagcgggaccctcgggagcagctgcgggcgcttacctgccccccctgcagcaggtgttccaggcacctcgccggcctggcattggcactgtggggaaaccaatcaagctcctggccaattactttgaggtggacatccctaagatcgacgtgtaccactacgaggtggacatcaagccggataagtgtccccgtagagtcaaccgggaagtggtggaatacatggtccagcatttcaagcctcagatctttggtgatcgcaagcctgtgtatgatggaaagaagaacatttacactgtcacagcactgcccattggcaacgaacgggtcgactttgaggtgacaatccctggggaagggaaggatcgaatctttaaggtctccatcaagtggctagccattgtgagctggcgaatgctgcatgaggccctggtcagcggccagatccctgttcccttggagtctgtgcaagccctggatgtggccatgaggcacctggcatccatgaggtacacccctgtgggccgctccttcttctcaccgcctgagggctactaccacccgctggggggtgggcgcgangtctggttcggctttcaccagtctgtgcgccctgccatgtggaagatgatgctcaacattgatgtctcagccactgccttttataaggcacagccagtgattgagttcatgtgtgaggtgctggacatcaggaacatagatgagcagcccaagcccctcacggactctcagcgcgttcgcttcaccaaggagatcaagggcctgaaggtggaagtcacccactgtggacagatgaagaggaagtaccgcgtgtgtaatgttacccgtcgccctgctagccatcagacattccccttacagctggagagtggacagactgtggagtgcacagtggcacagtatttcaagcagaaatataaccttcagctcaagtatccccatctgccctgcctacaagttggccaggaacaaaagcatacctaccttcccctagaggtctgtaacattgtggctgggcagcgctgtattaaaaagctgaccgacaaccagacctcgaccatgataaaggccacagctagatccgctccagacagacaggaggagatcagtcgcctgatgaagaatgccagctacaacttagatccctacatccaggaatttgggatcaaagtgaaggatgacatgacggaggtgacagggcgagtgctgccggcgcccatcttgcagtacggcggccggaaccgggccattgccacacccaatcagggtgtctgggacatgcgggggaaacagttctacaatgggattgagatcaaagtctgggccatcgcctgcttcgcaccccaaaaacagtgtcgagaagaggtgctcaagaacttcacagaccagctgcggaagatttccaaggatgcggggatgcctatccagggtcaaccttgtttctgcaaatatgcacagggggcagacagcgtggagcctatgttccggcatctcaagaacacctactcagggctgcagctcattattgtcatcctgccagggaagacgccggtgtatgctgaggtgaaacgtgtcggagatacactcttgggaatggctacgcagtgtgtgcaggtgaagaacgtggtcaagacctcacctcagactctgtccaacctctgcctcaagatcaatgtcaaacttggtggcattaacaacatcctagtcccacaccagcgctctgccgtttttcaacagccagtgatattcctgggagcagatgttacacaccccccagcaggggatgggaaaaaaccttctatcacagcagtggtaggcagtatggatgcccaccccagccgatactgtgctactgtgcgggtacagcgaccacggcaagagatcattgaagacttgtcctacatggtgcgtgagctcctcatccaattctacaagtccacccgtttcaagcctacccgcatcatcttctaccgagatggggtgcctgaaggccagctaccccagatactccactatgagctactggccattcgtgatgcctgcatcaaactggaaaaggactaccagcctgggatcacttatattgtggtgcagaaacgccatcacacccgccttttctgtgctgacaagaatgagcgaattgggaagagtggtaacatcccagctgggaccacagtggacaccaacatcacccacccatttgagtttgacttctatctgtgcagccacgcaggcatccagggcaccagccgaccatcccattactatgttctttgggatgacaaccgtttcacagcagatgagctccagatcctgacgtaccagctgtgccacacttacgtacgatgcacacgctctgtctctatcccagcacctgcctactatgcccgcctggtggctttccgggcacgataccacctggtggacaaggagcatgacagtggagaggggagccacatatcggggcagagcaatgggcgggacccccaggccctggccaaagccgtgcaggttcaccaggatactctgcgcaccatgtacttcgcttgaaggcagaacgctgttacctcactggatagaagaaagctttccaagccccaggagctgtgccacccaaatccagaggaagcaaggaggagggaggtggggtagggaggagtgtaggatgccttgtttccttctatagaggtggtgtaagagtggggaacagggccagcaagacagaccaccagccagaaatctctgatatcaacctcatgtcccccacccctcaccccatcttgtcacatctggccctgaccccactggaccaaaaggggcagcactggtgcccaccatacacacaggtgtctcatgtgactcacagtgctaaagactcatgcttgacagcttggtaaggtcaactctgtagccctgcagacaaaagctggttaggtttgggtttgatactttagatgggaaagtgaggggcttgagaaagtgggtgggaggagggaaggattttttaggagccttaatcagaaaaggactagatttgtttaagaagaaaaatgaaaccagacccagatcaatattttaggatactagatgttttaatgggttcagaatccagtttgtaggaagattttttaatggttttggttgctcctcccccagctgccaccccccaccttacccttattcctctctgtccacattttctgccccaccttacttctcctccctgacagacatccagcccctagtaatacttaaggcactatggcacttagctttgaagtgacacgaccctgtcttccttccgcccgctggtgggtaaccagtgccttccctgtaacggtaatgctgcagaactgcaaccttttgtacctttctttggggaatggggtgggggtgggagaggaggtagatggggaagaaataccccagacccaacaaacctccagccagaaagccagctattttgcatttgaaggaattgacttcctcattcattgagctttttaaaagatcacaacctcaagatggttaaaatccattgacatttgcactttcaaacatgacaagtctcggagctgctgagatgacaggcccctggcctttccacttatgcctccttttctccttattcctcctacctcccgccccgcccaggtctggagttactttcatagcatttttcactcttggcttcttttctcccttgatggtcaagtctcttatgtttcaatatttcttaactggggtgtcttataacaaaaaactcttaggtctaaaatgagaaaaaagagagaaaacaaaatgttatttttataccataacttgagtgtattgccaaaatttggaaatccttcccatgcctgatgagtttatatcccagaaacattgagccatcagaatgaactgtgtacctgatttgttctctgacctggctaggtagggagggggtggttatcgccccaagatggggtccaggctccatccttcctctgtgcagataatacctttttcttgctatagcctccctcctctgcactgtcctgcactctttcttgcaagtgcatctttttccttcccctggactgtcctctgaccctttggctcatcctagattgcagtgtgtcctgtggacaggctggggaattttgctgctccctattgcttctgtttacaaaaatgaatttttcctggtttcccactagggcatgtgggtgggtggcatggacttttttttttttttttttttgtcttgagacatggggtttggctgtcttgcaggactggagaaggtggtggttctagcttggtctctgttggccttgaagcaagcatcccccctgccctttttccttgactgttcatttttttcctgccccactgcttgggatggggagttgcaacttcagtgtggaatttcctctttgaggagcctgggcttggatctatcctgatctggtgatgaagccatgattactttagacctagcccaggcttggaggccagctggaggaagaagggtctaaatcctggcctgtagagttagaactaccatttcctccccttagctgcccttgtatgacccggatttgctatgcaaaacaatctatcccaggttctgttctggttggctacattgttcagcaactcacaaaacgtagcacaaacattcattatggagaaagcatcaggactgttgagtaactcctcctttacttttttcctgctggctacagcatggggtgccctataggcacaagcccagctgaagaacagaatggagggctctgggaggaggcagctcactggagagcctacattccttacacaagtgcctaaagagagtgatgctaacactccatctgccctgtccattgccttcatatacagtctacttcgtgttctgtcaccctttggggaggggagttctcctgggacagtgggctctgcatgttctccacttggatacattttggggctaggatcagggcactattcctggagggtccagtcattcaccagcatttgcaaatgtccatagggagcaggtggcagcctctactcccagcaacaagtttgtgttctctccttttctctctttgcctcactctctccagttggttttcagctggggcttgaaatgcatttttagccctttgacgtggcttatgccattcaagaaataaaaagcaagagaatcagctttgggcaatgacaagaaatgagttcttactctgatttttttgtaaaaagataatttttgagacttgaaaaataccccgaccttgagattattcctgtttgaaaggtggtgcatgcagatggagaagtggtgttggcagcaagctttggctcatgtggatttggtttaagtggtgcttcttacccaagcttcaaggaagtgcttgggggacccccagcctcatcctcttagttgggtctcttgttccctttgtaccactgttttgccttccttttcctcttctctctttgcctggcttcctttcccttttcttctattcactctgcttgcttgctggccggcctgcctgcctgcctgcctgcctgcctgcctgtctgcctatgtgatgatgaaatctctgcatggctgcaatgatcccactgttagctggcagggtcaggcttagctccttgactgcagaagaccaagaacctgttccccaagcccagagatgtccacctgggctggactgccctcaagcttatactagagaagagcaactgacctgcccaacttgtgtgaagtcaggagggtttctggcattttccacacctgtccactccttggagctggtttctctcattgctttttctaaatctggttctttttctctttacctggggcctggcttttctgagattgtcttagggttgagctatttgggtatcctgggtttgagtgttaggggatggacataaaggaaaaagagtgatgagaagagaatggagagaatttgaataaaaggtgggaaaggagagcactgttctttgattgtttatccagtccaacctgatccattagggatcgaggtgctacactggcctccagggataagcctggggctactgttgctgggaacttaggcttaacataaagccgaagaaggtacctagaaatttgaaacttccctaaaaagctcctaatgcccacctgctagatagcttctctgtggcctcctatttagctaagcagcagtgtttttggatactttttttttctgtttgtgaataaggccagcactcaagatgggcagccaagggtgcactgactattagctggcccataggatatctgtaaggctggtgggacagttttggacctggaatcatgtgtaactaacaaggttggacgtttcttccccatcagggtagaaaaatcatctcaaactagccaaaaggcagttttggaaactacattgggggacgttatttttatttatatatggggcctaggccaatccaggatggtagctggaataccttccttcttaaaatctgatcatggcagggatatgcagggcactttttactatttggccttctaagcagattgggaaggaggtattttctggttttcgctttcctccgacttaataggacttgccttctccctgggcagggagagaggctgggttggtgctctcccttactctactcatactgacttagagcctctggctgctgtttgggcatccaagaaagggaggggaaggaatgagctaaaaacaaaacagaatgaggtgggaaagggagattttcttctttacagaggaaaataggaaaccctccaagaattgtgcaagtaaagacatttgttgaatgcactgagtcccttggtgtagtagcaataaggaaaaatgaaattactttcctgtgcacacagtccagcctaattggtatgtgatgttgcacttagcagccatgtggtgggcatgtgtgactactctggttttcactttagtttctaaactttttatccctctcaagtccagcatggatggggaaatgtctctggatccccacagctgtgtacttgtttgcatttgtttccctttgagatttgtgtttgtgtcctgctttgagctgtaccttgtccagtccattgtgaaattatcccagcagctgtaatgtacagttccttctgaagcaagcaacatcagcagcagcagcagcagcagcacaattctgtgttttataaagacaacagtggcttcta

SEQ ID NO: 332343 - DNA, 7158 bp, Homo sapiens
  misc_feature (656)..(656): n is a, c, g, or t
tgaggcaagcgcctcaggagtgcgtgaggcccacgcagaactcggggagccttttatcctgaggacacaggggaagaattggaggactatattcagctgcgggcgcttacctgccccccctgcagcaggtgttccaggcacctcgccggcctggcattggcactgtggggaaaccaatcaagctcctggccaattactttgaggtggacatccctaagatcgacgtgtaccactacgaggtggacatcaagccggataagtgtccccgtagagtcaaccgggaagtggtggaatacatggtccagcatttcaagcctcagatctttggtgatcgcaagcctgtgtatgatggaaagaagaacatttacactgtcacagcactgcccattggcaacgaacgggtcgactttgaggtgacaatccctggggaagggaaggatcgaatctttaaggtctccatcaagtggctagccattgtgagctggcgaatgctgcatgaggccctggtcagcggccagatccctgttcccttggagtctgtgcaagccctggatgtggccatgaggcacctggcatccatgaggtacacccctgtgggccgctccttcttctcaccgcctgagggctactaccacccgctggggggtgggcgcgangtctggttcggctttcaccagtctgtgcgccctgccatgtggaagatgatgctcaacattgatgtctcagccactgccttttataaggcacagccagtgattgagttcatgtgtgaggtgctggacatcaggaacatagatgagcagcccaagcccctcacggactctcagcgcgttcgcttcaccaaggagatcaagggcctgaaggtggaagtcacccactgtggacagatgaagaggaagtaccgcgtgtgtaatgttacccgtcgccctgctagccatcagacattccccttacagctggagagtggacagactgtggagtgcacagtggcacagtatttcaagcagaaatataaccttcagctcaagtatccccatctgccctgcctacaagttggccaggaacaaaagcatacctaccttcccctagaggtctgtaacattgtggctgggcagcgctgtattaaaaagctgaccgacaaccagacctcgaccatgataaaggccacagctagatccgctccagacagacaggaggagatcagtcgcctgatgaagaatgccagctacaacttagatccctacatccaggaatttgggatcaaagtgaaggatgacatgacggaggtgacagggcgagtgctgccggcgcccatcttgcagtacggcggccggaaccgggccattgccacacccaatcagggtgtctgggacatgcgggggaaacagttctacaatgggattgagatcaaagtctgggccatcgcctgcttcgcaccccaaaaacagtgtcgagaagaggtgctcaagaacttcacagaccagctgcggaagatttccaaggatgcggggatgcctatccagggtcaaccttgtttctgcaaatatgcacagggggcagacagcgtggagcctatgttccggcatctcaagaacacctactcagggctgcagctcattattgtcatcctgccagggaagacgccggtgtatgctgaggtgaaacgtgtcggagatacactcttgggaatggctacgcagtgtgtgcaggtgaagaacgtggtcaagacctcacctcagactctgtccaacctctgcctcaagatcaatgtcaaacttggtggcattaacaacatcctagtcccacaccagcgctctgccgtttttcaacagccagtgatattcctgggagcagatgttacacaccccccagcaggggatgggaaaaaaccttctatcacagcagtggtaggcagtatggatgcccaccccagccgatactgtgctactgtgcgggtacagcgaccacggcaagagatcattgaagacttgtcctacatggtgcgtgagctcctcatccaattctacaagtccacccgtttcaagcctacccgcatcatcttctaccgagatggggtgcctgaaggccagctaccccagatactccactatgagctactggccattcgtgatgcctgcatcaaactggaaaaggactaccagcctgggatcacttatattgtggtgcagaaacgccatcacacccgccttttctgtgctgacaagaatgagcgaattgggaagagtggtaacatcccagctgggaccacagtggacaccaacatcacccacccatttgagtttgacttctatctgtgcagccacgcaggcatccagggcaccagccgaccatcccattactatgttctttgggatgacaaccgtttcacagcagatgagctccagatcctgacgtaccagctgtgccacacttacgtacgatgcacacgctctgtctctatcccagcacctgcctactatgcccgcctggtggctttccgggcacgataccacctggtggacaaggagcatgacagtggagaggggagccacatatcggggcagagcaatgggcgggacccccaggccctggccaaagccgtgcaggttcaccaggatactctgcgcaccatgtacttcgcttgaaggcagaacgctgttacctcactggatagaagaaagctttccaagccccaggagctgtgccacccaaatccagaggaagcaaggaggagggaggtggggtagggaggagtgtaggatgccttgtttccttctatagaggtggtgtaagagtggggaacagggccagcaagacagaccaccagccagaaatctctgatatcaacctcatgtcccccacccctcaccccatcttgtcacatctggccctgaccccactggaccaaaaggggcagcactggtgcccaccatacacacaggtgtctcatgtgactcacagtgctaaagactcatgcttgacagcttggtaaggtcaactctgtagccctgcagacaaaagctggttaggtttgggtttgatactttagatgggaaagtgaggggcttgagaaagtgggtgggaggagggaaggattttttaggagccttaatcagaaaaggactagatttgtttaagaagaaaaatgaaaccagacccagatcaatattttaggatactagatgttttaatgggttcagaatccagtttgtaggaagattttttaatggttttggttgctcctcccccagctgccaccccccaccttacccttattcctctctgtccacattttctgccccaccttacttctcctccctgacagacatccagcccctagtaatacttaaggcactatggcacttagctttgaagtgacacgaccctgtcttccttccgcccgctggtgggtaaccagtgccttccctgtaacggtaatgctgcagaactgcaaccttttgtacctttctttggggaatggggtgggggtgggagaggaggtagatggggaagaaataccccagacccaacaaacctccagccagaaagccagctattttgcatttgaaggaattgacttcctcattcattgagctttttaaaagatcacaacctcaagatggttaaaatccattgacatttgcactttcaaacatgacaagtctcggagctgctgagatgacaggcccctggcctttccacttatgcctccttttctccttattcctcctacctcccgccccgcccaggtctggagttactttcatagcatttttcactcttggcttcttttctcccttgatggtcaagtctcttatgtttcaatatttcttaactggggtgtcttataacaaaaaactcttaggtctaaaatgagaaaaaagagagaaaacaaaatgttatttttataccataacttgagtgtattgccaaaatttggaaatccttcccatgcctgatgagtttatatcccagaaacattgagccatcagaatgaactgtgtacctgatttgttctctgacctggctaggtagggagggggtggttatcgccccaagatggggtccaggctccatccttcctctgtgcagataatacctttttcttgctatagcctccctcctctgcactgtcctgcactctttcttgcaagtgcatctttttccttcccctggactgtcctctgaccctttggctcatcctagattgcagtgtgtcctgtggacaggctggggaattttgctgctccctattgcttctgtttacaaaaatgaatttttcctggtttcccactagggcatgtgggtgggtggcatggacttttttttttttttttttttgtcttgagacatggggtttggctgtcttgcaggactggagaaggtggtggttctagcttggtctctgttggccttgaagcaagcatcccccctgccctttttccttgactgttcatttttttcctgccccactgcttgggatggggagttgcaacttcagtgtggaatttcctctttgaggagcctgggcttggatctatcctgatctggtgatgaagccatgattactttagacctagcccaggcttggaggccagctggaggaagaagggtctaaatcctggcctgtagagttagaactaccatttcctccccttagctgcccttgtatgacccggatttgctatgcaaaacaatctatcccaggttctgttctggttggctacattgttcagcaactcacaaaacgtagcacaaacattcattatggagaaagcatcaggactgttgagtaactcctcctttacttttttcctgctggctacagcatggggtgccctataggcacaagcccagctgaagaacagaatggagggctctgggaggaggcagctcactggagagcctacattccttacacaagtgcctaaagagagtgatgctaacactccatctgccctgtccattgccttcatatacagtctacttcgtgttctgtcaccctttggggaggggagttctcctgggacagtgggctctgcatgttctccacttggatacattttggggctaggatcagggcactattcctggagggtccagtcattcaccagcatttgcaaatgtccatagggagcaggtggcagcctctactcccagcaacaagtttgtgttctctccttttctctctttgcctcactctctccagttggttttcagctggggcttgaaatgcatttttagccctttgacgtggcttatgccattcaagaaataaaaagcaagagaatcagctttgggcaatgacaagaaatgagttcttactctgatttttttgtaaaaagataatttttgagacttgaaaaataccccgaccttgagattattcctgtttgaaaggtggtgcatgcagatggagaagtggtgttggcagcaagctttggctcatgtggatttggtttaagtggtgcttcttacccaagcttcaaggaagtgcttgggggacccccagcctcatcctcttagttgggtctcttgttccctttgtaccactgttttgccttccttttcctcttctctctttgcctggcttcctttcccttttcttctattcactctgcttgcttgtggactgccctcaagcttatactagagaagagcaactgacctgcccaacttgtgtgaagtcaggagggtttctggcattttccacacctgtccactccttggagctggtttctctcattgctttttctaaatctggttctttttctctttacctggggcctggcttttctgagattgtcttagggttgagctatttgggtatcctgggtttgagtgttaggggatggacataaaggaaaaagagtgatgagaagagaatggagagaatttgaataaaaggtgggaaaggagagcactgttctttgattgtttatccagtccaacctgatccattagggatcgaggtgctacactggcctccagggataagcctggggctactgttgctgggaacttaggcttaacataaagccgaagaaggtacctagaaatttgaaacttccctaaaaagctcctaatgcccacctgctagatagcttctctgtggcctcctatttagctaagcagcagtgtttttggatactttttttttctgtttgtgaataaggccagcactcaagatgggcagccaagggtgcactgactattagctggcccataggatatctgtaaggctggtgggacagttttggacctggaatcatgtgtaactaacaaggttggacgtttcttccccatcagggtagaaaaatcatctcaaactagccaaaaggcagttttggaaactacattgggggacgttatttttatttatatatggggcctaggccaatccaggatggtagctggaataccttccttcttaaaatctgatcatggcagggatatgcagggcactttttactatttggccttctaagcagattgggaaggaggtattttctggttttcgctttcctccgacttaataggacttgccttctccctgggcagggagagaggctgggttggtgctctcccttactctactcatactgacttagagcctctggctgctgtttgggcatccaagaaagggaggggaaggaatgagctaaaaacaaaacagaatgaggtgggaaagggagattttcttctttacagaggaaaataggaaaccctccaagaattgtgcaagtaaagacatttgttgaatgcactgagtcccttggtgtagtagcaataaggaaaaatgaaattactttcctgtgcacacagtccagcctaattggtatgtgatgttgcacttagcagccatgtggtgggcatgtgtgactactctggttttcactttagtttctaaactttttatccctctcaagtccagcatggatggggaaatgtctctggatccccacagctgtgtacttgtttgcatttgtttccctttgagatttgtgtttgtgtcctgctttgagctgtaccttgtccagtccattgtgaaattatcccagcagctgtaatgtacagttccttctgaagcaagcaacatcagcagcagcagcagcagcagcacaattctgtgttttataaagacaacagtggcttcta

SEQ ID NO: 332344 - DNA, 4682 bp, Homo sapiens
acctgggtcatccatgggctaggatcccatggatgggcacatgccccaggagctgtgccacccaaatccagaggaagcaaggaggagggaggtggggtagggaggagtgtaggatgccttgtttccttctatagaggtggtgtaagagtggggaacagggccagcaagacagaccaccagccagaaatctctgatatcaacctcatgtcccccacccctcaccccatcttgtcacatctggccctgaccccactggaccaaaaggggcagcactggtgcccaccatacacacaggtgtctcatgtgactcacagtgctaaagactcatgcttgacagcttggtaaggtcaactctgtagccctgcagacaaaagctggttaggtttgggtttgatactttagatgggaaagtgaggggcttgagaaagtgggtgggaggagggaaggattttttaggagccttaatcagaaaaggactagatttgtttaagaagaaaaatgaaaccagacccagatcaatattttaggatactagatgttttaatgggttcagaatccagtttgtaggaagattttttaatggttttggttgctcctcccccagctgccaccccccaccttacccttattcctctctgtccacattttctgccccaccttacttctcctccctgacagacatccagcccctagtaatacttaaggcactatggcacttagctttgaagtgacacgaccctgtcttccttccgcccgctggtgggtaaccagtgccttccctgtaacggtaatgctgcagaactgcaaccttttgtacctttctttggggaatggggtgggggtgggagaggaggtagatggggaagaaataccccagacccaacaaacctccagccagaaagccagctattttgcatttgaaggaattgacttcctcattcattgagctttttaaaagatcacaacctcaagatggttaaaatccattgacatttgcactttcaaacatgacaagtctcggagctgctgagatgacaggcccctggcctttccacttatgcctccttttctccttattcctcctacctcccgccccgcccaggtctggagttactttcatagcatttttcactcttggcttcttttctcccttgatggtcaagtctcttatgtttcaatatttcttaactggggtgtcttataacaaaaaactcttaggtctaaaatgagaaaaaagagagaaaacaaaatgttatttttataccataacttgagtgtattgccaaaatttggaaatccttcccatgcctgatgagtttatatcccagaaacattgagccatcagaatgaactgtgtacctgatttgttctctgacctggctaggtagggagggggtggttatcgccccaagatggggtccaggctccatccttcctctgtgcagataatacctttttcttgctatagcctccctcctctgcactgtcctgcactctttcttgcaagtgcatctttttccttcccctggactgtcctctgaccctttggctcatcctagattgcagtgtgtcctgtggacaggctggggaattttgctgctccctattgcttctgtttacaaaaatgaatttttcctggtttcccactagggcatgtgggtgggtggcatggacttttttttttttttttttttgtcttgagacatggggtttggctgtcttgcaggactggagaaggtggtggttctagcttggtctctgttggccttgaagcaagcatcccccctgccctttttccttgactgttcatttttttcctgccccactgcttgggatggggagttgcaacttcagtgtggaatttcctctttgaggagcctgggcttggatctatcctgatctggtgatgaagccatgattactttagacctagcccaggcttggaggccagctggaggaagaagggtctaaatcctggcctgtagagttagaactaccatttcctccccttagctgcccttgtatgacccggatttgctatgcaaaacaatctatcccaggttctgttctggttggctacattgttcagcaactcacaaaacgtagcacaaacattcattatggagaaagcatcaggactgttgagtaactcctcctttacttttttcctgctggctacagcatggggtgccctataggcacaagcccagctgaagaacagaatggagggctctgggaggaggcagctcactggagagcctacattccttacacaagtgcctaaagagagtgatgctaacactccatctgccctgtccattgccttcatatacagtctacttcgtgttctgtcaccctttggggaggggagttctcctgggacagtgggctctgcatgttctccacttggatacattttggggctaggatcagggcactattcctggagggtccagtcattcaccagcatttgcaaatgtccatagggagcaggtggcagcctctactcccagcaacaagtttgtgttctctccttttctctctttgcctcactctctccagttggttttcagctggggcttgaaatgcatttttagccctttgacgtggcttatgccattcaagaaataaaaagcaagagaatcagctttgggcaatgacaagaaatgagttcttactctgatttttttgtaaaaagataatttttgagacttgaaaaataccccgaccttgagattattcctgtttgaaaggtggtgcatgcagatggagaagtggtgttggcagcaagctttggctcatgtggatttggtttaagtggtgcttcttacccaagcttcaaggaagtgcttgggggacccccagcctcatcctcttagttgggtctcttgttccctttgtaccactgttttgccttccttttcctcttctctctttgcctggcttcctttcccttttcttctattcactctgcttgcttgctggccggcctgcctgcctgcctgcctgcctgcctgcctgtctgcctatgtgatgatgaaatctctgcatggctgcaatgatcccactgttagctggcagggtcaggcttagctccttgactgcagaagaccaagaacctgttccccaagcccagagatgtccacctgggctggactgccctcaagcttatactagagaagagcaactgacctgcccaacttgtgtgaagtcaggagggtttctggcattttccacacctgtccactccttggagctggtttctctcattgctttttctaaatctggttctttttctctttacctggggcctggcttttctgagattgtcttagggttgagctatttgggtatcctgggtttgagtgttaggggatggacataaaggaaaaagagtgatgagaagagaatggagagaatttgaataaaaggtgggaaaggagagcactgttctttgattgtttatccagtccaacctgatccattagggatcgaggtgctacactggcctccagggataagcctggggctactgttgctgggaacttaggcttaacataaagccgaagaaggtacctagaaatttgaaacttccctaaaaagctcctaatgcccacctgctagatagcttctctgtggcctcctatttagctaagcagcagtgtttttggatactttttttttctgtttgtgaataaggccagcactcaagatgggcagccaagggtgcactgactattagctggcccataggatatctgtaaggctggtgggacagttttggacctggaatcatgtgtaactaacaaggttggacgtttcttccccatcagggtagaaaaatcatctcaaactagccaaaaggcagttttggaaactacattgggggacgttatttttatttatatatggggcctaggccaatccaggatggtagctggaataccttccttcttaaaatctgatcatggcagggatatgcagggcactttttactatttggccttctaagcagattgggaaggaggtattttctggttttcgctttcctccgacttaataggacttgccttctccctgggcagggagagaggctgggttggtgctctcccttactctactcatactgacttagagcctctggctgctgtttgggcatccaagaaagggaggggaaggaatgagctaaaaacaaaacagaatgaggtgggaaagggagattttcttctttacagaggaaaataggaaaccctccaagaattgtgcaagtaaagacatttgttgaatgcactgagtcccttggtgtagtagcaataaggaaaaatgaaattactttcctgtgcacacagtccagcctaattggtatgtgatgttgcacttagcagccatgtggtgggcatgtgtgactactctggttttcactttagtttctaaactttttatccctctcaagtccagcatggatggggaaatgtctctggatccccacagctgtgtacttgtttgcatttgtttccctttgagatttgtgtttgtgtcctgctttgagctgtaccttgtccagtccattgtgaaattatcccagcagctgtaatgtacagttccttctgaagcaagcaacatcagcagcagcagcagcagcagcacaattctgtgttttataaagacaacagtggcttcta

SEQ ID NO: 332345 - DNA, 2883 bp, Homo sapiens
  misc_feature (567)..(567): n is a, c, g, or t
gaatcagaagctacattttaataaaatctccaggtgattcataggaatattaaagtttgagaagcactgtcatagagtagatgttaggagtgagtataatagatgggacattgcctggactttgaattacttccaaaacttgaagtggtggtagtctctcagcttccacaggccactcctatcccccacagggaagtggtggaatacatggtccagcatttcaagcctcagatctttggtgatcgcaagcctgtgtatgatggaaagaagaacatttacactgtcacagcactgcccattggcaacgaacgggtcgactttgaggtgacaatccctggggaagggaaggatcgaatctttaaggtctccatcaagtggctagccattgtgagctggcgaatgctgcatgaggccctggtcagcggccagatccctgttcccttggagtctgtgcaagccctggatgtggccatgaggcacctggcatccatgaggtacacccctgtgggccgctccttcttctcaccgcctgagggctactaccacccgctggggggtgggcgcgangtctggttcggctttcaccagtctgtgcgccctgccatgtggaagatgatgctcaacattgatgtctcagccactgccttttataaggcacagccagtgattgagttcatgtgtgaggtgctggacatcaggaacatagatgagcagcccaagcccctcacggactctcagcgcgttcgcttcaccaaggagatcaagggcctgaaggtggaagtcacccactgtggacagatgaagaggaagtaccgcgtgtgtaatgttacccgtcgccctgctagccatcagacattccccttacagctggagagtggacagactgtggagtgcacagtggcacagtatttcaagcagaaatataaccttcagctcaagtatccccatctgccctgcctacaagttggccaggaacaaaagcatacctaccttcccctagaggtctgtaacattgtggctgggcagcgctgtattaaaaagctgaccgacaaccagacctcgaccatgataaaggccacagctagatccgctccagacagacaggaggagatcagtcgcctgatgaagaatgccagctacaacttagatccctacatccaggaatttgggatcaaagtgaaggatgacatgacggaggtgacagggcgagtgctgccggcgcccatcttgcagtacggcggccggaaccgggccattgccacacccaatcagggtgtctgggacatgcgggggaaacagttctacaatgggattgagatcaaagtctgggccatcgcctgcttcgcaccccaaaaacagtgtcgagaagaggtgctcaagaacttcacagaccagctgcggaagatttccaaggatgcggggatgcctatccagggtcaaccttgtttctgcaaatatgcacagggggcagacagcgtggagcctatgttccggcatctcaagaacacctactcagggctgcagctcattattgtcatcctgccagggaagacgccggtgtatgctgaggtgaaacgtgtcggagatacactcttgggaatggctacgcagtgtgtgcaggtgaagaacgtggtcaagacctcacctcagactctgtccaacctctgcctcaagatcaatgtcaaacttggtggcattaacaacatcctagtcccacaccagcgctctgccgtttttcaacagccagtgatattcctgggagcagatgttacacaccccccagcaggggatgggaaaaaaccttctatcacagcagtggtaggcagtatggatgcccaccccagccgatactgtgctactgtgcgggtacagcgaccacggcaagagatcattgaagacttgtcctacatggtgcgtgagctcctcatccaattctacaagtccacccgtttcaagcctacccgcatcatcttctaccgagatggggtgcctgaaggccagctaccccagatactccactatgagctactggccattcgtgatgcctgcatcaaactggaaaaggactaccagcctgggatcacttatattgtggtgcagaaacgccatcacacccgccttttctgtgctgacaagaatgagcgaattgggaagagtggtaacatcccagctgggaccacagtggacaccaacatcacccacccatttgagtttgacttctatctgtgcagccacgcaggcatccagataagaaaattgaagcccagagagatcaagtgactgatccaaagtcccacagtgaggggaactgaagataggatattctttctccttttcctctttaaaaaattattttgattaaaaaaaaccgtattactgaagcatagggacatggggagaaattatgaatgattcctcagcctgaataaaatagtatgtttcattaaggcaacaaatatttattaaggacctaatatttgcctgacattcaagtgaggtggggggcacacaagtagtaaataaataacagactgggcaaagggctaccaaggcaatactgtagtagactaacaggtgccccaccatagatgggtggtccggaaaaggcgtctcagatgtctttcgttgagacgcaaaaaaaagctgtggggtagggcgtaaggggagggtggagaagagagagagggttcctggccaagggaaccaaaagcagagaagctccaagtcagaaaaaagcagcggttggcccgttgggagaattggaagccaaccagtatagctgtagcacaggcggggcccatttacgccgtgcgttttcaccctggaaaggagtttgggttttcaagtgtgacgaggcgctattaaagagttttaaacatggaa

SEQ ID NO: 332346 - DNA, 166 bp, Homo sapiens
gcttcactaactcacaaaagctgttttgctgaattcttccttctaaatgcctttggatagggaagacacgtaactggaaagacaaacattttgcactttattaattgggtttttcattctagaattcaagccaagagtttgggctccggagtgagactcacagggg

SEQ ID NO: 332347 - DNA, 369 bp, Homo sapiens
ataaagattcttcaaaaaataataacaatagccatgcaaagtatatgatatatatcataaataattgtacttagattatatatgaaaatgatactctttttgatatgctaggtaaataaaatacattatttaaactcattgacttcttctctttgtatttataacatgatgactagacagtgggattcccatgaggctcacatcacattgtgattgaacaaggctggtctgcagggcttcaggttacaggggctgtggagtgacctggtgcaggaagccccgtctccatccataggacatcagtgtgaacccagggagaggcgctggtataagagagatgagaacacaggtgtgaaccacctgcttgtg

SEQ ID NO: 332348 - DNA, 986 bp, Homo sapiens
tagtagagacagagtttcaccatgttggccaggctggtctcgaactcctgacctcaggtgatcctccggcctcagcctcccaaagtgctgaggtaagccacaccatacgcgtgagccaccatgcccggccctacccttagtcttgatatatcagaaaagcactgtttgatgtgcttcagtgtaaaccattgtggttcggtgaattctggcaggtcatctggaggtttctttggagagcttctatcctactggaaacccaggttgggccccatgtggattgatcggcagtgggaatcagctagggctgctgtaactgagttcgcagacccagtggcatagacagcaaagaggtactgccacgtggctttggagaccagaagtctgagaggaaggtgctggcagggctggttccttctgaggctgcaatggaaaacctgtcctggcctctctcctggcatctgctggttatctttggtgttccctgtagacagctgccccctccctgtatcttcatgtcgtcttccttctctgtgtccttctcttcacgtagtctttttaggacgctggtcgtgttgccttagggcccccatgtcagtgccgtcatctagactgatgatgcccgcagtgatcctgtctccagataaggtcatgtcctgaggtgttctgggttaggactttgacgtttgaatggtggggggtggtggacacaattcagcccctgacagcagcttttctctcccctccctgacgctgtcgcagctgcagtgacatgtacgagaaagtgctgtgcaccagctgtgccatgttcgagacctgaggctggctcaagccggctgccttcaccgggagccacgccgtgcatggcagccttccctggacgagcgctcggtgttcacactgaactgtggggtcgacgggaggggtgccttttacatgttctattttgtatcctaatgacagaatgaataaacctctttatatttgca

SEQ ID NO: 332349 - DNA, 285 bp, Homo sapiens
tactactactactaaattcgcggccgcgtcgaccctgtaccctgtgtggcctcgtggactgcagtgacatgtacgagaaagtgctgtgcaccagctgtgccatgttcgagacctgaggctggctcaagccggctgccttcaccgggagccacgccgtgcatggcagccttccctggacgagcgctcggtgttcacactgaactgtggggtcgacgggaggggtgccttttacatgttctattttgtatcctaatgacagaatgaataaacctctttatatttgca

SEQ ID NO: 332350 - DNA, 307 bp, Homo sapiens
tactactactactaaattcgcggccgcgtcgaccctgtaccctgtgtggcctcgtggactgcagtgacatgtacgagaaagtgctgtgcaccagctgtgccatgttcgagacctgaggctggctcaagccggctgccttcaccgggagccacgccgtgcatggcagccttccctggacgagcgctcggtgttcacactgaactgtggggtcgacgggaggggtgccttttacatgttctattttgtatcctaatgacagaatgaataaacctctttatatttgcaagaggactcttgtctgtcagca

SEQ ID NO: 332351 - DNA, 1143 bp, Homo sapiens
tgctcacactgtatcccagcactttgggaggccgaggcaggcagattgcctgaggtcaggagttcaagaccagcctggccaacatggcaaaaccctgtctccactaaaaatacaaaaattagccaagcgtggtggcatgtgcctgtaatcccagctactcaggaggctgaggcatgagaatctcttgaaccccagaggtgtaggttgcagtgagcagagattgtgccactgcactccagcctgggcgacagcatgtggcggccggggagctgcgtagctcccggccccgcggccatgcccaagcggagctgccccttcgcggacgtggccccgctacagctcaaggtccgcgtgagccagagggagttgagccgcggcgtgtgcgccgagcgctactcgcaggaggtcttcgagaagaccaagcgactcctgttcctcggggcccaggcctacctggaccacgtgtgggatgaaggctgtgctgtcgttcacctgccagagtccccaaagcctggccctacaggggccccgagggctgcacgtgggcagatgctgattggaccagacggccgcctgatcaggagccttgggcaggcctccgaagctgacccatctggggtagcgtccattgcctgttcctcatgcgtgcgagccgtggatgggaaggcggtctgcggtcagtgtgagcgagccctgtgcgggcagtgtgtgcgcacctgctggggctgcggctccgtggcctgtaccctgtgtggcctcgtggactgcagtgacatgtacgagaaagtgctgtgcaccagctgtgccatgttcgagacctgaggctggctcaagccggctgccttcaccgggagccacgccgtgcatggcagccttccctggacgagcgctcggtgttcacactgaactgtggggtcgacgggaggggtgccttttacatgttctattttgtatcctaatgacagaatgaataaacctctttatatttgcaaaaaaaaaaaaaacccaaaaaaaaaccggggggcctttttgtcggggggggaaaaaggcggtttgaaggggcctggccatgtgtcccggcccgcttttggtcaagggggaaccggcggcccccaaaggggggataatcaaagcggtcgaaga

SEQ ID NO: 332352 - DNA, 796 bp, Homo sapiens
tgctcacactgtatcccagcactttgggaggccgaggcaggcagattgcctgaggtcaggagttcaagaccagcctggccaacatggcaaaaccctgtctccactaaaaatacaaaaattagccaagcgtggtggcatgtgcctgtaatcccagctactcaggaggctgaggcatgagaatctcttgaaccccagaggtgtaggttgcagtgagcagagattgtgccactgcactccagcctgggcgacagcatgtggcggccggggagctgcgtagctcccggccccgcggccatgcccaagcggagctgccccttcgcggacgtggccccgctacagctcaaggtccgcgtgagccagagggagttgagccgcggcgtgtgcgccgagcgctactcgcaggaggtcttcgacccatctggggtagcgtccattgcctgttcctcatgcgtgcgagccgtggatgggaaggcggtctgcggtcagtgtgagcgagccctgtgcgggcagtgtgtgcgcacctgctggggctgcggctccgtggcctgtaccctgtgtggcctcgtggactgcagtgacatgtacgagaaagtgctgtgcaccagctgtgccatgttcgagacctgaggctggctcaagccggctgccttcaccgggagccacgccgtgcatggcagccttccctggacgagcgctcggtgttcacactgaactgtggggtcgacgggaggggtgccttttacatgttctattttgtatcctaatgacagaatgaataaacctctttatatttgca

SEQ ID NO: 332353 - DNA, 1039 bp, Homo sapiens
tgctcacactgtatcccagcactttgggaggccgaggcaggcagattgcctgaggtcaggagttcaagaccagcctggccaacatggcaaaaccctgtctccactaaaaatacaaaaattagccaagcgtggtggcatgtgcctgtaatcccagctactcaggaggctgaggcatgagaatctcttgaaccccagaggtgtaggttgcagtgagcagagattgtgccactgcactccagcctgggcgacagcatgtggcggccggggagctgcgtagctcccggccccgcggccatgcccaagcggagctgccccttcgcggacgtggccccgctacagctcaaggtccgcgtgagccagagggagttgagccgcggcgtgtgcgccgagcgctactcgcaggaggtcttcgagaagaccaagcgactcctgttcctcggggcccaggcctacctggaccacgtgtgggatgaaggctgtgctgtcgttcacctgccagagtccccaaagcctggccctacaggggccccgagggctgcacgtgggcagatgctgattggaccagacggccgcctgatcaggagccttgggcaggcctccgaagctgacccatctggggtagcgtccattgcctgttcctcatgcgtgcgagccgtggatgggaaggcggtctgcggtcagtgtgagcgagccctgtgcgggcagtgtgtgcgcacctgctggggctgcggctccgtggcctgtaccctgtgtggcctcgtggagtaagtacttcagtccctggagctgctgagatcccatagccccagcaagccgtgatgggggacgggtgggtcacccatgtgggcccagaacacacacgtgtggcccctgatgcagtgccatctggcattgcctaacgggacatggtggcaatagatgcttggcccaactttagtggttagtaatcctctctaagggaaagctgaacctcacagatgacctgctctgtatccggctctagtccctgtcttcagccacttcctgttctgatctttga

SEQ ID NO: 332354 - DNA, 991 bp, Homo sapiens
tgctcacactgtatcccagcactttgggaggccgaggcaggcagattgcctgaggtcaggagttcaagaccagcctggccaacatggcaaaaccctgtctccactaaaaatacaaaaattagccaagcgtggtggcatgtgcctgtaatcccagctactcaggaggctgaggcatgagaatctcttgaaccccagaggtgtaggttgcagtgagcagagattgtgccactgcactccagcctgggcgacagcatgtggcggccggggagctgcgtagctcccggccccgcggccatgcccaagcggagctgccccttcgcggacgtggccccgctacagctcaaggtccgcgtgagccagagggagttgagccgcggcgtgtgcgccgagcgctactcgcaggaggtcttcgagaagaccaagcgactcctgttcctcggggcccaggcctacctggaccacgtgtgggatgaaggctgtgctgtcgttcacctgccagagtccccaaagcctggccctacaggggccccgagggctgcacgtgggcagatgctgattggaccagacggccgcctgatcaggagccttgggcaggcctccgaagctgacccatctggggtagcgtccattgcctgttcctcatgcgtgcgagccgtggatgggaaggcggtctgcggtcagtgtgagcgagccctgtgcgggcagtgtgtgcgcacctgctggggctgcggctccgtggcctgtaccctgtgtggcctcgtggactgcagtgacatgtacgagaaagtgctgtgcaccagctgtgccatgttcgagacctgaggctggctcaagccggctgccttcaccgggagccacgccgtgcatggcagccttccctggacgagcgctcggtgttcacactgaactgtggggtcgacgggaggggtgccttttacatgttctattttgtatcctaatgacagaatgaataaacctctttatatttgca

SEQ ID NO: 332355 - DNA, 1035 bp, Homo sapiens
tgctcacactgtatcccagcactttgggaggccgaggcaggcagattgcctgaggtcaggagttcaagaccagcctggccaacatggcaaaaccctgtctccactaaaaatacaaaaattagccaagcgtggtggcatgtgcctgtaatcccagctactcaggaggctgaggcatgagaatctcttgaaccccagaggtgtaggttgcagtgagcagagattgtgccactgcactccagcctgggcgacagcatgtggcggccggggagctgcgtagctcccggccccgcggccatgcccaagcggagctgccccttcgcggacgtggccccgctacagctcaaggtccgcgtgagccagagggagttgagccgcggcgtgtgcgccgagcgctactcgcaggaggtcttcgagaagaccaagcgactcctgttcctcggggcccaggcctacctggaccacgtgtgggatgaaggctgtgctgtcgttcacctgccagagtccccaaagcctggccctacaggggccccgagggctgcacgtgggcagatgctgattggaccagacggccgcctgatcaggagccttgggcaggcctccgaagctgacccatctggggtagcgtccattgcctgttcctcatgcgtgcgagccgtggatgggaaggcggtctgcggtcagtgtgagcgagccctgtgcgggcagtgtgtgcgcacctgctggggctgcggctccgtggcctgtaccctgtgtggcctcgtggactgcagtgacatgtacgagaaagtgctgtgcaccagctgtgccatgttcgagacctgaggctggctcaagccggctgccttcaccgggagccacgccgtgcatggcagccttccctggacgagcgctcggtgttcacactgaactgtggggtcgacgggaggggtgccttttacatgttctattttgtatcctaatgacagaatgaataaacctctttatatttgcaaaaaaaaaacacggcacaatagaaataatatatcacccaaacgg

SEQ ID NO: 332356 - DNA, 913 bp, Homo sapiens
tgctcacactgtatcccagcactttgggaggccgaggcaggcagattgcctgaggtcaggagttcaagaccagcctggccaacatggcaaaaccctgtctccactaaaaatacaaaaattagccaagcgtggtggcatgtgcctgtaatcccagctactcaggaggctgaggcatgagaatctcttgaaccccagaggtgtaggttgcagtgagcagagattgtgccactgcactccagcctgggcgacagcatgtggcggccggggagctgcgtagctcccggccccgcggccatgcccaagcggagctgccccttcgcggacgtggccccgctacagctcaaggtccgcgtgagccagagggagttgagccgcggcgtgtgcgccgagcgctactcgcaggaggtcttcgagaagaccaagcgactcctgttcctcggggcccaggcctacctggaccacgtgtgggatgaaggctgtgctgtcgttcacctgccagagtccccaaagcctggccctacaggggccccgagggctgcacgtgggcagatgctgattggaccagacggccgcctgatcaggagccttgggcaggcctccgaagctgacccatctggggtagcgtccattgcctgttcctcatgcgtgcgagccgtggatgggaaggcggtctgcggtcagtgtgagcgagccctgtgcgggcagtgtgtgcgcacctgcagctgtgccatgttcgagacctgaggctggctcaagccggctgccttcaccgggagccacgccgtgcatggcagccttccctggacgagcgctcggtgttcacactgaactgtggggtcgacgggaggggtgccttttacatgttctattttgtatcctaatgacagaatgaataaacctctttatatttgca

SEQ ID NO: 332357 - DNA, 395 bp, Homo sapiens
agtcattctagaggactgggcggggagatggtgtcttcccggccgggtggcactgaccggtcatgctcagggcccccttctggttgccggtgcctcacctctggccaggtggcatcggcttccgggtaaatctgagctgcccaaagcgagcctccggaggctgctccatctcctggaacgtttactcattcaggcctctggacgtcgatactggggatgaaaagttcagaaagtggacagattcctggtcttcagtccagacctactgagttaaaatattgaggagagatggagctcaacagatgccctaggtgactctgatgtggcctaagtctggggaaacagtacaccctgcagtacttctccaacctaacagaaatgcggattctgattcg

SEQ ID NO: 332358 - DNA, 403 bp, Homo sapiens
caacctctcttctgagtcttttacatagactgattcatccaattctcacaacagtcctggaaacaggtttattagtatagttactccaactttacagggattaagtaagaggcctgaggctacggagctagagaaatcagtctctgcacaaacacattatgtctgatgggggatggaggaggtggagagagaagcagacagaaagagtgagtgtggctgaatagatagcaagaagtgagattgtagggtacaagggaggttttgttttcattttgtttttaaataaaaacaaataaaacataagtctgtgagaagcatctacttgagagaaaagccaaatatagaaaaagagtggggtagttaatattagtaagattttgtaataacagctacttagaagagg

SEQ ID NO: 332359 - DNA, 781 bp, Homo sapiens
atactttaaaagccttttgccagtgagcattctttattccttttaatatttagccaccttgcaatattgccatctttaagagggacaacacagaaaccagtgtacagatttctttgtagttactattgagatttattcctgtaaatctggcttttgtaaggaattagagatttaacctctaaggttgtatggaatcagaaaccaattcgaggctctgtggctgggatggggatgaaactgtacatttgagcttatcactatcctgcccattatgccccaccatcaagtgaagatgtgcaggactgccatagaggtgctacaggaagtgaggactatgtgaggagacccagaaatgcagaaaaatgttttagggttcccagtaataactgtgattagcaccttctttattttgattccccaggtgtgctggagaattgacagaaaatactccaaatagggtatttggaatggcattagaaacacacttagggccagacattgtgcctcacacctgtaattccagcacttttggaggccaaggcaggaggattgcttgaggccaggagtttgaagccagcttgggtaccatagcaagaaaccatctctataaaaaatatttttaaaaattagccgaacatggtggtatgtgcctgtagtgccagctattcaggaagttcagtgggaggatcacttgagcccaggagattgaggctgcagtgaactgtgatcgcaccactgcattccagcctgggcaatagagtgagatcctgtccttaaaaaa

SEQ ID NO: 332360 - DNA, 812 bp, Homo sapiens
atgaatgcttgtgcgttgatagagggaacatactttaaaagccttttgccagtgagcattctttattccttttaatatttagccaccttgcaatattgccatctttaagagggacaacacagaaaccagtgtacagatttctttgtagttactattgagatttattcctgtaaatctggcttttgtaaggaattagagatttaacctctaaggttgtatggaatcagaaaccaattcgaggctctgtggctgggatggggatgaaactgtacatttgagcttatcactatcctgcccattatgccccaccatcaagtgaagatgtgcaggactgccatagaggtgctacaggaagtgaggactatgtgaggagacccagaaatgcagaaaaatgttttagggttcccagtaataactgtgattagcaccttctttattttgattccccaggtgtgctggagaattgacagaaaatactccaaatagggtatttggaatggcattagaaacacacttagggccagacattgtgcctcacacctgtaattccagcacttttggaggccaaggcaggaggattgcttgaggccaggagtttgaagccagcttgggtaccatagcaagaaaccatctctataaaaaatatttttaaaaattagccgaacatggtggtatgtgcctgtagtgccagctattcaggaagttcagtgggaggatcacttgagcccaggagattgaggctgcagtgaactgtgatcgcaccactgcattccagcctgggcaatagagtgagatcctgtccttaaaaaaaa

SEQ ID NO: 332361 - DNA, 555 bp, Homo sapiens
gggcaatgtagtgaaaatcctgtctctacaaaataaaaaaatatatataataagttgggtgtgatggcttgtgcctgtagtttcagctactcaggaaggtgaggcaagaggatcacttgagccctaggaggtcaaggctgcagtgagccttgagcgtgccactgcacgccagcctgggcagcagactgcgactgtctcaaaaaaaaagaaagtaatttgagctggttatcagaagtaaattacaaagcgaaagcattttctaagcatcttcactgtgtggtaaattactgtggttctaactgttttgtgttagaacatgagtaaggtaagcagaactttgcaaataacaacatgtcagaagtttcaattattaattataatattatagtatagtgttgggagtgggaaattcaattcttatcactaaccttgacatggatagaaaatgatgtgtgcgtgtttgtgtgtgtaaattcaattatgttgttatatatgtctcaccataattgtagtttctctctaatgattattgttataggtaataaataggaaaaa

SEQ ID NO: 332362 - DNA, 228 bp, Homo sapiens
ggctttattcagctgggagcaccggcagactcacgtctccaaaaactgagctccctgagtgagcagttcctgtcccttttaagggcttacaactctaagggggtctgtgtgaaaggatcgtgatcaattgagcaggcagggggtacttgactgggggctgcatccactggtaatcagaacagagcagaacaggacagggattttcatgatgcttttccatgcaatgtc

SEQ ID NO: 332363 - DNA, 547 bp, Homo sapiens
cggattcacagcactggcctcatcattatatctgataatgatgcacagaaaacctgaatagagaaaagaagaaagataattcattggcatgtgcttgccaaaaagagactttatataacttgagaaagcataaagacaacctggaatgaggaaatgtatgtacagtaatgaaaaaaaaatgctttaaacagctgtgtcaaaaactgacatcagagagtaaattgaatttggttttgtaggaagcaggaagcaagcccactcaaacgttgaaatttggcatgagggagtccagtaactttctcctcaatctgtgaactatatgtgagtttgatattttgaaggaaaaggaaaaaaaaaagtttaaaagggcttctgcacagcaaatgaaactagcatcagaatgaacaggcaaccaaaagaatgggagaaaaattttgcaatctacccatctgacaaaggtctaatatccagaatctgcaaggaacttcaacaaatttacaagaaaaaacaaccccatcaaaaagtgggcaaatgatatgaacagaca

SEQ ID NO: 332364 - DNA, 593 bp, Homo sapiens
ataagaaggagccccagatcatggcaattcctgctagtcaggatcagctaaccattacctgcaggtcatacttttccctattatcaagggaacaccctgaaggaaggggcctggggcaaggctagctaggcttcagctttcccttgccctaccccaggcctttttcttaaccccggagtgaccagaaaggatagaaagtagttctttctggattagtgttatatctccctctcaactagttctccccttccatcccctcatccctgcccctgccatctagactagggtccagatgagagacttctgagtgatggtagccataggattatcaacatccattgcctatgagtattaatggtgattgtctgtgggtattgatagttaattgtctgtgagtacctgacagcaacgggttatggctattgatgacaattggtaccttcagtgcccaagcatagccagattgtagcattgctccccgtactgctcctgggacaaatgctccttagagctgtaagaaggcctttgaaggtcctcagagactccaagcagatgcgggtcagtcaggtctgaaccaaagtactctaactgca

SEQ ID NO: 332365 - DNA, 528 bp, Homo sapiens
ataatttcttcctttttctttacagttttatcatttatgcatgtgttcctaaaatatatatttagcttgcttggctttgaacattatttgaatagaatcttcatatatgtatttatttgtgtgtcacttgcttctttggctaaacattatattcgtaagattatgttaatttattttgagatttttttaaacatctctgttgcttagaggactggagagtatgtttaccttttaccctcagtatggaaatttctgagtgagctatagtgtacagccatgctcctctctcagaaaagtcaaactgacaaaacaaacattgaaggtggttatttattttacaaaaatttcatcatagtagtcatttaaaatgactgggttaaaaataaaaacttagacagtgttttggaaattcttgtcaatggagttatattagaattgatttcacatggaggtcaaaagggagtgcatttgagggatggggaaaagaagagtgtaattagcatgaggattagggaggacagctggaga

SEQ ID NO: 332366 - DNA, 233 bp, Homo sapiens
ctactagggaggctgagacgagaggatcacttgaatacaggagttcaatgctgcagtgagctctgatcacactactacactccagcctaggtaatggagtgagaccatctctaaaaaattgttagatttttaagtgttttaaagtttttgaagagtagcacttgataaaagagttgtggcatggtggctcatactcataatttcagcactttgagaggctgaggcaggagcat

SEQ ID NO: 332367 - DNA, 341 bp, Homo sapiens
ctccaagtagaaatggacactaaactattaaatatattggctgaggctcgggagagagattattatataaataaacacaattttttaaaaagaaaaggaaatgactatgaaggagaaaggaaaacttttgaaacaactggaagaaaaggaggaatcaacagaggttttagtttatttgtttaagatgaaagagacctgaatgattataaattgtataaatagctagtccgaatgtgaagatgcagataattaggctatagaatggaaatgcgtttgaagataaggcaggatttgattgagagcttaatttgggagaaaatttgcctttagaaagaaggagc

SEQ ID NO: 332368 - DNA, 130 bp, Homo sapiens
tctgaggaggaagaggaggcgttggtcttgttgtttcaaggtggtggagatggaagggctggagcaggtggagggggagtcgggagaagcaggcccaattggtataacttgttttttttttttttttttt

SEQ ID NO: 332369 - DNA, 2923 bp, Homo sapiens
agcgggtctcgcgcggggagggggcggggggaacggcagctcgcggtgttgttcactcgcgcgtcgagcacacggtgggtccggcggcgggttggcgccccaggcggcgttccctgtggcctggcgcctgggccgctgccctgagcgggttccgccccagagcccgaccctcctgggggctctaggcggagtcccgcgagccgagggggaccggcgaccgctgccgaagcatgaagaaggggtaaggcgtgagcccccaagatttcacgcatgccccctagcttcggtactctgacaccttctcttgcacttgcggatgatgaactggaataacgatgaaagaaagcacatccgatctcaacattcacgtcctgccctataaccgattaattaattgatccccagctagactagtgttggagaaatcagcatgttaaaacaactgttgatgatagctgttggagtaaagttgcagtggaagctatggctgcaaaatcgttaaaatcttcaaggtgaactggcacaaaggttaatctcaagatgccgctagtgaaaagaaacatcgatcctaggcacttgtgccacacagcactgcctagaggcattaagaatgaactggaatgtgtaaccaatatttccttggcaaatataattagacaactaagtagcctaagtaaatatgctgaagatatatttggagaattattcaatgaagcacatagtttttccttcagagtcaactcattgcaagaacgtgtggaccgtttatctgttagtgttacacagcttgatccaaaggaagaagaattgtctttgcaagatataacaatgaggaaagctttccgaagttctacaattcaagaccagcagcttttcgatcgcaagactttgcctattccattacaggagacgtacgatgtttgtgaacagcctccacctctcaatatactcactccttatagagatgatggtaaagaaggtctgaagttttataccaatccttcgtatttctttgatctatggaaagaaaaaatgttgcaagatacagaggataagaggaaggaaaagaggaagcagaagcagaaaaatctagatcgtcctcatgaaccagaaaaagtgccaagagcacctcatgacaggcggcgagaatggcagaagctggcccaaggtccagagctggctgaagatgatgctaatctcttacataagcatattgaagttgctaatggcccagcctctcattttgaaacaagacctcagacatacgtggatcatatggatggatcttactcactttctgccttgccatttagtcagatgagtgagcttctgactagagctgaggaaagggtattagtcagaccacatgaaccacctccacctccaccaatgcatggagcaggagatgcaaaaccgatacccacctgtatcagttctgctacaggtttgatagaaaatcgccctcagtcaccagctacaggcagaacacctgtgtttgtgagccccactcccccacctcctccaccacctcttccatctgccttgtcaacttcctcattaagagcttcaatgacttcaactcctccccctccagtacctcccccacctccacctccagccactgctttgcaagctccagcagtaccaccacctccagctcctcttcagattgcccctggagttcttcacccagctcctcctccaattgcacctcctctagtacagccctctccaccagtagctagagctgccccagtatgtgagactgtaccagttcatccactcccacaaggtgaagttcaggggctgcctccacccccaccaccgcctcctctgcctccacctggcattcgaccatcatcacctgtcacagttacagctcttgctcatcctccctctgggctacatccaactccatctactgccccaggtccccatgttccattaatgcctccatctcctccatcacaagttatacctgcttctgagccaaagcgccatccatcaaccctacctgtaatcagtgatgccaggagtgtgctactggaagcaatacgaaaaggtattcagctacgcaaagtagaagagcagcgtgaacaggaagctaagcatgaacgcattgaaaacgatgttgccaccatcctgtctcgccgtattgctgttgaatatagtgattcggaagatgattcagaatttgatgaagtagattggttggagtaagaaaaatgcattgataaatattacaaaactgaatgcaaatgtcctttgtggtgcttgttccttgaaaatgtttggtcattctagtgttttgctttcttttccttataataaatgacccttttcctccataacttttgatttctaaggaaaatattagcatacatttcaaactaaatgttttacagtggcttatcttttttttccccctgaaaagactaatttggtcaaataaaccactaagtattaagcatggacagctgttgttagagtagcagattcagttttttgatatatcttaattgtgtactttgtgaattttaatttaaagaaagcaactgaaattgaaatcttgagggcagctgtatctactaatgagccttattccatttcctgatgttttaaaagaagaaacactgccttgattatacgaatacactcagaaagtacatttagcttgtagtgttgaattctcttaaaggaatgcttgaattttttcattattgttttattgtttttatatacttgccttatttgaatgtttagcagtatccccttcccacttatatattgtgtgatatgattttgcttgcctataggagttaaaaacttttccatgtgaaatactctgacttaaacatacatgtaacttacataactgttaagaataacagtctgatttaataaatggttcattttaaaagtt

SEQ ID NO: 332370 - DNA, 3184 bp, Homo sapiens
agcgggtctcgcgcggggagggggcggggggaacggcagctcgcggtgttgttcactcgcgcgtcgagcacacggtgggtccggcggcgggttggcgccccaggcggcgttccctgtggcctggcgcctgggccgctgccctgagcgggttccgccccagagcccgaccctcctgggggctctaggcggagtcccgcgagccgagggggaccggcgaccgctgccgaagcatgaagaaggggtaaggcgtgagcccccaagatttcacgagtgttggagaaatcagcatgttaaaacaactgttgatgatagctgttggagtaaagttgcagtggaagctatggctgcaaaatcgttaaaatcttcaaggtgaactggcacaaaggttaatctcaagatgccgctagtgaaaagaaacatcgatcctaggcacttgtgccacacagcactgcctagaggcattaagaatgaactggaatgtgtaaccaatatttccttggcaaatataattagacaactaagtagcctaagtaaatatgctgaagatatatttggagaattattcaatgaagcacatagtttttccttcagagtcaactcattgcaagaacgtgtggaccgtttatctgttagtgttacacagcttgatccaaaggaagaagaattgtctttgcaagatataacaatgaggaaagctttccgaagttctacaattcaagaccagcagcttttcgatcgcaagactttgcctattccattacaggagacgtacgatgtttgtgaacagcctccacctctcaatatactcactccttatagagatgatggtaaagaaggtctgaagttttataccaatccttcgtatttctttgatctatggaaagaaaaaatgttgcaagatacagaggataagaggaaggaaaagaggaagcagaagcagaaaaatctagatcgtcctcatgaaccagaaaaagtgccaagagcacctcatgacaggcggcgagaatggcagaagctggcccaaggtccagagctggctgaagatgatgctaatctcttacataagcatattgaagttgctaatggcccagcctctcattttgaaacaagacctcagacatacgtggatcatatggatggatcttactcactttctgccttgccatttagtcagatgagtgagcttctgactagagctgaggaaagggtattagtcagaccacatgaaccacctccacctccaccaatgcatggagcaggagatgcaaaaccgatacccacctgtatcagttctgctacaggtttgatagaaaatcgccctcagtcaccagctacaggcagaacacctgtgtttgtgagccccactcccccacctcctccaccacctcttccatctgccttgtcaacttcctcattaagagcttcaatgacttcaactcctccccctccagtacctcccccacctccacctccagccactgctttgcaagctccagcagtaccaccacctccagctcctcttcagattgcccctggagttcttcacccagctcctcctccaattgcacctcctctagtacagccctctccaccagtagctagagctgccccagtatgtgagactgtaccagttcatccactcccacaaggtgaagttcaggggctgcctccacccccaccaccgcctcctctgcctccacctggcattcgaccatcatcacctgtcacagttacagctcttgctcatcctccctctgggctacatccaactccatctactgccccaggtccccatgttccattaatgcctccatctcctccatcacaagttatacctgcttctgagccaaagcgccatccatcaaccctacctgtaatcagtgatgccaggagtgtgctactggaagcaatacgaaaaggtattcagctacgcaaagtagaagagcagcgtgaacaggaagctaagcatgaacgcattgaaaacgatgttgccaccatcctgtctcgccgtattgctgttgaatatagtgattcggaagatgattcagaatttgatgaagtagattggttggagtaagaaaaatgcattgataaatattacaaaactgaatgcaaatgtcctttgtggtgcttgttccttgaaaatgtttggtcattctagtgttttgctttcttttccttataataaatgacccttttcctccataacttttgatttctaaggaaaatattagcatacatttcaaactaaatgttttacagtggcttatcttttttttccccctgaaaagactaatttggtcaaataaaccactaagtattaagcatggacagctgttgttagagtagcagattcagttttttgatatatcttaattgtgtactttgtgaattttaatttaaagaaagcaactgaaattgaaatcttgagggcagctgtatctactaatgagccttattccatttcctgatgttttaaaagaagaaacactgccttgattatacgaatacactcagaaagtacatttagcttgtagtgttgaattctcttaaaggaatgcttgaattttttcattattgttttattgtttttatatacttgccttatttgaatgtttagcagtatccccttcccacttatatattgtgtgatatgattttgcttgcctataggagttaaaaacttttccatgtgaaatactctgacttaaacatacatgtaacttacataactgttaagaataacagtctgatttaataaatggttcattttaaaagttaaaaaaaaaaaaacaaaaaaaaaacaaaaacaaacacaaaaagacacacaaacaccacacacacaccccacccccacaacaaccacacaaacgccaaacaacacaacagaccagaaaacaaaagaaaggcagcgggggcaggcaaaaaatcactcgcgggggggcgagcagagaaacccacacccaccactctatgacagcaagcgcgagcccactagggagccatgacacacaagaacgcagccgcgccgtcaaacacacgcacagcggaagaaacgtgaattgggacatacggacagaccaactcgcggcgggggagcaaccgcaccacccaacagaacacgcgccggaaacaacacagcggggcggccacccactcgcgggcaacgacggataaataacgg

SEQ ID NO: 332371 - DNA, 3227 bp, Homo sapiens
agcgggtctcgcgcggggagggggcggggggaacggcagctcgcggtgttgttcactcgcgcgtcgagcacacggtgggtccggcggcgggttggcgccccaggcggcgttccctgtggcctggcgcctgggccgctgccctgagcgggttccgccccagagcccgaccctcctgggggctctaggcggagtcccgcgagccgagggggaccggcgaccgctgccgaagcatgaagaaggggtaaggcgtgagcccccaagatttcacgcatgccccctagcttcggtactctgacaccttctcttgcacttgcggatgatgaactggaataacgatgaaagaaagcacatccgatctcaacattcacgtcctgccctataaccgattaattaattgatccccagctagactgtgaactggcacaaaggttaatctcaagatgccgctagtgaaaagaaacatcgatcctaggcacttgtgccacacagcactgcctagaggcattaagaatgaactggaatgtgtaaccaatatttccttggcaaatataattagacaactaagtagcctaagtaaatatgctgaagatatatttggagaattattcaatgaagcacatagtttttccttcagagtcaactcattgcaagaacgtgtggaccgtttatctgttagtgttacacagcttgatccaaaggaagaagaattgtctttgcaagatataacaatgaggaaagctttccgaagttctacaattcaagaccagcagcttttcgatcgcaagactttgcctattccattacaggagacgtacgatgtttgtgaacagcctccacctctcaatatactcactccttatagagatgatggtaaagaaggtctgaagttttataccaatccttcgtatttctttgatctatggaaagaaaaaatgttgcaagatacagaggataagaggaaggaaaagaggaagcagaagcagaaaaatctagatcgtcctcatgaaccagaaaaagtgccaagagcacctcatgacaggcggcgagaatggcagaagctggcccaaggtccagagctggctgaagatgatgctaatctcttacataagcatattgaagttgctaatggcccagcctctcattttgaaacaagacctcagacatacgtggatcatatggatggatcttactcactttctgccttgccatttagtcagatgagtgagcttctgactagagctgaggaaagggtattagtcagaccacatgaaccacctccacctccaccaatgcatggagcaggagatgcaaaaccgatacccacctgtatcagttctgctacaggtttgatagaaaatcgccctcagtcaccagctacaggcagaacacctgtgtttgtgagccccactcccccacctcctccaccacctcttccatctgccttgtcaacttcctcattaagagcttcaatgacttcaactcctccccctccagtacctcccccacctccacctccagccactgctttgcaagctccagcagtaccaccacctccagctcctcttcagattgcccctggagttcttcacccagctcctcctccaattgcacctcctctagtacagccctctccaccagtagctagagctgccccagtatgtgagactgtaccagttcatccactcccacaaggtgaagttcaggggctgcctccacccccaccaccgcctcctctgcctccacctggcattcgaccatcatcacctgtcacagttacagctcttgctcatcctccctctgggctacatccaactccatctactgccccaggtccccatgttccattaatgcctccatctcctccatcacaagttatacctgcttctgagccaaagcgccatccatcaaccctacctgtaatcagtgatgccaggagtgtgctactggaagcaatacgaaaaggtattcagctacgcaaagtagaagagcagcgtgaacaggaagctaagcatgaacgcattgaaaacgatgttgccaccatcctgtctcgccgtattgctgttgaatatagtgattcggaagatgattcagaatttgatgaagtagattggttggagtaagaaaaatgcattgataaatattacaaaactgaatgcaaatgtcctttgtggtgcttgttccttgaaaatgtttggtcattctagtgttttgctttcttttccttataataaatgacccttttcctccataacttttgatttctaaggaaaatattagcatacatttcaaactaaatgttttacagtggcttatcttttttttccccctgaaaagactaatttggtcaaataaaccactaagtattaagcatggacagctgttgttagagtagcagattcagttttttgatatatcttaattgtgtactttgtgaattttaatttaaagaaagcaactgaaattgaaatcttgagggcagctgtatctactaatgagccttattccatttcctgatgttttaaaagaagaaacactgccttgattatacgaatacactcagaaagtacatttagcttgtagtgttgaattctcttaaaggaatgcttgaattttttcattattgttttattgtttttatatacttgccttatttgaatgtttagcagtatccccttcccacttatatattgtgtgatatgattttgcttgcctataggagttaaaaacttttccatgtgaaatactctgacttaaacatacatgtaacttacataactgttaagaataacagtctgatttaataaatggttcattttaaaagttaaaaaaaaaaaaacaaaaaaaaaacaaaaacaaacacaaaaagacacacaaacaccacacacacaccccacccccacaacaaccacacaaacgccaaacaacacaacagaccagaaaacaaaagaaaggcagcgggggcaggcaaaaaatcactcgcgggggggcgagcagagaaacccacacccaccactctatgacagcaagcgcgagcccactagggagccatgacacacaagaacgcagccgcgccgtcaaacacacgcacagcggaagaaacgtgaattgggacatacggacagaccaactcgcggcgggggagcaaccgcaccacccaacagaacacgcgccggaaacaacacagcggggcggccacccactcgcgggcaacgacggataaataacgg

SEQ ID NO: 332372 - DNA, 2923 bp, Homo sapiens
agcgggtctcgcgcggggagggggcggggggaacggcagctcgcggtgttgttcactcgcgcgtcgagcacacggtgggtccggcggcgggttggcgccccaggcggcgttccctgtggcctggcgcctgggccgctgccctgagcgggttccgccccagagcccgaccctcctgggggctctaggcggagtcccgcgagccgagggggaccggcgaccgctgccgaagcatgaagaaggggtaaggcgtgagcccccaagatttcacggtaaatatgctgaagatatatttggagaattattcaatgaagcacatagtttttccttcagagtcaactcattgcaagaacgtgtggaccgtttatctgttagtgttacacagcttgatccaaaggaagaagaattgtctttgcaagatataacaatgaggaaagctttccgaagttctacaattcaagaccagcagcttttcgatcgcaagactttgcctattccattacaggagacgtacgatgtttgtgaacagcctccacctctcaatatactcactccttatagagatgatggtaaagaaggtctgaagttttataccaatccttcgtatttctttgatctatggaaagaaaaaatgttgcaagatacagaggataagaggaaggaaaagaggaagcagaagcagaaaaatctagatcgtcctcatgaaccagaaaaagtgccaagagcacctcatgacaggcggcgagaatggcagaagctggcccaaggtccagagctggctgaagatgatgctaatctcttacataagcatattgaagttgctaatggcccagcctctcattttgaaacaagacctcagacatacgtggatcatatggatggatcttactcactttctgccttgccatttagtcagatgagtgagcttctgactagagctgaggaaagggtattagtcagaccacatgaaccacctccacctccaccaatgcatggagcaggagatgcaaaaccgatacccacctgtatcagttctgctacaggtttgatagaaaatcgccctcagtcaccagctacaggcagaacacctgtgtttgtgagccccactcccccacctcctccaccacctcttccatctgccttgtcaacttcctcattaagagcttcaatgacttcaactcctccccctccagtacctcccccacctccacctccagccactgctttgcaagctccagcagtaccaccacctccagctcctcttcagattgcccctggagttcttcacccagctcctcctccaattgcacctcctctagtacagccctctccaccagtagctagagctgccccagtatgtgagactgtaccagttcatccactcccacaaggtgaagttcaggggctgcctccacccccaccaccgcctcctctgcctccacctggcattcgaccatcatcacctgtcacagttacagctcttgctcatcctccctctgggctacatccaactccatctactgccccaggtccccatgttccattaatgcctccatctcctccatcacaagttatacctgcttctgagccaaagcgccatccatcaaccctacctgtaatcagtgatgccaggagtgtgctactggaagcaatacgaaaaggtattcagctacgcaaagtagaagagcagcgtgaacaggaagctaagcatgaacgcattgaaaacgatgttgccaccatcctgtctcgccgtattgctgttgaatatagtgattcggaagatgattcagaatttgatgaagtagattggttggagtaagaaaaatgcattgataaatattacaaaactgaatgcaaatgtcctttgtggtgcttgttccttgaaaatgtttggtcattctagtgttttgctttcttttccttataataaatgacccttttcctccataacttttgatttctaaggaaaatattagcatacatttcaaactaaatgttttacagtggcttatcttttttttccccctgaaaagactaatttggtcaaataaaccactaagtattaagcatggacagctgttgttagagtagcagattcagttttttgatatatcttaattgtgtactttgtgaattttaatttaaagaaagcaactgaaattgaaatcttgagggcagctgtatctactaatgagccttattccatttcctgatgttttaaaagaagaaacactgccttgattatacgaatacactcagaaagtacatttagcttgtagtgttgaattctcttaaaggaatgcttgaattttttcattattgttttattgtttttatatacttgccttatttgaatgtttagcagtatccccttcccacttatatattgtgtgatatgattttgcttgcctataggagttaaaaacttttccatgtgaaatactctgacttaaacatacatgtaacttacataactgttaagaataacagtctgatttaataaatggttcattttaaaagttaaaaaaaaaaaaacaaaaaaaaaacaaaaacaaacacaaaaagacacacaaacaccacacacacaccccacccccacaacaaccacacaaacgccaaacaacacaacagaccagaaaacaaaagaaaggcagcgggggcaggcaaaaaatcactcgcgggggggcgagcagagaaacccacacccaccactctatgacagcaagcgcgagcccactagggagccatgacacacaagaacgcagccgcgccgtcaaacacacgcacagcggaagaaacgtgaattgggacatacggacagaccaactcgcggcgggggagcaaccgcaccacccaacagaacacgcgccggaaacaacacagcggggcggccacccactcgcgggcaacgacggataaataacgg

SEQ ID NO: 332373 - DNA, 1994 bp, Homo sapiens
atcacatttgaccattttattttcatgctttgtaggtatccttaaaatgtttattgagtgaatgagaaatttaatatatcagacttaaatgttatagaacatttaattaaaaccctttatattatgcttaatgtgtatattaactcctttaaaaatggtattttcttcaatgttaaggctgttcattttgggtatccatgacacttgctctaccagatgcctttagaggagtgagtttcctcccttagtaacaaaggaaagacttctcatattcattcatttattgtcattatttcctaagcaatgactataggccaggcactgagcatatagaatgaataatagtgcctttccctcaaatacaatggataatgaagccacagaaaatatattcaacaatgtttaatttatttgaccattgaggtgatagaagaaatgtaccacctcattaattttttagggggtggtgagcagggaggtatagtagaccatgatggataaataaactgtagatacctactgggatatctggtaagttttaccaactaataacacagataacataaagatttaatgcctctctcagtatgatttcttcacattcttttctgatctttttattttcctataagtatttctcatgtgtatttgattttattccagaaatattaataatatctagtatctagtattttgatttaaatgaatggtttggattcactgtatcaggtattcagctacgcaaagtagaagagcagcgtgaacaggaagctaagcatgaacgcattgaaaacgatgttgccaccatcctgtctcgccgtattgctgttgaatatagtgattcggaagatgattcagaatttgatgaagtagattggttggagtaagaaaaatgcattgataaatattacaaaactgaatgcaaatgtcctttgtggtgcttgttccttgaaaatgtttggtcattctagtgttttgctttcttttccttataataaatgacccttttcctccataacttttgatttctaaggaaaatattagcatacatttcaaactaaatgttttacagtggcttatcttttttttccccctgaaaagactaatttggtcaaataaaccactaagtattaagcatggacagctgttgttagagtagcagattcagttttttgatatatcttaattgtgtactttgtgaattttaatttaaagaaagcaactgaaattgaaatcttgagggcagctgtatctactaatgagccttattccatttcctgatgttttaaaagaagaaacactgccttgattatacgaatacactcagaaagtacatttagcttgtagtgttgaattctcttaaaggaatgcttgaattttttcattattgttttattgtttttatatacttgccttatttgaatgtttagcagtatccccttcccacttatatattgtgtgatatgattttgcttgcctataggagttaaaaacttttccatgtgaaatactctgacttaaacatacatgtaacttacataactgttaagaataacagtctgatttaataaatggttcattttaaaagttaaaaaaaaaaaaacaaaaaaaaaacaaaaacaaacacaaaaagacacacaaacaccacacacacaccccacccccacaacaaccacacaaacgccaaacaacacaacagaccagaaaacaaaagaaaggcagcgggggcaggcaaaaaatcactcgcgggggggcgagcagagaaacccacacccaccactctatgacagcaagcgcgagcccactagggagccatgacacacaagaacgcagccgcgccgtcaaacacacgcacagcggaagaaacgtgaattgggacatacggacagaccaactcgcggcgggggagcaaccgcaccacccaacagaacacgcgccggaaacaacacagcggggcggccacccactcgcgggcaacgacggataaataacgg

SEQ ID NO: 332374 - DNA, 297 bp, Homo sapiens
aacttacataactgttaagaataacagtctgatttaataaatggttcattttaaaagttcatcagtgttgctctttgaataaaatgatttatcataatttatcaaatactgtatggtaggctttaaatagtgaatgaaaatttgaaaaacacttaggctacataatttcctcttaattgcacagcttcatattgtctactgtgtaaggtagcttttatgtcattttccccctaagttcataaactctgtatttctcaactgcttgtggttttaaattaaaacctcaacttgtcatct

SEQ ID NO: 332375 - DNA, 3084 bp, Homo sapiens
agcgggtctcgcgcggggagggggcggggggaacggcagctcgcggtgttgttcactcgcgcgtcgagcacacggtgggtccggcggcgggttggcgccccaggcggcgttccctgtggcctggcgcctgggccgctgccctgagcgggttccgccccagagcccgaccctcctgggggctctaggcggagtcccgcgagccgagggggaccggcgaccgctgccgaagcatgaagaaggggtaaggcgtgagcccccaagatttcacggtgaactggcacaaaggttaatctcaagatgccgctagtgaaaagaaacatcgatcctaggcacttgtgccacacagcactgcctagaggcattaagaatgaactggaatgtgtaaccaatatttccttggcaaatataattagacaactaagtagcctaagtaaatatgctgaagatatatttggagaattattcaatgaagcacatagtttttccttcagagtcaactcattgcaagaacgtgtggaccgtttatctgttagtgttacacagcttgatccaaaggaagaagaattgtctttgcaagatataacaatgaggaaagctttccgaagttctacaattcaagaccagcagcttttcgatcgcaagactttgcctattccattacaggagacgtacgatgtttgtgaacagcctccacctctcaatatactcactccttatagagatgatggtaaagaaggtctgaagttttataccaatccttcgtatttctttgatctatggaaagaaaaaatgttgcaagatacagaggataagaggaaggaaaagaggaagcagaagcagaaaaatctagatcgtcctcatgaaccagaaaaagtgccaagagcacctcatgacaggcggcgagaatggcagaagctggcccaaggtccagagctggctgaagatgatgctaatctcttacataagcatattgaagttgctaatggcccagcctctcattttgaaacaagacctcagacatacgtggatcatatggatggatcttactcactttctgccttgccatttagtcagatgagtgagcttctgactagagctgaggaaagggtattagtcagaccacatgaaccacctccacctccaccaatgcatggagcaggagatgcaaaaccgatacccacctgtatcagttctgctacaggtttgatagaaaatcgccctcagtcaccagctacaggcagaacacctgtgtttgtgagccccactcccccacctcctccaccacctcttccatctgccttgtcaacttcctcattaagagcttcaatgacttcaactcctccccctccagtacctcccccacctccacctccagccactgctttgcaagctccagcagtaccaccacctccagctcctcttcagattgcccctggagttcttcacccagctcctcctccaattgcacctcctctagtacagccctctccaccagtagctagagctgccccagtatgtgagactgtaccagttcatccactcccacaaggtgaagttcaggggctgcctccacccccaccaccgcctcctctgcctccacctggcattcgaccatcatcacctgtcacagttacagctcttgctcatcctccctctgggctacatccaactccatctactgccccaggtccccatgttccattaatgcctccatctcctccatcacaagttatacctgcttctgagccaaagcgccatccatcaaccctacctgtaatcagtgatgccaggagtgtgctactggaagcaatacgaaaaggtattcagctacgcaaagtagaagagcagcgtgaacaggaagctaagcatgaacgcattgaaaacgatgttgccaccatcctgtctcgccgtattgctgttgaatatagtgattcggaagatgattcagaatttgatgaagtagattggttggagtaagaaaaatgcattgataaatattacaaaactgaatgcaaatgtcctttgtggtgcttgttccttgaaaatgtttggtcattctagtgttttgctttcttttccttataataaatgacccttttcctccataacttttgatttctaaggaaaatattagcatacatttcaaactaaatgttttacagtggcttatcttttttttccccctgaaaagactaatttggtcaaataaaccactaagtattaagcatggacagctgttgttagagtagcagattcagttttttgatatatcttaattgtgtactttgtgaattttaatttaaagaaagcaactgaaattgaaatcttgagggcagctgtatctactaatgagccttattccatttcctgatgttttaaaagaagaaacactgccttgattatacgaatacactcagaaagtacatttagcttgtagtgttgaattctcttaaaggaatgcttgaattttttcattattgttttattgtttttatatacttgccttatttgaatgtttagcagtatccccttcccacttatatattgtgtgatatgattttgcttgcctataggagttaaaaacttttccatgtgaaatactctgacttaaacatacatgtaacttacataactgttaagaataacagtctgatttaataaatggttcattttaaaagttaaaaaaaaaaaaacaaaaaaaaaacaaaaacaaacacaaaaagacacacaaacaccacacacacaccccacccccacaacaaccacacaaacgccaaacaacacaacagaccagaaaacaaaagaaaggcagcgggggcaggcaaaaaatcactcgcgggggggcgagcagagaaacccacacccaccactctatgacagcaagcgcgagcccactagggagccatgacacacaagaacgcagccgcgccgtcaaacacacgcacagcggaagaaacgtgaattgggacatacggacagaccaactcgcggcgggggagcaaccgcaccacccaacagaacacgcgccggaaacaacacagcggggcggccacccactcgcgggcaacgacggataaataacgg

SEQ ID NO: 332376 - DNA, 3124 bp, Homo sapiens
agcggagtgttctcttcgtccccctcccccaaactgaggattgggcaataccacagaacctcaggaaaggggggaagagcgagcttcggccccactaatgggggagtgggcggaggctggatttcccacctcggctgcacctgggcactggaggctgaagaggaaacatgccccctagcttcggtactctgacaccttctcttgcacttgcggatgatgaactggaataacgatgaaagaaagcacatccgatctcaacattcacgtcctgccctataaccgattaattaattgatccccagctagactgtgaactggcacaaaggttaatctcaagatgccgctagtgaaaagaaacatcgatcctaggcacttgtgccacacagcactgcctagaggcattaagaatgaactggaatgtgtaaccaatatttccttggcaaatataattagacaactaagtagcctaagtaaatatgctgaagatatatttggagaattattcaatgaagcacatagtttttccttcagagtcaactcattgcaagaacgtgtggaccgtttatctgttagtgttacacagcttgatccaaaggaagaagaattgtctttgcaagatataacaatgaggaaagctttccgaagttctacaattcaagaccagcagcttttcgatcgcaagactttgcctattccattacaggagacgtacgatgtttgtgaacagcctccacctctcaatatactcactccttatagagatgatggtaaagaaggtctgaagttttataccaatccttcgtatttctttgatctatggaaagaaaaaatgttgcaagatacagaggataagaggaaggaaaagaggaagcagaagcagaaaaatctagatcgtcctcatgaaccagaaaaagtgccaagagcacctcatgacaggcggcgagaatggcagaagctggcccaaggtccagagctggctgaagatgatgctaatctcttacataagcatattgaagttgctaatggcccagcctctcattttgaaacaagacctcagacatacgtggatcatatggatggatcttactcactttctgccttgccatttagtcagatgagtgagcttctgactagagctgaggaaagggtattagtcagaccacatgaaccacctccacctccaccaatgcatggagcaggagatgcaaaaccgatacccacctgtatcagttctgctacaggtttgatagaaaatcgccctcagtcaccagctacaggcagaacacctgtgtttgtgagccccactcccccacctcctccaccacctcttccatctgccttgtcaacttcctcattaagagcttcaatgacttcaactcctccccctccagtacctcccccacctccacctccagccactgctttgcaagctccagcagtaccaccacctccagctcctcttcagattgcccctggagttcttcacccagctcctcctccaattgcacctcctctagtacagccctctccaccagtagctagagctgccccagtatgtgagactgtaccagttcatccactcccacaaggtgaagttcaggggctgcctccacccccaccaccgcctcctctgcctccacctggcattcgaccatcatcacctgtcacagttacagctcttgctcatcctccctctgggctacatccaactccatctactgccccaggtccccatgttccattaatgcctccatctcctccatcacaagttatacctgcttctgagccaaagcgccatccatcaaccctacctgtaatcagtgatgccaggagtgtgctactggaagcaatacgaaaaggtattcagctacgcaaagtagaagagcagcgtgaacaggaagctaagcatgaacgcattgaaaacgatgttgccaccatcctgtctcgccgtattgctgttgaatatagtgattcggaagatgattcagaatttgatgaagtagattggttggagtaagaaaaatgcattgataaatattacaaaactgaatgcaaatgtcctttgtggtgcttgttccttgaaaatgtttggtcattctagtgttttgctttcttttccttataataaatgacccttttcctccataacttttgatttctaaggaaaatattagcatacatttcaaactaaatgttttacagtggcttatcttttttttccccctgaaaagactaatttggtcaaataaaccactaagtattaagcatggacagctgttgttagagtagcagattcagttttttgatatatcttaattgtgtactttgtgaattttaatttaaagaaagcaactgaaattgaaatcttgagggcagctgtatctactaatgagccttattccatttcctgatgttttaaaagaagaaacactgccttgattatacgaatacactcagaaagtacatttagcttgtagtgttgaattctcttaaaggaatgcttgaattttttcattattgttttattgtttttatatacttgccttatttgaatgtttagcagtatccccttcccacttatatattgtgtgatatgattttgcttgcctataggagttaaaaacttttccatgtgaaatactctgacttaaacatacatgtaacttacataactgttaagaataacagtctgatttaataaatggttcattttaaaagttaaaaaaaaaaaaacaaaaaaaaaacaaaaacaaacacaaaaagacacacaaacaccacacacacaccccacccccacaacaaccacacaaacgccaaacaacacaacagaccagaaaacaaaagaaaggcagcgggggcaggcaaaaaatcactcgcgggggggcgagcagagaaacccacacccaccactctatgacagcaagcgcgagcccactagggagccatgacacacaagaacgcagccgcgccgtcaaacacacgcacagcggaagaaacgtgaattgggacatacggacagaccaactcgcggcgggggagcaaccgcaccacccaacagaacacgcgccggaaacaacacagcggggcggccacccactcgcgggcaacgacggataaataacgg

SEQ ID NO: 332377 - DNA, 3264 bp, Homo sapiens
agcggagtgttctcttcgtccccctcccccaaactgaggattgggcaataccacagaacctcaggaaaggggggaagagcgagcttcggccccactaatgggggagtgggcggaggctggatttcccacctcggctgcacctgggcactggaggctgaagaggaaacatgccccctagcttcggtactctgacaccttctcttgcacttgcggatgatgaactggaataacgatgaaagaaagcacatccgatctcaacattcacgtcctgccctataaccgattaattaattgatccccagctagactaggtgttacaatccaaaatacatagttgtgatcatttataagtgttggagaaatcagcatgttaaaacaactgttgatgatagctgttggagtaaagttgcagtggaagctatggctgcaaaatcgttaaaatcttcaaggtgaactggcacaaaggttaatctcaagatgccgctagtgaaaagaaacatcgatcctaggcacttgtgccacacagcactgcctagaggcattaagaatgaactggaatgtgtaaccaatatttccttggcaaatataattagacaactaagtagcctaagtaaatatgctgaagatatatttggagaattattcaatgaagcacatagtttttccttcagagtcaactcattgcaagaacgtgtggaccgtttatctgttagtgttacacagcttgatccaaaggaagaagaattgtctttgcaagatataacaatgaggaaagctttccgaagttctacaattcaagaccagcagcttttcgatcgcaagactttgcctattccattacaggagacgtacgatgtttgtgaacagcctccacctctcaatatactcactccttatagagatgatggtaaagaaggtctgaagttttataccaatccttcgtatttctttgatctatggaaagaaaaaatgttgcaagatacagaggataagaggaaggaaaagaggaagcagaagcagaaaaatctagatcgtcctcatgaaccagaaaaagtgccaagagcacctcatgacaggcggcgagaatggcagaagctggcccaaggtccagagctggctgaagatgatgctaatctcttacataagcatattgaagttgctaatggcccagcctctcattttgaaacaagacctcagacatacgtggatcatatggatggatcttactcactttctgccttgccatttagtcagatgagtgagcttctgactagagctgaggaaagggtattagtcagaccacatgaaccacctccacctccaccaatgcatggagcaggagatgcaaaaccgatacccacctgtatcagttctgctacaggtttgatagaaaatcgccctcagtcaccagctacaggcagaacacctgtgtttgtgagccccactcccccacctcctccaccacctcttccatctgccttgtcaacttcctcattaagagcttcaatgacttcaactcctccccctccagtacctcccccacctccacctccagccactgctttgcaagctccagcagtaccaccacctccagctcctcttcagattgcccctggagttcttcacccagctcctcctccaattgcacctcctctagtacagccctctccaccagtagctagagctgccccagtatgtgagactgtaccagttcatccactcccacaaggtgaagttcaggggctgcctccacccccaccaccgcctcctctgcctccacctggcattcgaccatcatcacctgtcacagttacagctcttgctcatcctccctctgggctacatccaactccatctactgccccaggtccccatgttccattaatgcctccatctcctccatcacaagttatacctgcttctgagccaaagcgccatccatcaaccctacctgtaatcagtgatgccaggagtgtgctactggaagcaatacgaaaaggtattcagctacgcaaagtagaagagcagcgtgaacaggaagctaagcatgaacgcattgaaaacgatgttgccaccatcctgtctcgccgtattgctgttgaatatagtgattcggaagatgattcagaatttgatgaagtagattggttggagtaagaaaaatgcattgataaatattacaaaactgaatgcaaatgtcctttgtggtgcttgttccttgaaaatgtttggtcattctagtgttttgctttcttttccttataataaatgacccttttcctccataacttttgatttctaaggaaaatattagcatacatttcaaactaaatgttttacagtggcttatcttttttttccccctgaaaagactaatttggtcaaataaaccactaagtattaagcatggacagctgttgttagagtagcagattcagttttttgatatatcttaattgtgtactttgtgaattttaatttaaagaaagcaactgaaattgaaatcttgagggcagctgtatctactaatgagccttattccatttcctgatgttttaaaagaagaaacactgccttgattatacgaatacactcagaaagtacatttagcttgtagtgttgaattctcttaaaggaatgcttgaattttttcattattgttttattgtttttatatacttgccttatttgaatgtttagcagtatccccttcccacttatatattgtgtgatatgattttgcttgcctataggagttaaaaacttttccatgtgaaatactctgacttaaacatacatgtaacttacataactgttaagaataacagtctgatttaataaatggttcattttaaaagttaaaaaaaaaaaaacaaaaaaaaaacaaaaacaaacacaaaaagacacacaaacaccacacacacaccccacccccacaacaaccacacaaacgccaaacaacacaacagaccagaaaacaaaagaaaggcagcgggggcaggcaaaaaatcactcgcgggggggcgagcagagaaacccacacccaccactctatgacagcaagcgcgagcccactagggagccatgacacacaagaacgcagccgcgccgtcaaacacacgcacagcggaagaaacgtgaattgggacatacggacagaccaactcgcggcgggggagcaaccgcaccacccaacagaacacgcgccggaaacaacacagcggggcggccacccactcgcgggcaacgacggataaataacgg

SEQ ID NO: 332378 - DNA, 1956 bp, Homo sapiens
agcgggtctcgcgcggggagggggcggggggaacggcagctcgcggtgttgttcactcgcgcgtcgagcacacggtgggtccggcggcgggttggcgccccaggcggcgttccctgtggcctggcgcctgggccgctgccctgagcgggttccgccccagagcccgaccctcctgggggctctaggcggagtcccgcgagccgagggggaccggcgaccgctgccgaagcatgaagaaggggtaaggcgtgagcccccaagatttcacggtgaactggcacaaaggttaatctcaagatgccgctagtgaaaagaaacatcgatcctaggcacttgtgccacacagcactgcctagaggcattaagaatgaactggaatgtgtaaccaatatttccttggcaaatataattagacaactaagtagcctaagtaaatatgctgaagatatatttggagaattattcaatgaagcacatagtttttccttcagagtcaactcattgcaagaacgtgtggaccgtttatctgttagtgttacacagcttgatccaaaggaagaagaattgtctttgcaagatataacaatgaggaaagctttccgaagttctacaattcaagaccagcagcttttcgatcgcaagactttgcctattccattacaggagacgtacgatgtttgtgaacagcctccacctctcaatatactcactccttatagagatgatggtaaagaaggtctgaagttttataccaatccttcgtatttctttgatctatggaaagaaaaaatgttgcaagatacagaggataagaggaaggaaaagaggaagcagaagcagaaaaatctagatcgtcctcatgaaccagaaaaagtgccaagagcacctcatgacaggcggcgagaatggcagaagctggcccaaggtccagagctggctgaagatgatgctaatctcttacataagcatattgaagttgctaatggcccagcctctcattttgaaacaagacctcagacatacgtggatcatatggatggatcttactcactttctgccttgccatttagtcagatgagtgagcttctgactagagctgaggaaagggtattagtcagaccacatgaaccacctccacctccaccaatgcatggagcaggagatgcaaaaccgatacccacctgtatcagttctgctacaggtttgatagaaaatcgccctcagtcaccagctacaggcagaacacctgtgtttgtgagccccactcccccacctcctccaccacctcttccatctgccttgtcaacttcctcattaagagcttcaatgacttcaactcctccccctccagtacctcccccacctccacctccagccactgctttgcaagctccagcagtaccaccacctccagctcctcttcagattgcccctggagttcttcacccagctcctcctccaattgcacctcctctagtacagccctctccaccagtagctagagctgccccagtatgtgagactgtaccagttcatccactcccacaaggtgaagttcaggggctgcctccacccccaccaccgcctcctctgcctccacctggcattcgaccatcatcacctgtcacagttacagctcttgctcatcctccctctgggctacatccaactccatctactgccccaggtccccatgttccattaatgcctccatctcctccatcacaagttatacctgcttctgagccaaagcgccatccatcaaccctacctgtaatcagtgatgccaggagtgtgctactggaagcaatacgaaaaggtaattttctcagctccatgaaaagcattgctatagtagcattggaaactttctaaatatttaagacaaaaatgtgttccttatctataaaattttaggtgatcatgtttgtgtacaaatggcctttagaaagtaaa

SEQ ID NO: 332379 - DNA, 268 bp, Homo sapiens
ctgaaaatgggataacccatcaaagtactccaaagttggagccaagaaatgccgggctattgtattagtcttctcaagctgtcataataaaactacacagactggttggcttaaacaaaaattaattttcttacagttgtggagtcttaaaaaccaagatcgaggtaccagcaaagttcctttctcctgaggcctctcctcttggcttgtagatgggcatcttctcactgtgtcttcacatggtcgtcgacgcggccgcgaatttagt

SEQ ID NO: 332380 - DNA, 309 bp, Homo sapiens
actagtatcggagtttgtgtgcaaaacagcacataagtcaaataatcaggtgcagatgcatgttgttggtttggtgctttgggcactgtgcctggaacagtaatagtccattcccagttacctaggcacaactgggcacagaggctaacagaatgcagaaaccttcagatgattacaaacctaagcttggattacaccgtgcaacaacaacaaataaaacagtagacatatctccctgatctaattattattatgaaacaatgatcatctctgagatagttagttgaagggagataggcaagcgagtgt

SEQ ID NO: 332381 - DNA, 95 bp, Homo sapiens
acaggtggggttgaccttagttatttgtctgtaaaatgagagggttggacatgacagatgattttcagactctgatcccatcagaggatgctggg

SEQ ID NO: 332382 - DNA, 2583 bp, Homo sapiens
ctggcatcatgtggctgtgtagagctccagtgtgatttcaagccccctctaaaaactgccttagtctgcatgaagtagttaactctccaaagtgctttttgtctggcaaatcccttcacaattttcacctctcgtctaaaagcttccttaaaggaagccttccttgatcccttaggctaggttaggtttccagtctgtgttctcatagcactctgcactttttggttccttaaagcaactctgtgttattttttagaattttaatctgaatctcgtgtgtcacatacctaggtcagaaaatactggaacaatgaagttaagatttagtaattcaaattatgtaaaatgctcatatatatgtttttagattagcagctttatgatgccgatgctgaaggaacttttcaccccattcttacaagtctgctactgttttaagtgacatccttatagttgtagataagcaaatgtaaggttatatcaatgtgaagaagcccttagtatcacattttaaaatttatcatttagcaatatgacttttaaatttattgtttccgaatgagtgttgttgaggaatgttagcagtagtaaaatcttgtgttacaagatttttgcatttacatgaactttcactcatttttcagaatttgttcctagagacagagaacccaatacaaaagtgagaacatgtatgcataatcagaaggatgcagtgcagatgcctagtgaaactctgaaagcaaaaatggtacctgagaaagttccccgcagatgtgctactgttgctgcaaataaaataaagataatgagtaatctaaaagaaacgatctcaggaccagaaaatgtctggattaggaagagtagcagaaaactgccccatcgaaatgcttctgctgcggctaagaaaaaattactgaatgtttataaagaggatgatacaaccataaattctgaaagtgaaaaagagctagaagatattaatagaaaaatgctttttttaagggggttcagatcctggaaagaaaatgcacaatagtgactatgagaatgtagaagtggcatctgaaaacaattggtacacaagtaaactggcagttacattctgctcccagctctaaaattactcccttattggcatctttggaggaattttctaaaagccataatccagtgggttcctcccagtcagctcttgtacagacatgtgctctggggaattctgaggaggaaataaattgcagagtctgtaggtggagaggtggaaagaaaagacaaatggcctgctataagactactattcctttccagaatgcaaggccttgaagacatgattccttagaggaagaatataatgggaagtgtacaggctaggaagaacttgaagtgaacaaatttcaaaatcttaacctgatgctaattttcagggttctccattacagtgtaaaaattcagaccacgacaactatggtgtcatgaggaaaaaaaatcaggcatttttccaaaggaagtgctaatgggcctatttgacttctgagtgaagcaaaaactacccagatccattccctacaattcacatccccaaaggtcaaaaacaaactaggaggacctgggaatttcagctggagatactgattattgagttctgaagtagagtgttggaaataggcaattagagaaagtccattgatgtcattttgtttataatattgcagttcatactgaatgaccacttgatatgactaattcagggaatatatatttttctatgaaagctatgaatgttactatcacggcttttccttatttttacttgtatgtagcagcatttacagaaatgccaaaaatgtgcctcattaagaggcaggtcttaatcagttagataaaaataaaatgtatagcttaagatcaaaacagtcatatttttagatacagtgaaatcttttatgtttctctacagcaccttaaaaattagaacttgaatactttgagtaaacttactacaatctcatcccaacaaactttaatggtagcatgtttggcctatttcattgtggcctgtactaggattagaaaatttggtcgtggtataacaaagaagtgtatttacaataggatttaatttgttgttaatatgtatttgttgaaattaaaattgccagattaaatgaatatactgtcgcatctttttaacatagtaacgtgttactggaaaaattaagttgttgaaagtaagttgttttcccatttaaaaatatctgaatatatgatttgcatgtgtaaatctgaaaaactaaactacagaaacctagggttttctatttcttttttaagtcaaatgcatttttttttttgttatacagatgaaccaagtgtctaaaatacttgagaaatttgtggttgcatgtctgttttaaaaaaaaggctttttgttttttagcataagccagaatattctaacctactaagtctgtgtcctttgctccttttgtagtatactttcatctaaattactgatccccaatatgttgatacacaggtgagaaagggaagaattcctaataaactgctattacttttaggtgc

SEQ ID NO: 332383 - DNA, 656 bp, Homo sapiens
gcacatacatagttaaattacttacaaatctatttaaaaacctgttggaaacatattttattactttctttcctacttgataacatttctgctgtaaccaaaccttaagatcctgtgggaatggcttgtttgtcaatgggcaaaatttgtatgttgctgattggtgtgtaaaatgttaaatgcaacaacctagagtttcagaaaggcagcttggcaatatatatattatcactcttaaaaatgtttatgtatccaagacagattttcagaggaagaaatgcaagttttcaaaagaagaaataaaaactggaagaagggtttaacctcatggataataaaataaggaaataataatttttccttttcaatacttagccaattttgtgatttcgtttgtttttagctcaagaaagaattccacattttagcaagtggcaaagatgttggtttgttaacagttattcagattgctggtggggtgtgtgaagtggtccaggctttctaggggatattttgttaatagtagttgaaactgaaaaatatttggaacttttaattctgtgattttactcttctggtaatttggaaaacaagcagaaatgcttgtaaatatatgagtattgtagttcactcactgttgacagaaacaaagctgg

SEQ ID NO: 332384 - DNA, 873 bp, Homo sapiens
gcgctgcttgcctgtttttgtattgtgcttttggcttttttatctgtatcatatggtattttgtagattaaaaaaatgttaatgaatgttagcagagaaatgcctcagacttgatcatttctctcctaggtgacagattccgctctattattgatgatgcttggtggtttggaacagtgttaagtcaagagccatatcaaccacagtatcctgatagtcatttccagtgttatattgttaggtgggataatactgaaattgaaaaacttagcccatgggacatggaaccaattcctgataatgttgatccacctgaagaattaggagctagtatttctgtcacaacagatgagctagagaaattgctctataaaccacaagctggtgaatggggtcagaaatcaagagatgaagaatgtgatagaattatcagtggtatagatcaacttttgaatcttgatatagcagcagcttttgcaggccctgttgatttgtgtacatacccgaagtactgtactgtagtagcttatccaaccgatctttacacaattcgaatgagacttgttaatcgattttacaggttagtagaaacctgctttcaaaatgtttaaaaagctatatttggcaatattgactagggtaaacaaagaaagagatagtggtagaattgggggctgattagcattttctgtttcattattctctttcattgtcagatggtgttagatgcctatgggtaggtgtgggtagggccaggcagaaaattgactaccatatttcaccctcgtttttttttcagtgattatttccatatcactgaaattttacttttattccacttatttcagtaaactttcactggtactttagtaa

SEQ ID NO: 332385 - DNA, 539 bp, Homo sapiens
atgcggcttagccagaaattgatctgcttgttttggcagtttgtttttacaaatcagcatattcaaagcctgctaaatattagacagctacatgtatatacgtacatacatgaaattctctgtatgactgatttatatgagggagacatttttaagttacctgttgagcattttatgtgcctgtgtgtttaaactggtaaaagtatggcaattgtaaaaactttttcactacttgaatttattgaaatattctataacaaattgaaatatttgataaatagaaatataaaaatagtaataaaataaaatgacattattaatattcaatattaaccaaatattacaatatttgattactccaatttcagtaaccttgggctgggtgtggtggctctgaactcctaacactttgggaggctgagacaggaggattgcttgagcccaggaattcaagtccagcctgggcaatgtagtgagacactctcttaaaaaaaaaaatcccaagatggttgaaatagagatcaaacatcattaggttt

SEQ ID NO: 332386 - DNA, 9481 bp, Homo sapiens
ggtccaggcggcgcgcacggtatggcggcggcggcggcggcggcggcggcgcgcgcctgagaagaggggacgccagcccggtcaggcctcggcgcggcctacacgctccgctcgctcgctcgctcccgcctcccgccccgcgcccggccatggcggagccgtcgtccgcccgacgcccggtgcctctcatcgagtcggagctgtacttccttatcgcccggtacctatcggcgggcccgtgtcggagagcggcccaggtgctggtgcaggagctggagcagtaccagttgttgccgaagagattggactgggagggcaacgagcacaacaggagctacgaggagttggtcttgtccaataagcatgtggctcctgatcatcttttgcaaatctgccagcgcatcggtcctatgttggataaagaaattccacccagtatttcaagagtcacttctttacttggtgcaggaaggcagtctttgctacgtacagcaaaagactgcaggcacacagtttggaagggctctgcctttgctgctcttcatagaggaagacctcctgaaatgccagtgaattatggttccccaccaaatcttgtggagatacatcgaggaaaacaactcacagggtgttccacttttagtacagcatttccaggaactatgtatcagcatataaaaatgcacagaaggattctcggacatctatctgctgtttactgtgtagcatttgataggacaggacatagaatctttacaggttcagatgactgtttggtaaagatttggtcaacacataatggccgcttgttatctacattaagaggtcattctgcagaaatttcagatatggcagtaaactatgagaatacaatgattgctgcggggagctgtgataaaattattagagtgtggtgcttgagaacttgtgccccagttgctgtgctccaaggacacacaggatcaattacatctttacagtttagcccgatggccaaaggctctcaaagatacatggtttccactggtgctgatgggacagtttgcttttggcaatgggatttagaatccttaaaatttagcccacgtcccctgaagttcactgaaaagcctaggccaggcgttcaaatgctttgttcttcttttagtgttggtggtatgtttttagccacaggtagtactgatcatgtaatcagaatgtattttttgggttttgaagcacccgaaaaaatcgcagaacttgaaagccacactgataaagtagatagtatccaattttgtaacaatggtgatcggttcctaagtggtagcagagatggaacagcacggatttggagatttgagcagttagaatggaggagcattttattggatatggctaccagaatctcaggggacttatcttccgaagaggaaaggtttatgaaacctaaagtaacaatgatagcttggaatcaaaatgatagcattgttgtcacagctgtgaatgatcatgtcctcaaagtgtggaattcttacactggacaactgcttcataacttaatgggacatgctgatgaagtatttgttctggagacacatccctttgattccagaattatgttatctgcaggacatgatggcagcatatttatatgggatattacaaaaggtaccaagatgaaacattattttaatatgattgaaggacaaggacatggagctgtgtttgactgtaagttttcacaggatggacagcattttgcctgtacagattctcatgggcaccttctgatatttggttttggatgcagcaaaccatatgaaaagattcctgatcagatgttcttccatactgactatcgaccacttattagagattctaataattatgtcttagatgagcaaactcagcaggctcctcatcttatgcctccaccattcttggtagatgtagatggaaatcctcatccaaccaagtatcagagattagtaccaggccgagaaaattctgcagatgaacatttgattccacagctgggctatgtggcaacaagtgatggagaggtgattgaacaaattataagcctgcaaaccaatgataatgatgaacgcagcccagaatcgagtattcttgatggaatgataagacagttgcagcagcagcaagatcagagaatgggagcagatcaggatactattccaagaggactttcaaatggtgaagaaacaccccggagaggttttagaaggctgagcttagacattcagtcccctccaaatattggtctgcgtcgtagtggacaagttgaaggtgttcgtcagatgcatcaaaacgctccacgcagtcagattgctacagaacgtgacctgcaggcttggaaacgaagagtggttgtaccagaggtaccactaggcatatttaggaagctggaagacttccgattagagaaaggtgaagaggaaagaaatctttatataataggaagaaaaagaaagactcttcagctctcacataagtcggattcagtggttttggtatcacagtctagacaaaggacatgtaggcgtaaatatccaaattatggtagaagaaatcgtagctggcgtgagttatcttctggaaatgagtcttcaagctctgtaagacatgagacttcctgtgatcagagtgaaggttctggttcttcagaagaggatgaatggagaagtgacagaaaaagtgagagttacagcgaaagttcaagtgactcttcatctagatattccgattggacagctgatgcgggcatcaatttgcagcctcctttaagaacatcatgtcgtcgacgaattactcgattttgtagtagttcagaagatgaaatatctactgagaatttatctcctccaaaaagaagacgaaagagaaagaaagaaaataagcctaagaaggagaatttgcggaggatgactccagcagagcttgcaaatatggagcatttatatgaatttcaccctccagtttggattactgacaccacacttagaaaatctccttttgttcctcaaatgggtgatgaggtaatatattttcgacagggtcatgaagcttatattgaggctgtaagaagaaataatatttatgaactgaaccctaataaggagccatggagaaaaatggatcttagggatcaagaattggttaaaatagttggaatacgatatgaagttgggccccctacactctgttgcctaaaactagcatttatagatccagcaactggaaaacttatggacaaatctttctctattagatatcatgatatgccagatgttattgactttcttgtattgcgtcaattttatgatgaagcaagacagaggaattggcagtcttgtgacagattccgctctattattgatgatgcttggtggtttggaacagtgttaagtcaagagccatatcaaccacagtatcctgatagtcatttccagtgttatattgttaggtgggataatactgaaattgaaaaacttagcccatgggacatggaaccaattcctgataatgttgatccacctgaagaattaggagctagtatttctgtcacaacagatgagctagagaaattgctctataaaccacaagctggtgaatggggtcagaaatcaagagatgaagaatgtgatagaattatcagtggtatagatcaacttttgaatcttgatatagcagcagcttttgcaggccctgttgatttgtgtacatacccgaagtactgtactgtagtagcttatccaaccgatctttacacaattcgaatgagacttgttaatcgattttacaggaggctgtctgcgttagtttgggaagtcagatatatagaacataatgccagaacatttaacgaacctgagagtgtaattgcaagatcagctaaaaagataactgaccaacttttaaaatttatcaagaatcaacactgtacaaatatctcagaactttctaacacatctgaaaatgatgagcaaaatgctgaggatttggatgatagtgatcttcctaaaacatcttctggaagaaggagagtccatgatgggaaaaaaagcatcagagctacgaactatgttgaaagcaactggaagaaacagtgtaaggaactagtgaacttaatttttcagtgtgaagattctgaaccatttagacaacctgttgatttggttgaatatccagactacagagatattatagataccccaatggattttggaacagtaagggaaactctagatgcgggaaattatgacagccctttggagttttgcaaagacatccggctgatatttagcaatgcaaaagcgtatacaccaaacaaaagatcaaagatttatagtatgaccttgagattatctgccttatttgaagaaaaaatgaagaaaatctcttctgattttaaaattggtcaaaaattcaatgaaaaacttcgaagaagccagaggttcaagcaacggcaaaattgtaaaggtgacagtcagcctaacaaaagtatcagaaacctcaagccgaagaggttaaaatctcagacaaaaataattcctgagttggtaggttctcctacccagtctacctcaagtaggacagcttatcttggaacccacaagacaagtgctggtatctcttcaggtgttacttctggtgactcttcagattcagcagaaccatcagaaaggaggaaaagaaatagacctataacaaatggttctacattatctgaaagtgaagtggaagattctttagctacctctttgtcatcgtcagcttccagtagttctgaggaaagcaaagagagttccagagctcgtgaatcctcctcacgcagtgggctatccagaagcagcaatctcagggtaaccagaactagagctgctcaaagaaaaactggtcccgtttcattagcaaatggatgtggcagaaaagccactcgaaagagagtctatttaagtgattctgataacaattcattggagactggtgaaattctaaaagccagagctggaaataaccgaaaagtcttaaggaagtgtgctgctgtggctgccaataaaataaagctaatgagtgatgtagaagagaattctagctctgaaagtgtctgttctggtcggaagctgcctcaccgcaatgcttctgctgtagctagaaaaaagttattacataattctgaagatgaacagagcttaaagtcagaaattgaagaagaggagctaaaagatgaaaatcaaccattaccagtgtccagttctcacactgcccagagcaatgttgatgaatctgaaaacagagactcagagtcagaaagtgatttgcgggtagcccggaaaaattggcatgctaatggttacaagtcccatactccagcaccttcaaagacaaaatttcttaaaatagagtcttctgaggaagactctaaaagtcatgattcagatcatgcatgtaacagaactgctggcccatcaacgtctgtgcagaaacttaaggcagagagcatctcagaggaagcagattctgaaccaggaagatctggtggtaggaaatacaatacatttcacaagaatgcgagtttctttaaaaaaaccaagattctgagtgactcagaagactctgaatctgaagagcaagatagagaagatgggaaatgtcataaaatggaaatgaacccaatttcaggaaatctgaactgtgaccctattgctatgtcccagtgttcctcagatcatggatgtgaaactgatttagattcagatgatgacaaaatagaaaaaccaaacaattttatgaaagattctgcatcacaagacaatggactaagcagaaaaatttccaggaaaagggtctgttccagtgactcagacagtagtttacaggtggttaagaaatcatcaaaagccagaacaggtctcctgaggattactcgaagatgtgcagctacggctgccaataagatcaagctcatgagtgatgtagaagatgtcagtttagaaaatgtgcacactagaagcaaaaatggaaggaaaaaacctctccatcttgcttgtactacagctaagaagaaattgagtgattgtgaaggaagtgtacattgtgaagtaccaagtgaacagtatgcctgtgaaggcaagccacctgatcctgactccgaaggtagtacaaaagtgcttagtcaggctctaaatggagactcagactctgaagatatgttgaattcagaacacaagcacaggcataccaatattcacaaaatagatgcaccttctaaaagaaaaagttcctctgttacatcttcaggagaagattcaaaaagtcatattccagggagtgagactgataggacattttcttcagagtcaaccttggcacaaaaagctactgcagagaataattttgaagtggaactgaattatgggctgcgcaggtggaatggcagaagactcaggacctatggaaaggctccttttagtaagacaaaagtgattcatgattcacaggaaacagcagagaaggaagtaaaaaggaagagatcgcatcctgaattggaaaatgtgaaaatctctgaaacaactgggaattcaaagtttagacctgatactagttccaaatcatcagatttgggatctgtaactgaatcagatattgactgtactgataatacaaaaaccaaaaggaggaaaacgaaaggaaaagcaaaagtagttagaaaaggtaaaacttttacagctaacatatctaaaactgtgagacgtcaaagacaaagcaaacgccctaggttaagtgtggatgataatgactgggaggatttggactatgcaaaatctaaaagagttcttcgacgttcaaaaataaaaacgagaaatcagggtagaaggactgtgagataccatgatggggatgatgacagaagtttagaaaatgtgttagatttcaatggttgcaccttatgaccttgagggaaagccagttcatttaagaggaaatggactggcatttatggtgaaagctggctgttaaaattatttttttgtcttacaattcagggaatatatttatatttttctatgaaaagttatgaatgtgactaaatcatgactgttatttttatttgcacttgctggtctttgtagcagcattcagcacaggtgccaaaatatgcttcattttgggggcagatctattttgacagtatttgactacatatagcaagagtttgaaatatgttaaacactagacatcctggttatcaaaaccaatgagcattactttcatggcagcaagtgtcatgcagttattttctgaatttgtcaaagaggcagtagtttctaacccctgttctatagtagttacaacaatttcacaacctatgtttacagattcttcataaatacatgcatactgacactataatcatgggaggtgtaaccatgattagtaggcgaggtacctaccacttttttttttttcttcccctggctacttgagtagaatgcattataccagatctggtcactttcattgaaatggtttctaattttcttcccaagtgctgttgggtttttttcttcttaaggaaaacgttgtcacttttatgttataaacttgaatttataaagtgctggtaaattatttttaatgatttgagtgcatgttttaaacctctaggaccagagcatagtcagagcattttcttttaaattgtgcactaacaaaatgctatataatctgtcttctgtccaagatctcctggtttccattgtaagggatttaaccaaaatcttgctcttccataatcttactctgtgaaatagaggaattcgtgtgccttagatttagaagtgtgttctttaatagagtgtacagggctaaaagagtatttaagttaatatgtaggtttcccccatctgtattccaattgtagaggtgagttttgttaagagtacaattgcaaatcttatctatataggaaaatagctaaatgtcattctccatctctttgttttagtttactgcttccatgtgcaatcctaagcattctttgctggggcaactaaatgtatctttattagtgacttctagtccaaatataagaaactgtcatgttttgtgggaaaataattttataatccatttaaagtgaaagtttatcacacaaatagtacacttattttctaaccaaatacttgataggttatgctactccagtgtagatggccattcctaacttgtttgtgcctgaagatggacttgattcaaatggtttacatatttagtgggtaagggatatgttacagtaccccacctgtaagttatttattagccctaattgtgtttgatttcagacaaaattaacccttttctcctgtgtatctttgaagtggcagataaggtgaagcatcagactggtatcaatattagacaatgttatttattagccctaattgtgtttggtttcagacaaaaccttttctcctgtgtatctttgaagtggcagacaaggcgaacatcagactggtattaatgttagagaatgttctgaagtgttcctattttgtagttatctattccatttgacatagtagaaggtacattttctttctactctgatgcatggggaaggatgtttttggacattatcaactgagataggtgggaaacctcctctcatttgtggcttagagagctatcaccatttcagaactatgatgcttttcttctcagaacttgtgttaagtagatagtaaacagattgattcatgataattgtccttgactaagactgaaaagactaatgggatgccttttactttgctaattttaaaaactggtgatagatgtcaaatccattaatttatttaaactcttcttaaccttctcttttataatctgttctcaggttttaactccatgtttaccatcatttgcaaaaaggtaccaaaaaaatccataaataaatatggaatacattcataagtacatacattcttttggtataaaacaatattttgacagtttaggcttcattaatagaactattctgattatttggactgcattaattggtcactgactggccatccaattaccattttttctttcagtccaaaatagttagacccttgcatacagaagtggtattttggtttttaatcagatttggtttcatcagaagcagcaagaatggacctgatgtctttaaaagcatagccgacaatggtagcttctcaagttatgaaataaaactgagagataatggagaaaataatttttatgggtttttttggttatggtgctattcctaaggttaactttgaatatgtgacacacacactcctaagtacctttaagtccaaaatagttagacccttgcatacagaagtggtattttggtttttaatcagatttggtttcatcagaagcagcaagaatggacctgatgtctttaaaagcatagccgacaatggtagcttct

SEQ ID NO: 332387 - DNA, 2501 bp, Homo sapiens
ggtccaggcggcgcgcacggtatggcggcggcggcggcggcggcggcggcgcgcgcctgagaagaggggacgccagcccggtcaggcctcggcgcggcctacacgctccgctcgctcgctcgctcccgcctcccgccccgcgcccggccatggcggagccgtcgtccgcccgacgcccggtgcctctcatcgagtcggagctgtacttccttatcgcccggtacctatcggcgggcccgtgtcggagagcggcccaggtgctggtgcaggagctggagcagtaccagttgttgccgaagagattggactgggagggcaacgagcacaacaggagctacgaggagttggtcttgtccaataagcatgtggctcctgatcatcttttgcaaatctgccagcgcatcggtcctatgttggataaagaaattccacccagtatttcaagagtcacttctttacttggtgcaggaaggcagtctttgctacgtacagcaaaaggtaccttaatttgaagaagtgttctgctttgtattaatagcctaataattattataattgtgaagtaatgtaagcattgtggaagaaaggtgataatgtaactataaatcatgctgtggactataaaattctctgcatttagcatagaacattgaattttattacataagtgtttaatgggtccttctgcattaaaaagttgataaagatatagatgttaagctaaaaagcttgaatttattctgagatgttgtttgaggttttatcaatgtgagttcttaattttccattttgtagctcactcataacttcattgaatgtaattgtatgtgtctaataaactctttaaatgctagaggtatttcatttgatatttagcttctgaaagccctttgttataaagggaagtgattttctaaatttggtagcagcttgaaaacaagcaccacaaatgtaaaattgcatggttctttttttactaatttaatttttttgccaagttatgtgctagcaaaatgtttgaaattgctattctttttctgttagcttggtatatatgacttagactaagtatatgtatgtgatataatatatgtgtacatgtggctaaactgctaatgggcaaagattgttggttcttctgatgctgagtatacatcaagttcatcccatgattattttttattacgagctattgctgatgtgatgctactcttagctgcaccaccagtataaagcttaactgagaaagaacacccctccctcttagttccgtgccagactggtttgttagctttagttgtttcttagtgctctagccatgtcaccctgtggcactaatcaggacactgtttatattcttcctcttctgtgtccctattcactttgtaattattctattttagctggttatatggtagttaattggtagcctgttttcctttgttttctttacttgtgtcaagctccatgtcgttgttttgtgatgagcagtgatttagaactggccagaccttagaagagtcttcagcaagctgccctagggtaggggcatattctctgtttgttttgtactggtaccccaggaggatgccttgtaactgctctttggtcatgatagtggtaatgaatccattcatgtaaaatgcaatatgtctgttagtttggggcacccgaggctcagtagaggtttagtatgatgccttccctttcttctttgagttatgaagaaactaatttctggcacagtgtgactgcttcaaacctatgttctgctgctatctcctatagaggagggcagacttttttttcttagtgcatttgctggtaggtcaaggagggatggactttgaattagtgttcagagtcacagatcctacgtatgtgctcttcagtagaggattttctgtgatcctacaatgaagggaaagctatataatttattggtacttcctaaagatagagactaaagtcatggtagtattggccaaattaattttaaaactgaacaagtcatgaattttcatataaatcaaagaactttttccttataaaagcttccatttttgaaaagttggatcagttgtaagacctttcatctttagtattgtatgatataattctacattgaaaaataaacacttggcattaaatgggacttggagtcaaaagatctggttttatggtccatctttaccaatcatttgctgtggatctctttaaaggtcctggaacctttgagcctcagttacctcacttgtaaattggcaaaaatacctacctcacagggttgttgtgaggattcaatgagctaatgtatgttgaaagcactttgtgaattgtaaagtgctacacaaatgttagttgttgttgctgctgtatctgagatgtcttaattttctttttcttcagaaatagtctaataaacctccagggcttttctgttaaagtatactagttggtaaaatgttgaataaacagtttattacaatataaaaaaaaat

SEQ ID NO: 332388 - DNA, 3174 bp, Homo sapiens
caaaatagacggggacatgttacagtaggttagaagatcaacagtgctatggaggaaaagaacacaggaagagtaaaagagaaatgggcacagagtgaggataagtttaaattgtacttagggtggttagggaaggtctcactgaaaatgtgacatttgagccaagacttgaaggaggggagggactcagccatgcagtttttccaggagaagagcattcctgcagaacaaacagcaagtacaaataccctgaggcagccgtgggccaggtcacgccacagtgaggctggagcactatgagaaggggagcagtcaggtgagaggtaagacaaaccagagagaggccagatcgtgtggacttggccttttcctctgggtctgatgggagcctctggaggattttgagagaggaaggacaagtccgtctttagtttgtttttttttttttcttgagatggagtttcgctctcgttgcccaggctggagtacaatggctcgatctcggctcactgcaacctccacctcctgggttcaggcaattctcctgcctcagcctcctgagtagctgggattacaagcacacgccaccatacccggctaatttttgtatttttagtagagacagggtttcactgtgttggtcaggctggtctcaaactcctgacctcaggtaatccacctgccccggcctcccaaagtgctgggattacaggcatgagccactacgcctggccctgtcttaagttttaacaggatccctccagctgcctgagaatacacagaaataggatgaaggtagaagcagtaagacataagaggttgtggtgctcttccggatgagaagtgcttagattctggatacattttgaagagctgtacttccttatcgcccggtacctatcggcgggcccgtgtcggagagcggcccaggtgctggtgcaggagctggagcagtaccagttgttgccgaagagattggactgggagggcaacgagcacaacaggagctacgaggagttggtcttgtccaataagcatgtggctcctgatcatcttttgcaaatctgccagcgcatcggtcctatgttggataaagaaattccacccagtatttcaagagtcacttctttacttggtgcaggaaggcagtctttgctacgtacagcaaaaggtaccttaatttgaagaagtgttctgctttgtattaatagcctaataattattataattgtgaagtaatgtaagcattgtggaagaaaggtgataatgtaactataaatcatgctgtggactataaaattctctgcatttagcatagaacattgaattttattacataagtgtttaatgggtccttctgcattaaaaagttgataaagatatagatgttaagctaaaaagcttgaatttattctgagatgttgtttgaggttttatcaatgtgagttcttaattttccattttgtagctcactcataacttcattgaatgtaattgtatgtgtctaataaactctttaaatgctagaggtatttcatttgatatttagcttctgaaagccctttgttataaagggaagtgattttctaaatttggtagcagcttgaaaacaagcaccacaaatgtaaaattgcatggttctttttttactaatttaatttttttgccaagttatgtgctagcaaaatgtttgaaattgctattctttttctgttagcttggtatatatgacttagactaagtatatgtatgtgatataatatatgtgtacatgtggctaaactgctaatgggcaaagattgttggttcttctgatgctgagtatacatcaagttcatcccatgattattttttattacgagctattgctgatgtgatgctactcttagctgcaccaccagtataaagcttaactgagaaagaacacccctccctcttagttccgtgccagactggtttgttagctttagttgtttcttagtgctctagccatgtcaccctgtggcactaatcaggacactgtttatattcttcctcttctgtgtccctattcactttgtaattattctattttagctggttatatggtagttaattggtagcctgttttcctttgttttctttacttgtgtcaagctccatgtcgttgttttgtgatgagcagtgatttagaactggccagaccttagaagagtcttcagcaagctgccctagggtaggggcatattctctgtttgttttgtactggtaccccaggaggatgccttgtaactgctctttggtcatgatagtggtaatgaatccattcatgtaaaatgcaatatgtctgttagtttggggcacccgaggctcagtagaggtttagtatgatgccttccctttcttctttgagttatgaagaaactaatttctggcacagtgtgactgcttcaaacctatgttctgctgctatctcctatagaggagggcagacttttttttcttagtgcatttgctggtaggtcaaggagggatggactttgaattagtgttcagagtcacagatcctacgtatgtgctcttcagtagaggattttctgtgatcctacaatgaagggaaagctatataatttattggtacttcctaaagatagagactaaagtcatggtagtattggccaaattaattttaaaactgaacaagtcatgaattttcatataaatcaaagaactttttccttataaaagcttccatttttgaaaagttggatcagttgtaagacctttcatctttagtattgtatgatataattctacattgaaaaataaacacttggcattaaatgggacttggagtcaaaagatctggttttatggtccatctttaccaatcatttgctgtggatctctttaaaggtcctggaacctttgagcctcagttacctcacttgtaaattggcaaaaatacctacctcacagggttgttgtgaggattcaatgagctaatgtatgttgaaagcactttgtgaattgtaaagtgctacacaaatgttagttgttgttgctgctgtatctgagatgtcttaattttctttttcttcagaaatagtctaataaacctccagggcttttctgttaaagtatactagttggtaaaatgttgaataaacagtttattacaatataaaaaaaaat

SEQ ID NO: 332389 - DNA, 9730 bp, Homo sapiens
ggtccaggcggcgcgcacggtatggcggcggcggcggcggcggcggcggcgcgcgcctgagaagaggggacgccagcccggtcaggcctcggcgcggcctacacgctccgctcgctcgctcgctcccgcctcccgccccgcgcccggccatggcggagccgtcgtccgcccgacgcccggtgcctctcatcgagtcggagctgtacttccttatcgcccggtacctatcggcgggcccgtgtcggagagcggcccaggtgctggtgcaggagctggagcagtaccagttgttgccgaagagattggactgggagggcaacgagcacaacaggagctacgaggagttggtcttgtccaataagcatgtggctcctgatcatcttttgcaaatctgccagcgcatcggtcctatgttggataaagaaattccacccagtatttcaagagtcacttctttacttggtgcaggaaggcagtctttgctacgtacagcaaaagactgcaggcacacagtttggaagggctctgcctttgctgctcttcatagaggaagacctcctgaaatgccagtgaattatggttccccaccaaatcttgtggagatacatcgaggaaaacaactcacagggtgttccacttttagtacagcatttccaggaactatgtatcagcatataaaaatgcacagaaggattctcggacatctatctgctgtttactgtgtagcatttgataggacaggacatagaatctttacaggttcagatgactgtttggtaaagatttggtcaacacataatggccgcttgttatctacattaagaggtcattctgcagaaatttcagatatggcagtaaactatgagaatacaatgattgctgcggggagctgtgataaaattattagagtgtggtgcttgagaacttgtgccccagttgctgtgctccaaggacacacaggatcaattacatctttacagtttagcccgatggccaaaggctctcaaagatacatggtttccactggtgctgatgggacagtttgcttttggcaatgggatttagaatccttaaaatttagcccacgtcccctgaagttcactgaaaagcctaggccaggcgttcaaatgctttgttcttcttttagtgttggtggtatgtttttagccacaggtagtactgatcatgtaatcagaatgtattttttgggttttgaagcacccgaaaaaatcgcagaacttgaaagccacactgataaagtagatagtatccaattttgtaacaatggtgatcggttcctaagtggtagcagagatggaacagcacggatttggagatttgagcagttagaatggaggagcattttattggatatggctaccagaatctcaggggacttatcttccgaagaggaaaggtttatgaaacctaaagtaacaatgatagcttggaatcaaaatgatagcattgttgtcacagctgtgaatgatcatgtcctcaaagtgtggaattcttacactggacaactgcttcataacttaatggtaggtaatttctggtacaatgtaacaaatgagattttttgaaatatgattgtaattttgaagctataaaaataatatattgaacaagttgtttctctcatgtaaactatgaaatgattagaaatttttataattataaattattgtcgaatacatttctaaaagtatatgctgtaacagtatgtatttttaaattttcaatttgtaacttgtaaaccctccttaatgttatgactttgttaaataaagggacatgctgatgaagtatttgttctggagacacatccctttgattccagaattatgttatctgcaggacatgatggcagcatatttatatgggatattacaaaaggtaccaagatgaaacattattttaatatgattgaaggacaaggacatggagctgtgtttgactgtaagttttcacaggatggacagcattttgcctgtacagattctcatgggcaccttctgatatttggttttggatgcagcaaaccatatgaaaagattcctgatcagatgttcttccatactgactatcgaccacttattagagattctaataattatgtcttagatgagcaaactcagcaggctcctcatcttatgcctccaccattcttggtagatgtagatggaaatcctcatccaaccaagtatcagagattagtaccaggccgagaaaattctgcagatgaacatttgattccacagctgggctatgtggcaacaagtgatggagaggtgattgaacaaattataagcctgcaaaccaatgataatgatgaacgcagcccagaatcgagtattcttgatggaatgataagacagttgcagcagcagcaagatcagagaatgggagcagatcaggatactattccaagaggactttcaaatggtgaagaaacaccccggagaggttttagaaggctgagcttagacattcagtcccctccaaatattggtctgcgtcgtagtggacaagttgaaggtgttcgtcagatgcatcaaaacgctccacgcagtcagattgctacagaacgtgacctgcaggcttggaaacgaagagtggttgtaccagaggtaccactaggcatatttaggaagctggaagacttccgattagagaaaggtgaagaggaaagaaatctttatataataggaagaaaaagaaagactcttcagctctcacataagtcggattcagtggttttggtatcacagtctagacaaaggacatgtaggcgtaaatatccaaattatggtagaagaaatcgtagctggcgtgagttatcttctggaaatgagtcttcaagctctgtaagacatgagacttcctgtgatcagagtgaaggttctggttcttcagaagaggatgaatggagaagtgacagaaaaagtgagagttacagcgaaagttcaagtgactcttcatctagatattccgattggacagctgatgcgggcatcaatttgcagcctcctttaagaacatcatgtcgtcgacgaattactcgattttgtagtagttcagaagatgaaatatctactgagaatttatctcctccaaaaagaagacgaaagagaaagaaagaaaataagcctaagaaggagaatttgcggaggatgactccagcagagcttgcaaatatggagcatttatatgaatttcaccctccagtttggattactgacaccacacttagaaaatctccttttgttcctcaaatgggtgatgaggtaatatattttcgacagggtcatgaagcttatattgaggctgtaagaagaaataatatttatgaactgaaccctaataaggagccatggagaaaaatggatcttagggatcaagaattggttaaaatagttggaatacgatatgaagttgggccccctacactctgttgcctaaaactagcatttatagatccagcaactggaaaacttatggacaaatctttctctattagatatcatgatatgccagatgttattgactttcttgtattgcgtcaattttatgatgaagcaagacagaggaattggcagtcttgtgacagattccgctctattattgatgatgcttggtggtttggaacagtgttaagtcaagagccatatcaaccacagtatcctgatagtcatttccagtgttatattgttaggtgggataatactgaaattgaaaaacttagcccatgggacatggaaccaattcctgataatgttgatccacctgaagaattaggagctagtatttctgtcacaacagatgagctagagaaattgctctataaaccacaagctggtgaatggggtcagaaatcaagagatgaagaatgtgatagaattatcagtggtatagatcaacttttgaatcttgatatagcagcagcttttgcaggccctgttgatttgtgtacatacccgaagtactgtactgtagtagcttatccaaccgatctttacacaattcgaatgagacttgttaatcgattttacaggaggctgtctgcgttagtttgggaagtcagatatatagaacataatgccagaacatttaacgaacctgagagtgtaattgcaagatcagctaaaaagataactgaccaacttttaaaatttatcaagaatcaacactgtacaaatatctcagaactttctaacacatctgaaaatgatgagcaaaatgctgaggatttggatgatagtgatcttcctaaaacatcttctggaagaaggagagtccatgatgggaaaaaaagcatcagagctacgaactatgttgaaagcaactggaagaaacagtgtaaggaactagtgaacttaatttttcagtgtgaagattctgaaccatttagacaacctgttgatttggttgaatatccagactacagagatattatagataccccaatggattttggaacagtaagggaaactctagatgcgggaaattatgacagccctttggagttttgcaaagacatccggctgatatttagcaatgcaaaagcgtatacaccaaacaaaagatcaaagatttatagtatgaccttgagattatctgccttatttgaagaaaaaatgaagaaaatctcttctgattttaaaattggtcaaaaattcaatgaaaaacttcgaagaagccagaggttcaagcaacggcaaaattgtaaaggtgacagtcagcctaacaaaagtatcagaaacctcaagccgaagaggttaaaatctcagacaaaaataattcctgagttggtaggttctcctacccagtctacctcaagtaggacagcttatcttggaacccacaagacaagtgctggtatctcttcaggtgttacttctggtgactcttcagattcagcagaaccatcagaaaggaggaaaagaaatagacctataacaaatggttctacattatctgaaagtgaagtggaagattctttagctacctctttgtcatcgtcagcttccagtagttctgaggaaagcaaagagagttccagagctcgtgaatcctcctcacgcagtgggctatccagaagcagcaatctcagggtaaccagaactagagctgctcaaagaaaaactggtcccgtttcattagcaaatggatgtggcagaaaagccactcgaaagagagtctatttaagtgattctgataacaattcattggagactggtgaaattctaaaagccagagctggaaataaccgaaaagtcttaaggaagtgtgctgctgtggctgccaataaaataaagctaatgagtgatgtagaagagaattctagctctgaaagtgtctgttctggtcggaagctgcctcaccgcaatgcttctgctgtagctagaaaaaagttattacataattctgaagatgaacagagcttaaagtcagaaattgaagaagaggagctaaaagatgaaaatcaaccattaccagtgtccagttctcacactgcccagagcaatgttgatgaatctgaaaacagagactcagagtcagaaagtgatttgcgggtagcccggaaaaattggcatgctaatggttacaagtcccatactccagcaccttcaaagacaaaatttcttaaaatagagtcttctgaggaagactctaaaagtcatgattcagatcatgcatgtaacagaactgctggcccatcaacgtctgtgcagaaacttaaggcagagagcatctcagaggaagcagattctgaaccaggaagatctggtggtaggaaatacaatacatttcacaagaatgcgagtttctttaaaaaaaccaagattctgagtgactcagaagactctgaatctgaagagcaagatagagaagatgggaaatgtcataaaatggaaatgaacccaatttcaggaaatctgaactgtgaccctattgctatgtcccagtgttcctcagatcatggatgtgaaactgatttagattcagatgatgacaaaatagaaaaaccaaacaattttatgaaagattctgcatcacaagacaatggactaagcagaaaaatttccaggaaaagggtctgttccagtgactcagacagtagtttacaggtggttaagaaatcatcaaaagccagaacaggtctcctgaggattactcgaagatgtgcagctacggctgccaataagatcaagctcatgagtgatgtagaagatgtcagtttagaaaatgtgcacactagaagcaaaaatggaaggaaaaaacctctccatcttgcttgtactacagctaagaagaaattgagtgattgtgaaggaagtgtacattgtgaagtaccaagtgaacagtatgcctgtgaaggcaagccacctgatcctgactccgaaggtagtacaaaagtgcttagtcaggctctaaatggagactcagactctgaagatatgttgaattcagaacacaagcacaggcataccaatattcacaaaatagatgcaccttctaaaagaaaaagttcctctgttacatcttcaggagaagattcaaaaagtcatattccagggagtgagactgataggacattttcttcagagtcaaccttggcacaaaaagctactgcagagaataattttgaagtggaactgaattatgggctgcgcaggtggaatggcagaagactcaggacctatggaaaggctccttttagtaagacaaaagtgattcatgattcacaggaaacagcagagaaggaagtaaaaaggaagagatcgcatcctgaattggaaaatgtgaaaatctctgaaacaactgggaattcaaagtttagacctgatactagttccaaatcatcagatttgggatctgtaactgaatcagatattgactgtactgataatacaaaaaccaaaaggaggaaaacgaaaggaaaagcaaaagtagttagaaaaggtaaaacttttacagctaacatatctaaaactgtgagacgtcaaagacaaagcaaacgccctaggttaagtgtggatgataatgactgggaggatttggactatgcaaaatctaaaagagttcttcgacgttcaaaaataaaaacgagaaatcagggtagaaggactgtgagataccatgatggggatgatgacagaagtttagaaaatgtgttagatttcaatggttgcaccttatgaccttgagggaaagccagttcatttaagaggaaatggactggcatttatggtgaaagctggctgttaaaattatttttttgtcttacaattcagggaatatatttatatttttctatgaaaagttatgaatgtgactaaatcatgactgttatttttatttgcacttgctggtctttgtagcagcattcagcacaggtgccaaaatatgcttcattttgggggcagatctattttgacagtatttgactacatatagcaagagtttgaaatatgttaaacactagacatcctggttatcaaaaccaatgagcattactttcatggcagcaagtgtcatgcagttattttctgaatttgtcaaagaggcagtagtttctaacccctgttctatagtagttacaacaatttcacaacctatgtttacagattcttcataaatacatgcatactgacactataatcatgggaggtgtaaccatgattagtaggcgaggtacctaccacttttttttttttcttcccctggctacttgagtagaatgcattataccagatctggtcactttcattgaaatggtttctaattttcttcccaagtgctgttgggtttttttcttcttaaggaaaacgttgtcacttttatgttataaacttgaatttataaagtgctggtaaattatttttaatgatttgagtgcatgttttaaacctctaggaccagagcatagtcagagcattttcttttaaattgtgcactaacaaaatgctatataatctgtcttctgtccaagatctcctggtttccattgtaagggatttaaccaaaatcttgctcttccataatcttactctgtgaaatagaggaattcgtgtgccttagatttagaagtgtgttctttaatagagtgtacagggctaaaagagtatttaagttaatatgtaggtttcccccatctgtattccaattgtagaggtgagttttgttaagagtacaattgcaaatcttatctatataggaaaatagctaaatgtcattctccatctctttgttttagtttactgcttccatgtgcaatcctaagcattctttgctggggcaactaaatgtatctttattagtgacttctagtccaaatataagaaactgtcatgttttgtgggaaaataattttataatccatttaaagtgaaagtttatcacacaaatagtacacttattttctaaccaaatacttgataggttatgctactccagtgtagatggccattcctaacttgtttgtgcctgaagatggacttgattcaaatggtttacatatttagtgggtaagggatatgttacagtaccccacctgtaagttatttattagccctaattgtgtttgatttcagacaaaattaacccttttctcctgtgtatctttgaagtggcagataaggtgaagcatcagactggtatcaatattagacaatgttatttattagccctaattgtgtttggtttcagacaaaaccttttctcctgtgtatctttgaagtggcagacaaggcgaacatcagactggtattaatgttagagaatgttctgaagtgttcctattttgtagttatctattccatttgacatagtagaaggtacattttctttctactctgatgcatggggaaggatgtttttggacattatcaactgagataggtgggaaacctcctctcatttgtggcttagagagctatcaccatttcagaactatgatgcttttcttctcagaacttgtgttaagtagatagtaaacagattgattcatgataattgtccttgactaagactgaaaagactaatgggatgccttttactttgctaattttaaaaactggtgatagatgtcaaatccattaatttatttaaactcttcttaaccttctcttttataatctgttctcaggttttaactccatgtttaccatcatttgcaaaaaggtaccaaaaaaatccataaataaatatggaatacattcataagtacatacattcttttggtataaaacaatattttgacagtttaggcttcattaatagaactattctgattatttggactgcattaattggtcactgactggccatccaattaccattttttctttcagtccaaaatagttagacccttgcatacagaagtggtattttggtttttaatcagatttggtttcatcagaagcagcaagaatggacctgatgtctttaaaagcatagccgacaatggtagcttctcaagttatgaaataaaactgagagataatggagaaaataatttttatgggtttttttggttatggtgctattcctaaggttaactttgaatatgtgacacacacactcctaagtacctttaagtccaaaatagttagacccttgcatacagaagtggtattttggtttttaatcagatttggtttcatcagaagcagcaagaatggacctgatgtctttaaaagcatagccgacaatggtagcttct

SEQ ID NO: 332390 - DNA, 1957 bp, Homo sapiens
ggtccaggcggcgcgcacggtatggcggcggcggcggcggcggcggcggcgcgcgcctgagaagaggggacgccagcccggtcaggcctcggcgcggcctacacgctccgctcgctcgctcgctcccgcctcccgccccgcgcccggccatggcggagccgtcgtccgcccgacgcccggtgcctctcatcgagtcggagctgtacttccttatcgcccggtacctatcggcgggcccgtgtcggagagcggcccaggtgctggtgcaggagctggagcagtaccagttgttgccgaagagattggactgggagggcaacgagcacaacaggagctacgaggagttggtcttgtccaataagcatgtggctcctgatcatcttttgcaaatctgccagcgcatcggtcctatgttggataaagaaattccacccagtatttcaagagtcacttctttacttggtgcaggaaggcagtctttgctacgtacagcaaaaggtaccttaatttgaagaagtgttctgctttgtattaatagcctaataattattataattgtgaagtaatgtaagcattgtggaagaaaggtgataatgtaactataaatcatgctgtggactataaaattctctgcatttagcatagaacattgaattttattacataagtgtttaatgggtccttctgcattaaaaagttgataaagatatagatgttaagctaaaaagcttgaatttattctgagatgttgtttgaggttttatcaatgtgagttcttaattttccattttgtagctcactcataacttcattgaatgtaattgtatgtgtctaataaactctttaaatgctagaggtatttcatttgatatttagcttctgaaagccctttgttataaagggaagtgattttctaaatttggtagcagcttgaaaacaagcaccacaaatgtaaaattgcatggttctttttttactaatttaatttttttgccaagttatgtgctagcaaaatgtttgaaattgctattctttttctgttagcttggtatatatgacttagactaagtatatgtatgtgatataatatatgtgtacatgtggctaaactgctaatgggcaaagattgttggttcttctgatgctgatatgatgccttccctttcttctttgagttatgaagaaactaatttctggcacagtgtgactgcttcaaacctatgttctgctgctatctcctatagaggagggcagacttttttttcttagtgcatttgctggtaggtcaaggagggatggactttgaattagtgttcagagtcacagatcctacgtatgtgctcttcagtagaggattttctgtgatcctacaatgaagggaaagctatataatttattggtacttcctaaagatagagactaaagtcatggtagtattggccaaattaattttaaaactgaacaagtcatgaattttcatataaatcaaagaactttttccttataaaagcttccatttttgaaaagttggatcagttgtaagacctttcatctttagtattgtatgatataattctacattgaaaaataaacacttggcattaaatgggacttggagtcaaaagatctggttttatggtccatctttaccaatcatttgctgtggatctctttaaaggtcctggaacctttgagcctcagttacctcacttgtaaattggcaaaaatacctacctcacagggttgttgtgaggattcaatgagctaatgtatgttgaaagcactttgtgaattgtaaagtgctacacaaatgttagttgttgttgctgctgtatctgagatgtcttaattttctttttcttcagaaatagtctaataaacctccagggcttttctgttaaagtatactagttggtaaaatgttgaataaacagtttattacaatataaaaaaaaat

SEQ ID NO: 332391 - DNA, 2193 bp, Homo sapiens
caaaatagacggggacatgttacagtaggttagaagatcaacagtgctatggaggaaaagaacacaggaagagtaaaagagaaatgggcacagagtgaggataagtttaaattgtacttagggtggttagggaaggtctcactgaaaatgtgacatttgagccaagacttgaaggaggggagggactcagccatgcagtttttccaggagaagagcattcctgcagaacaaacagcaagtacaaataccctgaggcagccgtgggccaggtcacgccacagtgaggctggagcactatgagaaggggagcagtcaggtgagaggtaagacaaaccagagagaggccagatcgtgtggacttggccttttcctctgggtctgatgggagcctctggaggattttgagagaggaaggacaagtccgtctttagtttgtttttttttttttcttgagatggagtttcgctctcgttgcccaggctggagtacaatggctcgatctcggctcactgcaacctccacctcctgggttcaggcaattctcctgcctcagcctcctgagtagctgggattacaagcacacgccaccatacccggctaatttttgtatttttagtagagacagggtttcactgtgttggtcaggctggtctcaaactcctgacctcaggtaatccacctgccccggcctcccaaagtgctgggattacaggcatgagccactacgcctggccctgtcttaagttttaacaggatccctccagctgcctgagaatacacagaaataggatgaaggtagaagcagtaagacataagaggttgtggtgctcttccggatgagaagtgcttagattctggatacattttgaagagctgtacttccttatcgcccggtacctatcggcgggcccgtgtcggagagcggcccaggtgctggtgcaggagctggagcagtaccagttgttgccgaagagattggactgggagggcaacgagcacaacaggagctacgaggagttggtgagcattgggcacgtttgctccccgggttttccgtgcaccgccccccgcccccgccccttcccctcgcggggaccccggcccgtggggtgcaaagtgtgacccgcactggggggcggcccgggcatagctgcgttcccggctgaagattttgttttgtttttgaggcggccaggtttgttttggcaggaaacagtcattgggggcggcgcggggcggagcggtgggggcgactcgcggaggtcctgcggcaggggtggggctccaggtgcggccgcctctgcgggggtgtggcgtgcgcagccagccattcaactgggcggtttcattcgcttccccactccaccgcgcttgtaactcgcgctctgattggcctccctgctcttgccccgcccgggtctgtccccccacttgttccctaggaatagaatcattggtctctgaaggtggagaaatgttcttgtgttgagctttttattttttgttttgtcagcagcgtcataaaaatcttgcagctgtatgaatatgccactgtagtgcttgtgctcctttctactgtacaatatttgttgaacgcagtagttgattgatgagtttcacactgatcttgtagataacacaataaagtgctttaaataggcacttttcttttgagctcggttaatcttgcattacagtctcatttcttttgtgaacttggttaatgtttctatataacttgcttttatctatagttacagcagttgcagggattcgtttgtttttactggagacatttttcaggaatatatttttgccgtttcgttattaggataaaggaattcattaattgccaggccatattcagcatcttgtataaggaaaacaattgagaaagaaaagagcttctgagtgatcttttaccacagttggaagacctgtaacacttgagtggtagagtatggtggcaagtgaaaagaagaaaaaaaagtggtagaagattactggttttgaattagacaacagaagagaccagaggatgtgttatttccatgaacagttaacacttgaagcctggtgcaagtaataaataattttaatatttgctttcttagattttgaagtaaacactttaacagtggatgttttcaagggaatgagttctaaaaattctgatggcaatgtgttgagttt

SEQ ID NO: 332392 - DNA, 4350 bp, Homo sapiens
ggtccaggcggcgcgcacggtatggcggcggcggcggcggcggcggcggcgcgcgcctgagaagaggggacgccagcccggtcaggcctcggcgcggcctacacgctccgctcgctcgctcgctcccgcctcccgccccgcgcccggccatggcggagccgtcgtccgcccgacgcccggtgcctctcatcgagtcggagctgtacttccttatcgcccggtacctatcggcgggcccgtgtcggagagcggcccaggtgctggtgcaggagctggagcagtaccagttgttgccgaagagattggactgggagggcaacgagcacaacaggagctacgaggagttggtcttgtccaataagcatgtggctcctgatcatcttttgcaaatctgccagcgcatcggtcctatgttggataaagaaattccacccagtatttcaagagtcacttctttacttggtgcaggaaggcagtctttgctacgtacagcaaaagactgcaggcacacagtttggaagggctctgcctttgctgctcttcatagaggaagacctcctgaaatgccagtgaattatggttccccaccaaatcttgtggagatacatcgaggaaaacaactcacagggtgttccacttttagtacagcatttccaggaactatgtatcagcatataaaaatgcacagaaggattctcggacatctatctgctgtttactgtgtagcatttgataggacaggacatagaatctttacaggttcagatgactgtttggtaaagatttggtcaacacataatggccgcttgttatctacattaagaggtcattctgcagaaatttcagatatggcagtaaactatgagaatacaatgattgctgcggggagctgtgataaaattattagagtgtggtgcttgagaacttgtgccccagttgctgtgctccaaggacacacaggatcaattacatctttacagtttagcccgatggccaaaggctctcaaagatacatggtttccactggtgctgatgggacagtttgcttttggcaatgggatttagaatccttaaaatttagcccacgtcccctgaagttcactgaaaagcctaggccaggcgttcaaatgctttgttcttcttttagtgttggtggtatgtttttagccacaggtagtactgatcatgtaatcagaatgtattttttgggttttgaagcacccgaaaaaatcgcagaacttgaaagccacactgataaagtagatagtatccaattttgtaacaatggtgatcggttcctaagtggtagcagagatggaacagcacggatttggagatttgagcagttagaatggaggagcattttattggatatggctaccagaatctcaggggacttatcttccgaagaggaaaggtttatgaaacctaaagtaacaatgatagcttggaatcaaaatgatagcattgttgtcacagctgtgaatgatcatgtcctcaaagtgtggaattcttacactggacaactgcttcataacttaatggtaggtaatttctggtacaatgtaacaaatgagattttttgaaatatgattgtaattttgaagctataaaaataatatattgaacaagttgtttctctcatgtaaactatgaaatgattagaaatttttataattataaattattgtcgaatacatttctaaaagtatatgctgtaacagtatgtatttttaaattttcaatttgtaacttgtaaaccctccttaatgttatgactttgttaaataaagggacatgctgatgaagtatttgttctggagacacatccctttgattccagaattatgttatctgcaggacatgatggcagcatatttatatgggatattacaaaaggtaccaagatgaaacattattttaatatgattgaaggacaaggacatggagctgtgtttgactgtaagttttcacaggatggacagcattttgcctgtacagattctcatgggcaccttctgatatttggttttggatgcagcaaaccatatgaaaagattcctgatcagatgttcttccatactgactatcgaccacttattagagattctaataattatgtcttagatgagcaaactcagcaggctcctcatcttatgcctccaccattcttggtagatgtagatggaaatcctcatccaaccaagtatcagagattagtaccaggccgagaaaattctgcagatgaacatttgattccacagctgggctatgtggcaacaagtgatggagaggtgattgaacaaattataagcctgcaaaccaatgataatgatgaacgcagcccagaatcgagtattcttgatggaatgataagacagttgcagcagcagcaagatcagagaatgggagcagatcaggatactattccaagaggactttcaaatggtgaagaaacaccccggagaggttttagaaggctgagcttagacattcagtcccctccaaatattggtctgcgtcgtagtggacaagttgaaggtgttcgtcagatgcatcaaaacgctccacgcagtcagattgctacagaacgtgacctgcaggcttggaaacgaagagtggttgtaccagaggtaccactaggcatatttaggaagctggaagacttccgattagagaaaggtgaagaggaaagaaatctttatataataggaagaaaaagaaagactcttcagctctcacataagtcggattcagtggttttggtatcacagtctagacaaaggacatgtaggcgtaaatatccaaattatggtagaagaaatcgtagctggcgtgagttatcttctggaaatgagtcttcaagctctgtaagacatgagacttcctgtgatcagagtgaaggttctggttcttcagaagaggatgaatggagaagtgacagaaaaagtgagagttacagcgaaagttcaagtgactcttcatctagatattccgattggacagctgatgcgggcatcaatttgcagcctcctttaagaacatcatgtcgtcgacgaattactcgattttgtagtagttcagaagatgaaatatctactgagaatttatctcctccaaaaagaagacgaaagagaaagaaagaaaataagcctaagaaggagaatttgcggaggatgactccagcagagcttgcaaatatggagcatttatatgaatttcaccctccagtttggattactgacaccacacttagaaaatctccttttgttcctcaaatgggtgatgaggtaatatattttcgacagggtcatgaagcttatattgaggctgtaagaagaaataatatttatgaactgaaccctaataaggagccatggagaaaaatggatcttagggatcaagaattggttaaaatagttggaatacgatatgaagttgggccccctacactctgttgcctaaaactagcatttatagatccagcaactggaaaacttatggacaaatctttctctattagatatcatgatatgccagatgttattgactttcttgtattgcgtcaattttatgatgaagcaagacagaggaattggcagtcttgtgacagattccgctctattattgatgatgcttggtggtttggaacagtgttaagtcaagagccatatcaaccacagtatcctgatagtcatttccagtgttatattgttaggtgggataatactgaaattgaaaaacttagcccatgggacatggaaccaattcctgataatgttgatccacctgaagaattaggagctagtatttctgtcacaacagatgagctagagaaattgctctataaaccacaagctggtgaatggggtcagaaatcaagagatgaagaatgtgatagaattatcagtggtatagatcaacttttgaatcttgatatagcagcagcttttgcaggccctgttgatttgtgtacatacccgaagtactgtactgtagtagcttatccaaccgatctttacacaattcgaatgagacttgttaatcgattttacaggttagtagaaacctgctttcaaaatgtttaaaaagctatatttggcaatattgactagggtaaacaaagaaagagatagtggtagaattgggggctgattagcattttctgtttcattattctctttcattgtcagatggtgttagatgcctatgggtaggtgtgggtagggccaggcagaaaattgactaccatatttcaccctcgtttttttttcagtgattatttccatatcactgaaattttacttttattccacttatttcagtaaactttcactggtactttagtaa

SEQ ID NO: 332393 - DNA, 218 bp, Homo sapiens
gtagatttacaatgcttttttaagtgatatattcctgtgtaaaggaactaaatatatatgctgtgtgaaaactaatcattagatggacatggcaaaaatagtcattctgaatggtgaaagtttcttttatttttcattcagacagtgcatgctgcccctttctaatctaagaaactttgttctcttccccttggtagaatttgcggaggatgactcca

SEQ ID NO: 332394 - DNA, 296 bp, Homo sapiens
actgcaggcacacagtttggaagggctctgcctttgctgctcttcatagaggaagacctcctgaaatgccagtgaattatggttccccaccaaatcttggtaagtaaggttggcctttgagatgcctgaaataattgtttttaaatttctcaacaacctttataaatgctgtattaaaatttaaaaggaaatactggttgaaatgttgttttaatagtaataagtatcaaatgtcaaattattgttaaaataattactaaaaataaaattaataaaaaatctttttatagtaagaa

SEQ ID NO: 332395 - DNA, 498 bp, Homo sapiens
catatttcccttttgtaggtaatatattttcgacagggtcatgaagcttatattgaggctgtaagaagaaataatatttatgaactgaaccctaataaggagccatggagaaaaatggatcttagggtaggatgatggcattattaaatcattaaacattttagcacatacatagttaaattacttacaaatctatttaaaaacctgttggaaacatattttattactttctttcctacttgataacatttctgctgtaaccaaaccttaagatcctgtgggaatggcttgtttgtcaatgggcaaaatttgtatgttgctgattggtgtgtaaaatgttaaatgcaacaacctagagtttcagaaaggcagcttggcaatatatatattatcactcttaaaaatgtttatgtatccaagacagattttcagaggaagaaatgcaagttttcaaaagaagaaataaaaactggaagaagggtttaacctcatggataa

SEQ ID NO: 332396 - DNA, 436 bp, Homo sapiens
cttcaggttttgccctcacctgtttctagacagtctgttctgggtcagctgtgatgaactcactgtagggttgataagataggcacatgggttggatttctttatttttgtattgatgagagattgtatacattgtatagccagccatctaaataagtttacatgttgtgtatttttttgttagggacttatcttccgaagaggaaaggtttatgaaacctaaagtaacaatgatagcttggaatcaaaatgatagcattgttgtcacagctgtgaatgatcatgtcctcaaagtgtggaattcttacactggacaactgcttcataacttaatggtaggtaatttctggtacaatgtaacaaatgagattttttgaaatatgattgtaattttgaagctataaaaataatatattgaacaagttgtttctctcat

SEQ ID NO: 332397 - DNA, 601 bp, Homo sapiens
ttttgaaatatgattgtaattttgaagctataaaaataatatattgaacaagttgtttctctcatgtaaactatgaaatgattagaaatttttataattataaattattgtcgaatacatttctaaaagtatatgctgtaacagtatgtatttttaaattttcaatttgtaacttgtaaaccctccttaatgttatgactttgttaaataaagggacatgctgatgaagtatttgttctggagacacatccctttgattccagaattatgttatctgcaggacatgatggcagcatatttatatgggatattacaaaaggtaccaagatgaaacattattttaatatggtaagtgaagtgagatgtaccttgatacatgcttgataatttgtttagagtatttgggttatgcggcttagccagaaattgatctgcttgttttggcagtttgtttttacaaatcagcatattcaaagcctgctaaatattagacagctacatgtatatacgtacatacatgaaattctctgtatgactgatttatatgagggagacatttttaagttacctgttgagcattttatgtgcctgtgtgtttaaa

SEQ ID NO: 332398 - DNA, 427 bp, Homo sapiens
cgtggttaagaggattgcttgaggccaggcatttgcgactagcccgggcaacatagcaagaccttgtctgtacagaaaataaattttaaaaagatttttctcacaaagttttttcagtagatactatcttctcttagttctttatttttggtgcgcatcttaggtgaacgtgtgcttgttacatgctaaatgtatattagtttaaaagtgtattggaatcacttccccatcatattttcctaggttttagaaggctgagcttagacattcagtcccctccaaatattggtctgcgtcgtagtggacaagttgaaggtgttcgtcagatgcatcaaaacgctccacgcagtcagattgctacagaacgtgacctgcaggcttggaaacgaagagtggttgtaccagaggtaccactaggcatatttag

SEQ ID NO: 332399 - DNA, 8659 bp, Homo sapiens
ggtccaggcggcgcgcacggtatggcggcggcggcggcggcggcggcggcgcgcgcctgagaagaggggacgccagcccggtcaggcctcggcgcggcctacacgctccgctcgctcgctcgctcccgcctcccgccccgcgcccggccatggcggagccgtcgtccgcccgacgcccggtgcctctcatcgagtcggagctgtacttccttatcgcccggtacctatcggcgggcccgtgtcggagagcggcccaggtgctggtgcaggagctggagcagtaccagttgttgccgaagagattggactgggagggcaacgagcacaacaggagctacgaggagttggtcttgtccaataagcatgtggctcctgatcatcttttgcaaatctgccagcgcatcggtcctatgttggataaagaaattccacccagtatttcaagagtcacttctttacttggtgcaggaaggcagtctttgctacgtacagcaaaagactgcaggcacacagtttggaagggctctgcctttgctgctcttcatagaggaagacctcctgaaatgccagtgaattatggttccccaccaaatcttgtggagatacatcgaggaaaacaactcacagggtgttccacttttagtacagcatttccaggaactatgtatcagcatataaaaatgcacagaaggattctcggacatctatctgctgtttactgtgtagcatttgataggacaggacatagaatctttacaggttcagatgactgtttggtaaagatttggtcaacacataatggccgcttgttatctacattaagaggtcattctgcagaaatttcagatatggcagtaaactatgagaatacaatgattgctgcggggagctgtgataaaattattagagtgtggtgcttgagaacttgtgccccagttgctgtgctccaaggacacacaggatcaattacatctttacagtttagcccgatggccaaaggctctcaaagatacatggtttccactggtgctgatgggacagtttgcttttggcaatgggatttagaatccttaaaatttagcccacgtcccctgaagttcactgaaaagcctaggccaggcgttcaaatgctttgttcttcttttagtgttggtggtatgtttttagccacaggtagtactgatcatgtaatcagaatgtattttttgggttttgaagcacccgaaaaaatcgcagaacttgaaagccacactgataaagtagatagtatccaattttgtaacaatggtgatcggttcctaagtggtagcagagatggaacagcacggatttggagatttgagcagttagaatggaggagcattttattggatatggctaccagaatctcaggggacttatcttccgaagaggaaaggtttatgaaacctaaagtaacaatgatagcttggaatcaaaatgatagcattgttgtcacagctgtgaatgatcatgtcctcaaagtgtggaattcttacactggacaactgcttcataacttaatgggacatgctgatgaagtatttgttctggagacacatccctttgattccagaattatgttatctgcaggacatgatggcagcatatttatatgggatattacaaaaggtaccaagatgaaacattattttaatatgattgaaggacaaggacatggagctgtgtttgactgtaagttttcacaggatggacagcattttgcctgtacagattctcatgggcaccttctgatatttggttttggatgcagcaaaccatatgaaaagattcctgatcagatgttcttccatactgactatcgaccacttattagagattctaataattatgtcttagatgagcaaactcagcaggctcctcatcttatgcctccaccattcttggtagatgtagatggaaatcctcatccaaccaagtatcagagattagtaccaggccgagaaaattctgcagatgaacatttgattccacagctgggctatgtggcaacaagtgatggagaggtgattgaacaaattataagcctgcaaaccaatgataatgatgaacgcagcccagaatcgagtattcttgatggaatgataagacagttgcagcagcagcaagatcagagaatgggagcagatcaggatactattccaagaggactttcaaatggtgaagaaacaccccggagaggttttagaaggctgagcttagacattcagtcccctccaaatattggtctgcgtcgtagtggacaagttgaaggtgttcgtcagatgcatcaaaacgctccacgcagtcagattgctacagaacgtgacctgcaggcttggaaacgaagagtggttgtaccagaggtaccactaggcatatttaggaagctggaagacttccgattagagaaaggtgaagaggaaagaaatctttatataataggaagaaaaagaaagactcttcagctctcacataagtcggattcagtggttttggtatcacagtctagacaaaggacatgtaggcgtaaatatccaaattatggtagaagaaatcgtagctggcgtgagttatcttctggaaatgagtcttcaagctctgtaagacatgagacttcctgtgatcagagtgaaggttctggttcttcagaagaggatgaatggagaagtgacagaaaaagtgagagttacagcgaaagttcaagtgactcttcatctagatattccgattggacagctgatgcgggcatcaatttgcagcctcctttaagaacatcatgtcgtcgacgaattactcgattttgtagtagttcagaagatgaaatatctactgagaatttatctcctccaaaaagaagacgaaagagaaagaaagaaaataagcctaagaaggagaatttgcggaggatgactccagcagagcttgcaaatatggagcatttatatgaatttcaccctccagtttggattactgacaccacacttagaaaatctccttttgttcctcaaatgggtgatgaggtaatatattttcgacagggtcatgaagcttatattgaggctgtaagaagaaataatatttatgaactgaaccctaataaggagccatggagaaaaatggatcttagggatcaagaattggttaaaatagttggaatacgatatgaagttgggccccctacactctgttgcctaaaactagcatttatagatccagcaactggaaaacttatggacaaatctttctctattagatatcatgatatgccagatgttattgactttcttgtattgcgtcaattttatgatgaagcaagacagaggaattggcagtcttgtgacagattccgctctattattgatgatgcttggtggtttggaacagtgttaagtcaagagccatatcaaccacagtatcctgatagtcatttccagtgttatattgttaggtgggataatactgaaattgaaaaacttagcccatgggacatggaaccaattcctgataatgttgatccacctgaagaattaggagctagtatttctgtcacaacagatgagctagagaaattgctctataaaccacaagctggtgaatggggtcagaaatcaagagatgaagaatgtgatagaattatcagtggtatagatcaacttttgaatcttgatatagcagcagcttttgcaggccctgttgatttgtgtacatacccgaagtactgtactgtagtagcttatccaaccgatctttacacaattcgaatgagacttgttaatcgattttacaggaggctgtctgcgttagtttgggaagtcagatatatagaacataatgccagaacatttaacgaacctgagagtgtaattgcaagatcagctaaaaagataactgaccaacttttaaaatttatcaagaatcaacactgtacaaatatctcagaactttctaacacatctgaaaatgatgagcaaaatgctgaggatttggatgatagtgatcttcctaaaacatcttctggaagaaggagagtccatgatgggaaaaaaagcatcagagctacgaactatgttgaaagcaactggaagaaacagtgtaaggaactagtgaacttaatttttcagtgtgaagattctgaaccatttagacaacctgttgatttggttgaatatccagactacagagatattatagataccccaatggattttggaacagtaagggaaactctagatgcgggaaattatgacagccctttggagttttgcaaagacatccggctgatatttagcaatgcaaaagcgtatacaccaaacaaaagatcaaagatttatagtatgaccttgagattatctgccttatttgaagaaaaaatgaagaaaatctcttctgattttaaaattggtcaaaaattcaatgaaaaacttcgaagaagccagaggttcaagcaacggcaaaattgtaaaggtgacagtcagcctaacaaaagtatcagaaacctcaagccgaagaggttaaaatctcagacaaaaataattcctgagttggtaggttctcctacccagtctacctcaagtaggacagcttatcttggaacccacaagacaagtgctggtatctcttcaggtgttacttctggtgactcttcagattcagcagaaccatcagaaaggaggaaaagaaatagacctataacaaatggttctacattatctgaaagtgaagtggaagattctttagctacctctttgtcatcgtcagcttccagtagttctgaggaaagcaaagagagttccagagctcgtgaatcctcctcacgcagtgggctatccagaagcagcaatctcagggtaaccagaactagagctgctcaaagaaaaactggtcccgtttcattagcaaatggatgtggcagaaaagccactcgaaagagagtctatttaagtgattctgataacaattcattggagactggtgaaattctaaaagccagagctggaaataaccgaaaagtcttaaggaagtgtgctgctgtggctgccaataaaataaagctaatgagtgatgtagaagagaattctagctctgaaagtgtctgttctggtcggaagctgcctcaccgcaatgcttctgctgtagctagaaaaaagttattacataattctgaagatgaacagagcttaaagtcagaaattgaagaagaggagctaaaagatgaaaatcaaccattaccagtgtccagttctcacactgcccagagcaatgttgatgaatctgaaaacagagactcagagtcagaaagtgatttgcgggtagcccggaaaaattggcatgctaatggttacaagtcccatactccagcaccttcaaagacaaaatttcttaaaatagagtcttctgaggaagactctaaaagtcatgattcagatcatgcatgtaacagaactgctggcccatcaacgtctgtgcagaaacttaaggcagagagcatctcagaggaagcagattctgaaccaggaagatctggtggtaggaaatacaatacatttcacaagaatgcgagtttctttaaaaaaaccaagattctgagtgactcagaagactctgaatctgaagagcaagatagagaagatgggaaatgtcataaaatggaaatgaacccaatttcaggaaatctgaactgtgaccctattgctatgtcccagtgttcctcagatcatggatgtgaaactgatttagattcagatgatgacaaaatagaaaaaccaaacaattttatgaaagattctgcatcacaagacaatggactaagcagaaaaatttccaggaaaagggtctgttccagtgactcagacagtagtttacaggtggttaagaaatcatcaaaagccagaacaggtctcctgaggattactcgaagatgtgcagctacggctgccaataagatcaagctcatgagtgatgtagaagatgtcagtttagaaaatgtgcacactagaagcaaaaatggaaggaaaaaacctctccatcttgcttgtactacagctaagaagaaattgagtgattgtgaaggaagtgtacattgtgaagtaccaagtgaacagtatgcctgtgaaggcaagccacctgatcctgactccgaaggtagtacaaaagtgcttagtcaggctctaaatggagactcagactctgaagatatgttgaattcagaacacaagcacaggcataccaatattcacaaaatagatgcaccttctaaaagaaaaagttcctctgttacatcttcaggagaagattcaaaaagtcatattccagggagtgagactgataggacattttcttcagagtcaaccttggcacaaaaagctactgcagagaataattttgaagtggaactgaattatgggctgcgcaggtggaatggcagaagactcaggacctatggaaaggctccttttagtaagacaaaagtgattcatgattcacaggaaacagcagagaaggaagtaaaaaggaagagatcgcatcctgaattggaaaatgtgaaaatctctgaaacaactgggaattcaaagtttagacctgatactagttccaaatcatcagatttgggatctgtaactgaatcagatattgactgtactgataatacaaaaaccaaaaggaggaaaacgaaaggaaaagcaaaagtagttagaaaagaatttgttcctagagacagagaacccaatacaaaagtgagaacatgtatgcataatcagaaggatgcagtgcagatgcctagtgaaactctgaaagcaaaaatggtacctgagaaagttccccgcagatgtgctactgttgctgcaaataaaataaagataatgagtaatctaaaagaaacgatctcaggaccagaaaatgtctggattaggaagagtagcagaaaactgccccatcgaaatgcttctgctgcggctaagaaaaaattactgaatgtttataaagaggatgatacaaccataaattctgaaagtgaaaaagagctagaagatattaatagaaaaatgctttttttaagggggttcagatcctggaaagaaaatgcacaatagtgactatgagaatgtagaagtggcatctgaaaacaattggtacacaagtaaactggcagttacattctgctcccagctctaaaattactcccttattggcatctttggaggaattttctaaaagccataatccagtgggttcctcccagtcagctcttgtacagacatgtgctctggggaattctgaggaggaaataaattgcagagtctgtaggtggagaggtggaaagaaaagacaaatggcctgctataagactactattcctttccagaatgcaaggccttgaagacatgattccttagaggaagaatataatgggaagtgtacaggctaggaagaacttgaagtgaacaaatttcaaaatcttaacctgatgctaattttcagggttctccattacagtgtaaaaattcagaccacgacaactatggtgtcatgaggaaaaaaaatcaggcatttttccaaaggaagtgctaatgggcctatttgacttctgagtgaagcaaaaactacccagatccattccctacaattcacatccccaaaggtcaaaaacaaactaggaggacctgggaatttcagctggagatactgattattgagttctgaagtagagtgttggaaataggcaattagagaaagtccattgatgtcattttgtttataatattgcagttcatactgaatgaccacttgatatgactaattcagggaatatatatttttctatgaaagctatgaatgttactatcacggcttttccttatttttacttgtatgtagcagcatttacagaaatgccaaaaatgtgcctcattaagaggcaggtcttaatcagttagataaaaataaaatgtatagcttaagatcaaaacagtcatatttttagatacagtgaaatcttttatgtttctctacagcaccttaaaaattagaacttgaatactttgagtaaacttactacaatctcatcccaacaaactttaatggtagcatgtttggcctatttcattgtggcctgtactaggattagaaaatttggtcgtggtataacaaagaagtgtatttacaataggatttaatttgttgttaatatgtatttgttgaaattaaaattgccagattaaatgaatatactgtcgcatctttttaacatagtaacgtgttactggaaaaattaagttgttgaaagtaagttgttttcccatttaaaaatatctgaatatatgatttgcatgtgtaaatctgaaaaactaaactacagaaacctagggttttctatttcttttttaagtcaaatgcatttttttttttgttatacagatgaaccaagtgtctaaaatacttgagaaatttgtggttgcatgtctgttttaaaaaaaaggctttttgttttttagcataagccagaatattctaacctactaagtctgtgtcctttgctccttttgtagtatactttcatctaaattactgatccccaatatgttgatacacaggtgagaaagggaagaattcctaataaactgctattacttttaggtgc

SEQ ID NO: 332400 - DNA, 9402 bp, Homo sapiens
ggtccaggcggcgcgcacggtatggcggcggcggcggcggcggcggcggcgcgcgcctgagaagaggggacgccagcccggtcaggcctcggcgcggcctacacgctccgctcgctcgctcgctcccgcctcccgccccgcgcccggccatggcggagccgtcgtccgcccgacgcccggtgcctctcatcgagtcggagctgtacttccttatcgcccggtacctatcggcgggcccgtgtcggagagcggcccaggtgctggtgcaggagctggagcagtaccagttgttgccgaagagattggactgggagggcaacgagcacaacaggagctacgaggagttggtcttgtccaataagcatgtggctcctgatcatcttttgcaaatctgccagcgcatcggtcctatgttggataaagaaattccacccagtatttcaagagtcacttctttacttggtgcaggaaggcagtctttgctacgtacagcaaaagactgcaggcacacagtttggaagggctctgcctttgctgctcttcatagaggaagacctcctgaaatgccagtgaattatggttccccaccaaatcttgtggagatacatcgaggaaaacaactcacagggtgttccacttttagtacagcatttccaggaactatgtatcagcatataaaaatgcacagaaggattctcggacatctatctgctgtttactgtgtagcatttgataggacaggacatagaatctttacaggttcagatgactgtttggtaaagatttggtcaacacataatggccgcttgttatctacattaagaggtcattctgcagaaatttcagatatggcagtaaactatgagaatacaatgattgctgcggggagctgtgataaaattattagagtgtggtgcttgagaacttgtgccccagttgctgtgctccaaggacacacaggatcaattacatctttacagtttagcccgatggccaaaggctctcaaagatacatggtttccactggtgctgatgggacagtttgcttttggcaatgggatttagaatccttaaaatttagcccacgtcccctgaagttcactgaaaagcctaggccaggcgttcaaatgctttgttcttcttttagtgttggtggtatgtttttagccacaggtagtactgatcatgtaatcagaatgtattttttgggttttgaagcacccgaaaaaatcgcagaacttgaaagccacactgataaagtagatagtatccaattttgtaacaatggtgatcggttcctaagtggtagcagagatggaacagcacggatttggagatttgagcagttagaatggaggagcattttattggatatggctaccagaatctcaggggacttatcttccgaagaggaaaggtttatgaaacctaaagtaacaatgatagcttggaatcaaaatgatagcattgttgtcacagctgtgaatgatcatgtcctcaaagtgtggaattcttacactggacaactgcttcataacttaatgggacatgctgatgaagtatttgttctggagacacatccctttgattccagaattatgttatctgcaggacatgatggcagcatatttatatgggatattacaaaaggtaccaagatgaaacattattttaatatgattgaaggacaaggacatggagctgtgtttgactgtaagttttcacaggatggacagcattttgcctgtacagattctcatgggcaccttctgatatttggttttggatgcagcaaaccatatgaaaagattcctgatcagatgttcttccatactgactatcgaccacttattagagattctaataattatgtcttagatgagcaaactcagcaggctcctcatcttatgcctccaccattcttggtagatgtagatggaaatcctcatccaaccaagtatcagagattagtaccaggccgagaaaattctgcagatgaacatttgattccacagctgggctatgtggcaacaagtgatggagaggtgattgaacaaattataagcctgcaaaccaatgataatgatgaacgcagcccagaatcgagtattcttgatggaatgataagacagttgcagcagcagcaagatcagagaatgggagcagatcaggatactattccaagaggactttcaaatggtgaagaaacaccccggagaggttttagaaggctgagcttagacattcagtcccctccaaatattggtctgcgtcgtagtggacaagttgaaggtgttcgtcagatgcatcaaaacgctccacgcagtcagattgctacagaacgtgacctgcaggcttggaaacgaagagtggttgtaccagaggtaccactaggcatatttaggaagctggaagacttccgattagagaaaggtgaagaggaaagaaatctttatataataggaagaaaaagaaagactcttcagctctcacataagtcggattcagtggttttggtatcacagtctagacaaaggacatgtaggcgtaaatatccaaattatggtagaagaaatcgtagctggcgtgagttatcttctggaaatgagtcttcaagctctgtaagacatgagacttcctgtgatcagagtgaaggttctggttcttcagaagaggatgaatggagaagtgacagaaaaagtgagagttacagcgaaagttcaagtgactcttcatctagatattccgattggacagctgatgcgggcatcaatttgcagcctcctttaagaacatcatgtcgtcgacgaattactcgattttgtagtagttcagaagatgaaatatctactgagaatttatctcctccaaaaagaagacgaaagagaaagaaagaaaataagcctaagaaggagaatttgcggaggatgactccagcagagcttgcaaatatggagcatttatatgaatttcaccctccagtttggattactgacaccacacttagaaaatctccttttgttcctcaaatgggtgatgaggtaatatattttcgacagggtcatgaagcttatattgaggctgtaagaagaaataatatttatgaactgaaccctaataaggagccatggagaaaaatggatcttagggatcaagaattggttaaaatagttggaatacgatatgaagttgggccccctacactctgttgcctaaaactagcatttatagatccagcaactggaaaacttatggacaaatctttctctattagatatcatgatatgccagatgttattgactttcttgtattgcgtcaattttatgatgaagcaagacagaggaattggcagtcttgtgacagattccgctctattattgatgatgcttggtggtttggaacagtgttaagtcaagagccatatcaaccacagtatcctgatagtcatttccagtgttatattgttaggtgggataatactgaaattgaaaaacttagcccatgggacatggaaccaattcctgataatgttgatccacctgaagaattaggagctagtatttctgtcacaacagatgagctagagaaattgctctataaaccacaagctggtgaatggggtcagaaatcaagagatgaagaatgtgatagaattatcagtggtatagatcaacttttgaatcttgatatagcagcagcttttgcaggccctgttgatttgtgtacatacccgaagtactgtactgtagtagcttatccaaccgatctttacacaattcgaatgagacttgttaatcgattttacaggaggctgtctgcgttagtttgggaagtcagatatatagaacataatgccagaacatttaacgaacctgagagtgtaattgcaagatcagctaaaaagataactgaccaacttttaaaatttatcaagaatcaacactgtacaaatatctcagaactttctaacacatctgaaaatgatgagcaaaatgctgaggatttggatgatagtgatcttcctaaaacatcttctggaagaaggagagtccatgatgggaaaaaaagcatcagagctacgaactatgttgaaagcaactggaagaaacagtgtaaggaactagtgaacttaatttttcagtgtgaagattctgaaccatttagacaacctgttgatttggttgaatatccagactacagagatattatagataccccaatggattttggaacagtaagggaaactctagatgcgggaaattatgacagccctttggagttttgcaaagacatccggctgatatttagcaatgcaaaagcgtatacaccaaacaaaagatcaaagatttatagtatgaccttgagattatctgccttatttgaagaaaaaatgaagaaaatctcttctgattttaaaattggtcaaaaattcaatgaaaaacttcgaagaagccagaggttcaagcaacggcaaaattgtaaaggtgacagtcagcctaacaaaagtatcagaaacctcaagccgaagaggttaaaatctcagacaaaaataattcctgagttggtaggttctcctacccagtctacctcaagtaggacagcttatcttggaacccacaagacaagtgctggtatctcttcaggtgttacttctggtgactcttcagattcagcagaaccatcagaaaggaggaaaagaaatagacctataacaaatggttctacattatctgaaagtgaagtggaagattctttagctacctctttgtcatcgtcagcttccagtagttctgaggaaagcaaagagagttccagagctcgtgaatcctcctcacgcagtgggctatccagaagcagcaatctcagggtaaccagaactagagctgctcaaagaaaaactggtcccgtttcattagcaaatggatgtggcagaaaagccactcgaaagagagtctatttaagtgattctgataacaattcattggagactggtgaaattctaaaagccagagctggaaataaccgaaaagtcttaaggaagtgtgctgctgtggctgccaataaaataaagctaatgagtgatgtagaagagaattctagctctgaaagtgtctgttctggtcggaagctgcctcaccgcaatgcttctgctgtagctagaaaaaagttattacataattctgaagatgaacagagcttaaagtcagaaattgaagaagaggagctaaaagatgaaaatcaaccattaccagtgtccagttctcacactgcccagagcaatgttgatgaatctgaaaacagagactcagagtcagaaagtgatttgcgggtagcccggaaaaattggcatgctaatggttacaagtcccatactccagcaccttcaaagacaaaatttcttaaaatagagtcttctgaggaagactctaaaagtcatgattcagatcatgcatgtaacagaactgctggcccatcaacgtctgtgcagaaacttaaggcagagagcatctcagaggaagcagattctgaaccaggaagatctggtggtaggaaatacaatacatttcacaagaatgcgagtttctttaaaaaaaccaagattctgagtgactcagaagactctgaatctgaagagcaagatagagaagatgggaaatgtcataaaatggaaatgaacccaatttcaggaaatctgaactgtgaccctattgctatgtcccagtgttcctcagatcatggatgtgaaactgatttagattcagatgatgacaaaatagaaaaaccaaacaattttatgaaagattctgcatcacaagacaatggactaagcagaaaaatttccaggaaaagggtctgttccagtgactcagacagtagtttacaggtggttaagaaatcatcaaaagccagaacaggtctcctgaggattactcgaagatgtgcagctacggctgccaataagatcaagctcatgagtgatgtagaagatgtcagtttagaaaatgtgcacactagaagcaaaaatggaaggaaaaaacctctccatcttgcttgtactacagctaagaagaaattgagtgattgtgaaggaagtgtacattgtgaagtaccaagtgaacagtatgcctgtgaaggcaagccacctgatcctgactccgaaggtagtacaaaagtgcttagtcaggctctaaatggagactcagactctgaagatatgttgaattcagaacacaagcacaggcataccaatattcacaaaatagatgcaccttctaaaagaaaaagttcctctgttacatcttcaggagaagattcaaaaagtcatattccagggagtgagactgataggacattttcttcagagtcaaccttggcacaaaaagctactgcagagaataattttgaagtggaactgaattatgggctgcgcaggtggaatggcagaagactcaggacctatggaaaggctccttttagtaagacaaaagtgattcatgattcacaggaaacagcagagaaggaagtaaaaaggaagagatcgcatcctgaattggaaaatgtgaaaatctctgaaacaactgggaattcaaagtttagacctgatactagttccaaatcatcagatttgggatctgtaactgaatcagatattgactgtactgataatacaaaaaccaaaaggaggaaaacgaaaggaaaagcaaaagtagttagaaaaggtaaaacttttacagctaacatatctaaaactgtgagacgtcaaagacaaagcaaacgccctaggttaagtgtggatgataatgactgggaggatttggactatgcaaaatctaaaagagttcttcgacgttcaaaaataaaaacgagaaatcagggtagaaggactgtgagataccatgatggggatgatgacagaagtttagaaaatgtgttagatttcaatggttgcaccttatgaccttgagggaaagccagttcatttaagaggaaatggactggcatttatggtgaaagctggctgttaaaattatttttttgtcttacaattcagggaatatatttatatttttctatgaaaagttatgaatgtgactaaatcatgactgttatttttatttgcacttgctggtctttgtagcagcattcagcacaggtgccaaaatatgcttcattttgggggcagatctattttgacagtatttgactacatatagcaagagtttgaaatatgttaaacactagacatcctggttatcaaaaccaatgagcattactttcatggcagcaagtgtcatgcagttattttctgaatttgtcaaagaggcagtagtttctaacccctgttctatagtagttacaacaatttcacaacctatgtttacagattcttcataaatacatgcatactgacactataatcatgggaggtgtaaccatgattagtaggcgaggtacctaccacttttttttttttcttcccctggctacttgagtagaatgcattataccagatctggtcactttcattgaaatggtttctaattttcttcccaagtgctgttgggtttttttcttcttaaggaaaacgttgtcacttttatgttataaacttgaatttataaagtgctggtaaattatttttaatgatttgagtgcatgttttaaacctctaggaccagagcatagtcagagcattttcttttaaattgtgcactaacaaaatgctatataatctgtcttctgtccaagatctcctggtttccattgtaagggatttaaccaaaatcttgctcttccataatcttactctgtgaaatagaggaattcgtgtgccttagatttagaagtgtgttctttaatagagtgtacagggctaaaagagtatttaagttaatatgtaggtttcccccatctgtattccaattgtagaggtgagttttgttaagagtacaattgcaaatcttatctatataggaaaatagctaaatgtcattctccatctctttgttttagtttactgcttccatgtgcaatcctaagcattctttgctggggcaactaaatgtatctttattagtgacttctagtccaaatataagaaactgtcatgttttgtgggaaaataattttataatccatttaaagtgaaagtttatcacacaaatagtacacttattttctaaccaaatacttgataggttatgctactccagtgtagatggccattcctaacttgtttgtgcctgaagatggacttgattcaaatggtttacatatttagtgggtaagggatatgttacagtaccccacctgtaagttatttattagccctaattgtgtttgatttcagacaaaattaacccttttctcctgtgtatctttgaagtggcagataaggtgaagcatcagactggtatcaatattagacaatgttatttattagccctaattgtgtttggtttcagacaaaaccttttctcctgtgtatctttgaagtggcagacaaggcgaacatcagactggtattaatgttagagaatgttctgaagtgttcctattttgtagttatctattccatttgacatagtagaaggtacattttctttctactctgatgcatggggaaggatgtttttggacattatcaactgagataggtgggaaacctcctctcatttgtggcttagagagctatcaccatttcagaactatgatgcttttcttctcagaacttgtgttaagtagatagtaaacagattgattcatgataattgtccttgactaagactgaaaagactaatgggatgccttttactttgctaattttaaaaactggtgatagatgtcaaatccattaatttatttaaactcttcttaaccttctcttttataatctgttctcaggttttaactccatgtttaccatcatttgcaaaaaggtaccaaaaaaatccataaataaatatggaatacattcataagtacatacattcttttggtataaaacaatattttgacagtttaggcttcattaatagaactattctgattatttggactgcattaattggtcactgactggccatccaattaccattttttctttcagtccaaaatagttagacccttgcatacagaagtggtattttggtttttaatcagatttggtttcatcagaagcagcaagaatggacctgatgtctttaaaagcatagccgacaatggtagcttctcaagttatgaaataaaactgagagataatggagaaaataatttttatgggtttttttggttatggtgctattcctaaggttaactttgaatatgtgacacacacactcctaagtacctttaaggaaaattaataaatcattaatagttaaaatgtttacattgagcac
